United States Patent Application Publication US 2020/0377945 A1 - sequence listing, part 19

SEQ ID NO: 3779 - DNA, 120944 bp, Unknown
  gut microbiota DNA sequence
gaaggggaaatagtaaaacttttgagtgttaactctataactgcttgctttttagttacttatgatggctggcaggattagagaatatgccttttgtcgaactatggacagcttgcataataatcacccagacatgcagggaacgatgcaatctgtaaaagaaacaacagaattgcgtcaatggttcgtgatgcgtgatttgaaaaggggaaatgctaaacagcctgcctataaattgctcggtgaattaaaaatcagattttttactccgatggtgtggaaattgagaattcgtcagggcaaacgtgttcgtcagcaggttccttttatgcccgatttgttattcgtttatgattcccgtaaagtacttgatcctcttgtagaacaaatcgctacgttgcagtaccgttttataaaaggtggcaaccgccagcctatgactgtaagaaatgcagatatggagcgtttcattagagctgttgacgcgatgaataatccttgtttttatactcctgaagaaataaatccggatatgctaggaaaaaggtacgtatcgtgggaggccttttggatggttatgaaggatgcttgcaaaagatgcaaggctcacgcataaaacgtttgtttgtggaacttcccaaccttttgacggcgacagtggaagttcagcctgaatttatccaagtgttgaaatcgtaattttttaggctgtgacggaacaagcagaaaataccaagcgtattgctaagaatacgttgatgttgtatgtgcgcatgctgtttggcatgctggtgtcgctgtatacttcccgtgtggtactgcaggcactgggagtagaggattatggtatatacaatgtggtaggaggagtagtggcgatgttctccataatttctaattctttgtcatcgtctgtcagtcgctttttaacttttgaattagggaagggaaatatggaaggtctgaaaagagtgttttctacttctttgactattcaagtcgtattggctgttatgatagtcttgctaagtgagaccatagggctctggttcttggatacccacatgaatatacctataaatcggttgtatgcagcgaaatgggtttttcatgcttctgtttttacttttgtaataagtcttcttagcgtaccgtttagtgcatccattgtttctcatgagaaaatgagtgctttcgcatatatcggtatattggatattattcttaggttgttgattgtgttgttcattgcttattcgggactggagtttgaccgtttgatcgtgtatgctttgcttttggttggcgttgtatgcattatgcaagctatttattggaactactgcactcggcattttgaggaatgtaaatttaggttgagttttgattctggttattggaaagaaatgagttcttttgccggatggaattttattggagggtcagctagcctattaaaagatcagggcgtgaatattttattgaatttatttataggtccggttattaatgcagctcgtggaattgctaatactgtaaataatgtattggtttccttttctaataattttatgacggctttgaatccgcagattacgaaatcctatgcggctgctgattatggttatacgatatcattagtagagaaaggatcaagattttcctattacatacttttgttgtttgctctgccaatattgtttgaagctgaatttgttttgactttgtggctgaaacattatcctgagcatacggtaaattttgtacggcttatcctgatcgtgactatgtgtgatattctttcgaacacattaattaatttaaaggcttcaacaggaaatgttcgtaattaccagattgtagttggtggcttgatgttgatgaattttccattgtcctatttttgtttgaaaataggttttcctccggaatcaactttagttgtagctttgttggttgcagtcttttgtttgtttttacgtcttttgtttttacgtgaaatcccaggcttttcaatgaaacgttatttaagcaaggtgtgtggcaatgttttaatggtaacgtttatttcaataattctgcctttgttactatgtgtgcagatgtcggatggtatagtacgtttctttctgatttgtgtagttgctactatatgttcttcaacttcaatttattttgtgggttgtagtagaaatgaacgcatttttataaaagagaaagtattttctattatgaaaagagtcttttagcatattatgttttatactgtgtttatagtataaatcatatatgaatatctgttgtgtaattttttgatgacatggaattagcgggtaaggaatcatgtactggatgtggggcatgcgcttatgtatgtcctaaaaaatgtatttcatttaaaaaagatgaaacttattatgatatagcttatcctgtaattgatgaaaaacagtgtattaattgtggaaaatgccagaaatcttgtcctgcattaaaccctttggagcgtgctactcctataagtgcttatgcggcatggagttctgattctgaagaaaggcgtacaagtgcttcaggtggagttgctgctgaaatatataaatatgctcttaaaaaaggatggagtattgttggagcttctttttgtgaagattttaaagtccgtttggaattagctgatgatttggatgcaatcaaaaaatttaaaaattctaagtatgtgtttagttctacggctgatatttttcataaaatagctcaaaagttaaaggaaggaggtaaaattgttgttatagctttgccgtgccagattgcagctattagaaaaatttttcatgataaattagatgatttattactggttgatttggtttgtcatggtaccatgccctatgaatatctgaaacaatatataggctatatagaaaaatcgtattgcaaaaaagctgtgcggcttacgttccgagatccggcaaaaggaacagaaaattttgctttgtctttgtatgatgaaaaagatgtttgtttttattcttgcgcaagttttgaagatatatatcaatttgcgtatcattgtatggtggcctatagggaaaactgttaccattgttgttatgccaacagcaatcgggtgtctgatataactttaagtgattataaaggtttgggggcttgctcgccttgtaagtttttagaaaaaaaagttagcagtgttttagtaaatacaactaaaggcagagaatatattgatgaattaattcataacaatttgattgtggttgaaaaacggccaattgaagaacccattaaaggagattcacaattacgtcatccttctgttaaatcgttttcacgtcgtctttgggagaagaaatacaaaaggaactttgtcaatgtaactctatatgtttataaaatgtcggaatttaggaatattctacttgggatatattacttgcctaatcgcatatttagaaaattatataggattctttcatcataaagcatgtttaaatgaagattggaattatcacggtacatagagcatataattatggttctgttttgcaatgttatgctttacaagaatatttgaaaggtttggggcatgatgtttgggttatagattatcgtcagaggtggaccgattccatgtataaaccgtttagtttgtattatatctggcattttataaagcaatatgatattcattcaattgtaggttattggcggtctagaaaagaaagaaaatataaccttggtatagcaggtaaaatatttaagtctttttgttcacgatatttgcgtttgacagagtcttgtcggaataaaatacctcaaggttttgatgcatatattattggaagtgatcaactatggtctcatcaatgtatggggggggaggataaggtttatatgggttttttcaatcattccaactctagtaaagtgataggatatgcaataagttcgagtacagattctctttatagaattggtgataaaaaattgaaacggatattggctaattttaataagatttctttgcgggaaaaaagcaattcaaagattgtagaacaattaacaggacttacattgcctgtaacgattgatcctacgttgttagcagatgaaagtatatggaagccaatgataaatgcagaaaaatggagtaatcgtaattatattgttatttatcaagctcgtcctgtttctggcaatcctacatatctgtatgataaggcttcaatgatggcatcacatgaaaatggtacggagatagttgatttaagttcaatgacctattctatagaagattttatttctgctataaaatatgcaaagtgcgtgttttctacttcgtttcatgctgtagtattttctttattaatggaaacgccatgttatgctgttcgattaggtgatggctttgatgttcgctatgtggatcttttaatgaatgtcggtttagaaaaagaaattgttaatatagatttcgttcctgaatctctagatattgattttaaaatagcaaaagagaatttggtcgtttatagagagcaatcgcaacgttttttagcatattgtgttttataatgtaattattgttacaatatctattgactgtatttgtaaaggaatactacatatttcgggtatatgtatgtacacttaaacatattataatacaatgaaatcaaaatcgtatatcagtttatcctttttgagaatagtatttatttttttgatatttcttgaacactatccaataacacctttgcgggtaggaggaaaagctgtttgttttttctttattttgagtggctttgtattatcttatggttatggaaacaaattaagcatagagggtataacatataaaaactttttagtgcctaggttggtaaaactatatccattgcattggttgttacttccacttggtatctggataggaagagattttttgaaacaaacttgttattatcttcctgctaaatcaaatattatcgattgaatggttggtggggaaatttgataaaatcagttgcttatcgtttagaatatatcgcaaataaaataaataagagatctgatgagtcatttagaaaagggtctgagtgggtaagtattactgatgatttttgccgttatttaataggaaaaaagaattggatttttaaacgtttcaggtatacattttgtggagatgagatatttctccaaactgtattgtggaattctccatataaggaaaatatttatgcattggatgatgaatttaaagggtgtcagcgtgaaataatttgggaagacgataatcctcatgtgtggggaagttcagttggcgatattgacattttgcgcaagtctgataaattgtttgctcggaaatttagctcaaaatatcctgagataataaaagaagtgcaaaagatggtgaagtaaaatataatatgtttgtattttgactatggaatccaatgtagtttctgtaattgttccggtatataatgctgagaaatatataaaagagtgtgttcaaagtgtcttgtctcaaacttataaagactgggaactaattttggttgatgatggtagtactgattgttctggaactttctgcgatcaatttgcacaagtagatagcagaataagtgtcatacatcaagaaaacgcaggcgtgaccagggcgcgtgccaaaggcgttttttcatctactggaaattttgtctattttcttgacgctgatgatacaatcgaaaatgatactttagaatatatggtggcacttttcaatgatgacattgatttggttgttaccgattataaaaagaatttcattttggaatgggaaaaatatgcagaaattctcttgggacatggcttatggtatgcttgtatgaaattatataggagaaggttatttgatgaatatgtttttgatactccgcgatattttaaaactggcgaggattttcttatgcaacttcgaatattgaagaatatgaaaggccgtgttttatgtagtactgtttctaagtatcattatagagaggtggaaacatctgcttcacgtgcatttgtacccacaatggaatatgaaattcaaatgttgcaccaggttcaaaaacttatatccttcttacccgaatcagaaagattggcttatgctcattttaaattccgggttgcttggttgggaggtatgatagggcttcaatatcctatctcatatcaagataaatgggttgtagatattttgcgtgacagtactcaatataagttgaccttaaaagaaaaaatctcagtattggctgtgcgatggacttgttttaggtgttttcttatttttgaaaaaaaattaaagcatttgtataggatatgtgtgaaataattatattatgttggaaaagtgtttttatgcatatccttatgcaattctgaagaaacataacatacttattcaatcactattttatgatgttttgaagaatcatactttataatctataacaggatatgcttttaaagtcagagtctgtacaattgaaaggagttgccattatgacaatggtatttcttcacttattcaatagagctgaaaatgttgatttatgtattaatagtgtgtatttgtttaatatacctttgacttctcagttggcaaaatttgcggaaatatgtgttcctctgtatctttttttaagtggatatggtctatatatattgtatttaaaaaataataatatcagtccttcaagaagaatatttaagttatatctgaatttttggacagtttttataatatttattcctttaggatgtttcttaaagccagatcagtatcctggaaatttattgaatattgtggaaaatgtgacggcatggagaacaagctataattgggaatggtggtttatatttccgtacataatcttgttgtcttttgctaatgtactatttaaatgtattaggcaatatggtttttggtcaatagtcgtatcttcaagtatgatttatgtcgtttcatacttatgtatctctttttataagtcgtatttattagagaattacttgatttttattatattagaatcttttgaaatggtgtgtagttttgtatggggagcattatttgttaagtacgatatatttggaaaaatagaaagaactttcaattttaagagcaattatgcaacagttataggaatattaataattattggacttatattagtacgatcaataattccaatacatgcagctcgtattttgtttatgatagcatttgtctgcagttatatgttacttaagcggaacacaatgataaatgtctttttaatgaacattggtgagaaatcaacagctatatggttgattcatacttttttctgttattatttctttcatgacttcatttatggctttaaatatcctattgtaatttttgttgtcacatttttattaagttatgtttcagctctatttatagataatttgtatcaaaggatgtggaacaaactatcaaaatatttttgatgtatagtaatatctatgagtgatttcgtttaagcattctgtaatttgactaattttattaatggattataggtgaaaatggtaatgtttgatcttttgatatctactatattgaaaatgattgttgatcaacatgaaggaaaaaatggagtatattattattgggaaataatttacggtcgttaattctgttgggttttatattgtagtaagtagtaaaggttctattttccgccttgacaagtatcaatttctggtatatttttgtgtcataaccttataataataatgattatggcaaaagagaaagtaagctaccaggaggtgtatgacctctaccagcaatgttgcgagaccaaggatcttggagagttctatgctgattatagagtaaaatacgacaagttcatgaattggcagcgtcactagctgtggggcgagaagttaggcaagacagttcatgttgagcaactcaaggttgccaaagtccagataatcggtaaactatgcaatagtccaactgtgaagatggaagtgaaaaactggaaggtgggtgaagttacagctgacatcgggcgctacactattcctgagaaacgcaacagttctagatctgagcctgttgctcaataaaatgataggatgatatgcttggactgagtgctaacctgaactattacctgtttaacgataatgttgatttttggaaaggaatcttccgacagtgtgagagtataaggcaagagatgtctcttgagccaagcgatattcatggtaaggactgctacaagaaagcacttcagctatgttttataaacaataatgttaaaccaaaattttttctacaaatatttttttctttattgactgtaaaaaagtcgataaagtcggtttggcgtaaaatagaattattacagattaaatatgcataaaatattgttctttataccttcattatgtaactcgggaggaacagaacgcatttctacaatattggctaataatttggtctctaggggaatttgtgttgattttgtggtacattctgttactattgatagtttttttgatcttgatgattctattcacatttattctttaggcttcaatgggaatattaatgcgaataaattaaaagcagctttacgtttgcgtaaattgataaaattgaatcattacaatgtgattgttaatgttggtgttgcatgtagttgtattacatttttgtcagctccttatttaataggatgtaagataatctcatgggagcatttttctatttgtggtttaaattttttagggagattaaatcgttatttagctgtttgtttgagtaaacgtacgatagttttgacacatgctgataagtttgcatatccacgtgttttacgcaaaaaaataaaagttatacccaattttacttgtataaataaggaagggaatagagcttctcttgaaagtaaaatagtcttggctgcaggtcgcatagaagtaataaaaggatttgatttacttattgaagcttggaaagaagttaaaaattattatccaaattggtctttacgtatagttggtggaggatgtacatgtgatttgatgcaaaaagttaaaaagtacaatttagaagatgtgatatatttagtcggacctacaacgaatatggatgtagaatataaaaaatcatccatattcgtgttaagcagtagggctgagccttttggattggttgttatcgaagctatgagttttggtgtgcctgttgttagttttgattgtccaaatggtccacgtgaaataattgatgatggcattgatggattattggtcgaaaatggaaatgtaaatgctctgtctgctgcaataatgaaaatgatagcagatcaacataaacggaaaagaatgggacgagcagctattcaaaaatataataataaatttacggttgataaagccattaccatttggctttctatattataattatatgaagaaagtttcagtaattactccaatttataatgtagaacattttattgcacattgtgtggtaactcttatgcagcagacgctggatgaagttgaatatattttcgtgaatgatgcgacaccagataatagtataaggattttaaaagaagctcttgaaaattttccagagaaactgtcacaagttaagattctgactcatgaagaaaaccaaggattgcctgcagcaagaaacacgggattaaaagttgccacaggaaaatatatttttcattgcgatagtgacgattttatggagccagacacattgaaggtgctttatgacacggcagaagaacaggatgctgattatgtatggtgtgattattttatagcatcgacaaatgatagccaatataaaaaacaaagagaatataaaaataaagatcaggccttacgtggtgtgctgtgtggagatatggtatataatgtgtggaacaagttagttcggaaagatttgtatgataataatgatataacttttccagcaggccatgcaatgggagaagatatgacaatgataatgttgttggcatgtgcttcgaaagtagcttttgttcattatggtgggtatcattatgtaacaacgaaccctatggcgttaaccaaaaaatattctgatgatagaagtataaatgatttaaaatataatgttcagcgtacggctgattttatatcaaaaaagtttggtgatacatatacctatgagactaattgtttcaaattgaatcttaaatggttctttttggcttttagtgacaaaataaaaagttacaagttatggtatgaaagttttcctgaagcgaatcaatgtatctttcgcagaaatgtcagtcttcgggtaaaattagtagaatggtgtgcatccaaacgactattttggttggtaaagttacattatttactggtcattaagttcttttatacaataacaggaaagtgaatattttgatatggaagctattgtaaatatggcatgtggcttggcaaataggatgtttcagtatagctattatttgtatctgaaaaaaagaggatggcaagtaacagttgatttttatcggaaaagtaaactgcctcacgaaaatgtagattgggaacatatatttcccaatgcaaaaattgaacaggcttccaaactaaaagtgctgataaaaggcggaggggcctatgctttatctaagattcgcagacgatatttaccttggactacgcaagtcttggaaatgccaacggcatttactgtggaccttccccgtgaaaacggtcaatatatgatgggggtgttccaaaatgcggatatggtggaaagtgtcagagatgagattttaaaggcttttgcttttcatccttttagtggtggagagaattttcgcctgatgaatgaaatgctgaataataagtattctgttggtattcatgtaaggaagggaaaagactatacaaaaagagtgttgtaccagaatacttgcagtatagagtattataaaaatgcagtggaatatttgaaagaaagggtaaggtcgcctaaattttatgtttttacggattctcctgaatgggtaaatgaaaacttctcattttttgattatacattagtggaagggaatccatgtgtgggatggggaagtcattttgatatgcaactgatgggctgttgccatcacaatattatttccaacagtacttatagttggtggggagcgttcctcaataagaatgaggatagtattgttatatgtcctaaggtatggtttaatccacaatgttgtgatgaatgggacagtacgccaatttgttgtaagacgtggattgcattatagttttgagtgtttatgaaagtttctgtaattgtacctatttataaagtagagcggtttatagcacgttgtgtgacttctttaatgaagcagacgttacaagacgttgagtatatttttgtagatgatgcaacaccagatcaaagtttgtcgattttacaagaggtacttgttgcttatccagagcgaaaaaaatatgtaaaaatattacatcataaagataatcaaggcttacctgctgctagaaatactggtttggaagtatctgaaggtgaatatatctttcattgtgacagtgatgattatgtagagccggacatgttggaaactttatacaatgaggctttaaaaaataatgcagatattgtttggtgtgactggtttctaacgtttgggcaaaatgaacgttatatgaaacaaccaaactataatactcctcttgaagctgttaaggctatgttgggcggagctatgaaatttaatgtatggaataaattggtaaagagggaactatatcaaaagaatgcgattacatttcctgcaggatttagtatgggtgaagacatgacaatgatacttccttttgtatttgcaaagaagattcattatgtacctaaagcattttatcattatgtcaagactaattccggagcctatacacagaatcattcagaaagacatttgaaagatttacagtataatgtagcgcgtgtagaaatgacattgcgtcagcgtttgggtgcttctttagataaagagattgctttttttaagttggaaactaaatttccacttttaataatgggaaccaatagtcaacaatacacacagtggtcagagttatatccagatgcaaatgagtttatttgtcaaaatacttatatctcatttcgttctcgcatgttggaatggtttgcatggaaaaaacaatggtggattgtaagactctattattgggtaattataaagtttgtttacggtgtaatttataaataatatgtttaggttcttaggtatagctttagctatgatattgaccagttttgctattttcccaatagaattagtatggtttcctggattaacattaaaaacagctatggctccattgggattagttatgttattgattaattttgctcggcagagacgttcggttttggattcaggattcctgtgggttggtatttgggcagcggcagtatcttttatcagttttgtatctataacctataatgatacgaatgacaattcttttacaggatattttatatcaatgcttgtatgggtatgtgcggcttatgtagctgttagtgctattaaggccgttcatggaactgtatcagtaaatttggttgcgaactatttgattgcaatgtgtgtggctcaatgtgtattggcatttgttattagtcaggttccttccattgaaaatttagtaaattctattttccttactggtagtaaggaaatgacgaaaggacgtttgtatgggattggagccggtttggatattgcaggattacgttttatggcagttttgtctattattatttacatggtgacacacctttctgagaaagaagagaaaaaatattcattattgtatattgctgctttttttattatcgctttgattggtaatatgatttcccgttcgactgtttttggtgtatttataagtttagcttatctgattatagcttcaatctttaaattttcgcaaaaagatattataaaacgaatatggaaaaagttcttattgttaatgggggcattgatattaggagttatagtcttgtatcaggcaaactccagttttcgtaatagcatgcattttggttttgaaggtttttttagtttatatgagaaagggcaatgggaagtttcatcgaacaatagtttaatatggatgctgaaaaacataaaaccagaaaatacgaggacttggataatcggtgacggatattgtggcgatcccaataatgatccttattacataggtccgcaacccaaaggtggttattatatgggaacagatgtgggatatatgcggtttattttttattttggagttataggtacattgatttttatgatatacttttatcaggtagcctgtgtttgtggtagctattttcctaaatataaggatatgtttttcctgattttagtgtgtaattttattggatggataaaagtttctactgatatattttgtgtgtttgcattattcttagcagtacacctcgtaatggaaactactaatgttgataagataggtctctcacaaaaatatctaatagatgattaatctgtaagccttttcgaacgtaatatgtgtggaatagtagacaatgtgacgggaagaactgttattgagcttcggatttgatgctttttcaattatattgaaataaatatagaacgaactctactaatgtcttgtaggaaggtttgatattcctgaatgattgaaaaacgtgagtttccgttgacgaatacatggcgagtaggtaatttatagaaactaacggattatgttttgtatgaatacagatttaggatattcttagttttatttcttgtctgaccttttgacgttatgtttaaatattcttcaataagatgaaaaggaaagtaagttcccttatagaaaagattgagagataattagaacactatgaagattatttattgtactcactctacatacaacccaggcgggatggaacgtgtacttttaaataaggtgacatatctttctgcattgcctgaatgggaagtctccgtggtgactaccgaccagcaccaacgtccttctttttatcctttcccagagaaagtacgcatgacggatctggaaatcaactattcggacgacaacgataaaggtatatggaaaaagataaccagctatctctgtaaaagaaaggagcataaacggaaactgacggcattgctcctgaaagagaaaccggacattgtggtgtcgctttatccttctgaatcctcatttattcctgatataaaagatggaagtaagaaagtgctggagttacacttcaataagttttttcgtatacaatatggaagaaaggggattatagggcttattgaccgctggcggacacgtcaggatgaacgaattgtacgtcgctttgataagtttgtggtgttgactaatgaggataaaggatattggggaggtttaccaaacatcgaagtgattcccaatgcggccatacatgtgagcaaaaactactcggaggtaaaaaacaagagggtcattgcggtgggacgtctggactaccaaaaaggttttgatcgtttaattcaagcttggaagttagtacaacatacaggacgattttcagattggaaactggatatttttggccagggagaatggcgggaaatgctgcaacaaatgattgataaacaaggattgcagaatacagttaagataaatccaccaacaaatgcaattttaaatgaatatgtgcatagttctttattagtgatgagttctaattatgagggatttggaatggttttggtagaagctatgtcgtgtggggttccagtgatttcatttgattgtaaatgtggtccaaaagatatcattcagcccgggataaacggtttgttggttccgaatggagatattcaggcgttggctgatgcgatgatgaaagtgatggaggatgaagcttatcggaaaatgttgtcgctgaatgcccgaaaagtggtggacacttattctgaacaggcagtcatgtcacaatggattctcttgtttacttcaataactgcaaaatgaaaacattgcttcagataaatccggtgctgcgtgtctctacttctacggggcgcatcatgcaggaaattggagaactggctatgcagaacggctggcagagttacattgcttacagccgtggacgtgatggcataaagccttgtagttcaaagctggtgccggtaggtagcaaatggagtgtagcatggcatgggctggaaacgcgcttgtttgaccgtcatggactggcttcttcattcgctacccggcaatttatccgacagattgaacggattcagccggatgtgattcatatacacaacattcatggctatttcctgaactatcggattttgttcgagtacttgtcaaaatgcaatattccggtagtgtggactgtacatgactgctggctttatacgggacattgttattattattcttatgtgaactgtaaccgttggcaggatgggtgcggagagtgtcctcagcgtaaggaattcccggcaagcttgtggatagaccgtagccggcagaactatcttgataagaaggaggcttttacttccatgcctcaggacaaactggtgattgtgccggtatccgactggataaggtcggagatgcagaagtcttttttctgcggatataatttccgggtgattcataatggtatcaatacggaggtttttcgtgtgtacgatgcacaggaagtaagggagaaatatgggctgggcgataagcatgtgttgctgggggtagccagtatctggagccgggaaaaagggctggatgatttcattcagatggctgctcttctgaagaaggaagaactgattgtgctggtaggtattaaaccggaggaaagaaagagactgcctgaaaatatcattggtatagcccggacagagaatatacagcagttggcaggattgtactccatggcagatgcgtttatcaatcctacctggcaggataattatcctacggttaatatggaggcgatagcttgtggtaccccggtggttacttatcgtacaggagggagtgtggaagctgtgacagatgaaaccggctttgtagtggagcagggtaattataagggattgctggaagcggcaagaactatacggcagcggggcaagtcttattatcagggccgatgccgggaatatgcattgatgcattttaaaaaagaagatcgttattctgattatatccgtttgtacgacgaactgacgaaacgtggttaatcgtgtaaattatttgctatgaatctttctgatggcttctagagtgaggctgctaaatattgggatgtgctgattgaaggtgcatatctattattctaaattaactcgaaaacatactcggataccctgaaatggtgaaagtggatgccggcctataaatgtgtaggtagtagcattttctgggaataaattgaagtctatgaatgtggaaaatctgaaagtattgcaactaggaaaattctatcccatacgtggaggagttgagaaagttgcatttgatttaatgaaaggactgtccgaaaggggaatcgaatgccacatgctgtgtgcagcagaggaaggggaggaccggattatcttgctgaatgagcatgcacagctgatttgcacccatacttgggttaaagcttgtgcaacgatgatttcgccttccatgattttcactttgcgtaaaatttgtggaaagtatgatataattcatgtacatcatcctgaccctatggcttgtttggccttgttcctttctggatataaaggaaaagtagtgcttcattggcacagtgacattcaaaagcaaaagttgttgctgaagctgtattatcctttgcagcaatggctgttgaagcgtgctgatgtgattgtgggaacttctcccgtctatttggcagaatcgccttttttacaacacgtgcagcataaaacggtctgtctgcctatcggagtagaaccgatgcggcctgtaccggaagcggtgaaggccctcagaagtgagtatccgggcaagaaaatcgtgttttcacttggtcgtctggtagcctataaagggtaccgttttttagtggaggcagcccaatatttgaaggatgattttgtggtgctgattgggggatccggggctttgaaggaagagctgcagaaggaaattgtttccttgaatttgcaggaaaaggtgaaactattagggagagtcagcgacgaggaactgcctgcctattacggagcctgcgatgtattttgcatgagcagtgtgcagaaaacagaagcgtttggtattgtgcagatagaagcaatgtcgtgcggaaagcctgtggtagctaccagaatacctcagtcaggagtgtcctgggtgaatgaagaaggcgtatcggggatgaatgcggaaccggggaatgcgcaagatttagcccgggcaattgaagcggtaacggaaaatgaggaggtctatcggaaattttcggaaggtgcgactaaacgttatcgtgacatgtttacgaaggaatgtatgattgataaatgtttaaccatatacttggagttatgaaaaatgtaaacaaagaagatgtcatgtccaaagccatgatggcttatgtggcaaatgaccattattattatccgagtgcggggatgtcggttacggcttgcagagtgaaacgtgtggctgatgtaattgtaagcttgatagccttgattattttttcgccggtgtttttacttatttcctggttaatcaagcatgaggatgggggaccagtgatttttagtcaggaacgtatcgggtatggtggaaagcctttcattttgtataagtttcgatcgatgtcggtcgattcggaatcggatggaaaaccggctctttgccagaaaaatgacagcagactgacccgaatcggacgtttccttcgggagcatcacctggatgaattgccgcaactatggaatgtgctgaaaggagaaatgagttttgtaggcccacgtccggaacggaaatatttcgtggataagattaaggccatcaatccggattatgagttattgtatcgtttgcgtccgggactgttttctaaagcgactctttacaacggctacactgatacgatggaaaaaatgctggaacgtcttagaatggatttggaatatatgcgtacccgctctttatggatggatattaaaatcgtatggcttacggccatgtccatttttatgggtaaaaaattctaatagctttgatatgaataagatagagatacgtaaaggaattcaactgcgtaagattggcaatcgctacatgattgtggatgcctgcgcaggtaatgtaaatatgagtaaagtgtatagcttgaatcagacggcagcatggatatggcagtgtgtagctgatgggtgtaccaccttggatgaactgacagaacgtttgtgtcaggaatataaagtcgatgcagaggtggcccgccgtgatttggagaaacagttggcagactggcaggcttttggattgattggttaggaaaggttttactgtgaaaaagatatgaagaaggtacagaaagcattacttgtgttgttgagagcagggttatgggagagcaggatagaagatttgtcttgttttccaatgtctgcaggggagtggaagaacttgtaccttttgtcaaggcagcagactgttaccggaattgtttttcagggaatacagcatttgcctgaacattttttaccggcagaagaattactggttcgctggatggcagaaacagatgctattgagcgtaaaaatatgcagatgaacaaggcgttggaattattggtgcaatggtttaccgaaagcggagttcagcctgtattacagaaggggcaaggaattgcctcgttatatgagaaccctttgttacgcgaatgtggggatattgatttttatttcgatagccggcagatgtttgaaaaagctttttctcttatccgtcagtgtggcttgcgggaaaaggtacaagccgatcagagtgtgacctacgcatggaagggagtagaagtggagcatcatacgtgcttgctggatttgcataatccttttttacaacgttatgcaaaagagctggaacagcaatatggatataatcacatgagattggaaggaggactggatgtaaggattccttctcctgtattgaatctcctgcttcagagcctacatattttaaaacatgctttgggatggggaatcggattgcgtcagttgtgcgatatggcccgcagttgctataagttgcatgatgaggtggaatctgaagaaatgaaaaagattgtactaaaattgggaatggacagatggcagcagttgctacatgcatttctggtggagcatcttggacttccagtggcttatcttccttatcaggagatagcttcagattcatcccctttacttgatattatctggaggggtggaaattttggcttgtatgttcccggacatcagcggaagtcacaatcgcttttggccggcaaatggcagacggcatgtgcttttcagcgtaatattcgttttgcatttcgttatgcgcccaaagaaggtttttgggtattttccagtttgttgaaaggacaattgaaatgagaatagaacatcagttttctatcgcaggatttgaagtgagtgtcagttttccggatggatgggatgctgataccttattaccctctttccgccccttctatggtaagaaggaggggcaggaaaaagctttgctgaagtgtacggtgtgtacttcggtggaaaataaggctgcgatgccttcgggtgaattaatcgagaatacgctcagcgatatgggctacgttagtttgtataaagaagcagaagggtattgtgtcacactttctgcagaacagggaggaacattgcatgtcatgcaggctgacagacggttttcaactgtcagggtgtatttgcacgaagaagacaaacgggcaggtcatgcattgtcttccttgcttcgcattgcctattcgcaggcagttctttaccgggatgccgtatccattcatgcttcagcggtgtattgtgagaacaaggcttttttatttatgggaaagagcggaacaggaaaaagcacgcattcttcgctgtggatgaaatatatacaaggaacggagctgctgaacgacgataacccgacattacgtatcgtggatggaaaggtgtatgcttatggcacgccgtggagtggcaagaccccttgttataagtcgctttcctatccggtaggtggaatggtgcgtttgaaacaggctccggcaaaccgttttgttcgccagcaagaggtggaagcttttattgcactttttccgggatgctgtgtcattcatcaggatgcggaattacgtgcttgcctttatgacacgttgattcggatggtagaacaagttcctgtgggagtattggaatgcagacccgatgaggaggcagccctgttatgccggaacatgttacttcgaacagacaaatagaaataaattactaataacttaactatacctaaacgtatgaaaaaaccagtctatttatgggcaagcttgcttgccgtgttgctgttgacttcctgtgcgtcgcgcaagaatttcgtgtatttgcaggatatggaaatgggactgaaatatcccattgaaaccaagcatgaggcagtggtgcatcgggatgaccgtctgagtattactgtcagctgcaaaaatccggagctggccatcccgttcaatatttacgatggtacattccgtgtaggaacggatggaagtgtgactgcagatgcttcgagcaaggtgaacgagaaaggctatcgtgtggatgtgaacggtgacattgatttccctattttgggcaagttgcacattgaaggaatgaaagtaagcgaagtgcgcgacttaatcaagcagaaaattgaagcgggagaatatatgaaagacccgctggtttccattgagttcttaaattttaaatatacggtgctgggagctgtgggaagtaatggaacctataccgtggacggggatcgcgtgacattgctggaagccatagccaaggcaggagatttgacttccaaggccaaagtagaccgggtagctgtaattcgtgaaatagagggcgaacgtcagatttttatgcacgacctgcgaaccaaggacatatttgattctccctgtttttaccttcagcagaatgacattgtatatgtagagcctaagtacaagaaaaaggatgtggaagaccggggatggcaggttgctacaactttgttgtctgtcgtaacggccgtatgctcaatcttgtgggcaatcaagtaaggatgattctaattaatagttacaaaacgatatgcagacgaacaattcttctaacaagaatgaccaagggctgaatatagtggatttattcatgtatttggcttctcaatggaagtggttcttactttccattttgatttgcggtgggattgcgtggtataattatgcccgtgctccgctggtgtactttcgttcggctacggtcattatcaaagatccgtcgaacaaagccagtacttccggtctggaccgcttcgataattttattaacaaggtgaatgtggccaatgaaatattgcagttccgttccaagaagctgatgcgcgaggtggtgcagcgtgtacatgccgatgtgagctatcagataaaggacggtttgcgcagcaatgagttgtacaacgaatcgcccgtattggtcagccttccggatgcattgcccgaacaaagcttctcttttacgatgaccttgaaagatgcaaagacggtaaccctctctgatttctcgggaattgaagcgaaaccatcgtatgaggtggcgttgaatgatacggtggcaatcatcgaagggatgaatgtggtggtaactgcaaccaattacttgcgtgattcctggctgaatacgcctatacgggtacagaaacttccggtagaatcgatggtgaattattataagaatgccttgggcattcagcaggaagaagaggaagcttccatccttactctggctttgaaagacagttcaccagcccgtgcggaagatgtgctgaatacattgattacggtatacaatgaagaggccatcaaagaaaagaatcaggtggcagtgaataccgctaactttatcaatgagcgtcttatcatcattgaacgtgagttgggaaatgtggaatccaatctggaatcgttcaagcagcggaatcagattgtggacattgcttcctcggcaggtatgtatatgactgaatcgcagaaatacaatgccgatgccatggaactggaaactcagcttcgtctggctaattttattaaggactacctgacagaccctagtaaggaaaccgacctgataccttctaacacgggaatcagcgatatgaacattgaaaatcagattagtctttataatgcggcaaaattgaagcgtgaccacttgattgatgacagtagtgtgaacaaccctgtggtgcaggagctcaacaattcgcttcgtgccatgaagcaaagtattattcgtgctgtggacaatatgattgtcagcctgaatgtgaaacgcaatgacgcacagaaccgtgaaatgcgtgcccaggaccgtgtgacggctattccgacaaaagaacggcagatgctgtctatcgaacgtcagcagaaaatcaaggaagccctttatctgttcctgctgaacaaacgtgaggagaatgccctttcacaggccatggccgataacaatgcccgcgtgatagacggagcggaaggaagcaatgccccgatttctcccaaccgaaaccgtatcctgttgttgggattgctggtgggaatcgctttgccgggagcggtttgtctggctattctctttatggatacacgggttcacggacggaaggatatagaaggagttacttccgtgccttatttaggagaaattccattggataaagaagccatgaaagaccaccggaagaaggtaatggcagtgaaagagcagggtgatgacattgtgtcggaagccttccgtattttacgtactaacatggctttcctttccaaaaaagacaagcctgcgcaggtaattacctttacttcgttcaatatcggagcgggaaagacctttattgcacgcaacttgtccatgagtctggcttatatgaaaaaacgggtagtcatggtcgatttggatattcgtaagggtacattaagccgtcatttcgggcattatcatgtaggtgttaccaattatctgtcggacaatacggtgaaggtggatgatatcatacagcatcaggaagggtttgacctgattccggcaggaattctggcacccaatccggctgaattgttaatggacaatcgtttggatgaattgatgaatgaactgcgtacccgttatgattacatcattgccgacaatgtgccggtgggtttgattgccgatgctacgattgcaaaccgtatagccgacctgaccatttttgtggtacgtgcaggcaagctcgaccgtcgtcagttaccagatatagagaaactttatcaggaaaagaaactgaagaacatggcactggtattgaacggtgccaatccggaacgtcatggctatggttatagttacgggtatggttacggttatggttatagaactaagaaaaagaaaacgtttttttaaaataaatgcgtatgaaaaaacaaaatgagagtttagtaagggtcttatttagggagaccaaagttaattttttaaatctaaaaagaaagtgaggattttatgaagaatcaagaacaaaaagagtatgaagctccgcaaaccacctgtctggaggtagagctggagcaggggtttatgaaggcctcggtgtttgaagaaaaagagaatacggaaagcttgacaattgaagatcataatgtggacgagacgtttgatttttctgctgatagctgggactaatatgtgtaacaaaaaataagacaatatgaaatatcttaaatatataacgaatggagcattatttgctctgttgttagctggctgttctgatgatttggataataaaccggtagtattacctgtaagcggtgacgaaattgagtttggagctgctcctggtggtttcactgatgtaaaccctgaaagtaggactatctatgatgttcccgctggttctacttttgataactatcaattattaaatatcaaatggcaatatggtattgaccaggtgcgtgtgtattgtcctgaaggagctgagggattcagaactgccgactatacggtagaagcaactgatgcttcttccggttcttctacgggatttcttgtgaagaacggtgaaaccggtgtgcgttggggagatacaggaaaacctcataatttctatgctttctattcattgggtaagattgatgaaggacttcagaccggtactacagtaaaggctactattccaaccggacaggagggaggtaaattgttgacttataataatgatggaaacgaagatcctaatggtaaatttaagattatcactccggatatgagcttctgtatgatggctggaaaaggaacgtggacccctggaaccgataagaacgtcgctttgacatttactccgattgtgacagtgcttgatgtgcttattaatgggccgaaagaagatgatgtggaatttatgaatatcgtttctgtttctgtaagaagcaaatctggtaagaatatcgtgggtacattctcgtatgatttggctgacgacagttataattttgatgcaacggaccagagtcatactgcagcttccatagctacggttcagaccatagtagataataatccggtgagactcgaacaaggacagcaactgaatgtgaaattcttcctgttgccgagagaaattagcaatggagatttagtggtttctgtactgacagaaggtggagtagtatatagtaaaactatatcaggaaccagtacttctgggggtgatggcgtattaggagccggtcttattacccgtatcaagactccgaaattgggtggacaggaagctaataactggatgagccagattccagataacgcactcttcacacagttgtctctacctggcagcaagaactcatttgcctatagagtggatgccggttacgatccgcaaactggtctttccaaattttatcaagctttgccacctttgggaattaatgctactgtagaaactaccacgcagtttgatgagggtatccgtgtctttgatgtacatctgaatattgaccgtcgtactccggttgtatatgccggtggtgcaaatgtcagtccgcaaatcacattggaaacagtgttgaatacattgagagataaagtgaatccaaacaatgaaactgcaagtgaatgtgctgttgtctttcttaattatgtgaatgatggttatactgtttctgaatggttgcctatggtaatggatgcgttggatagttggaatagctctaatggagggatactgactactcttgatcagaacactaccatgggggatgtgcgaggtaatgtagccgttattataaatcttcagacaagtgatagaccagagggaagtgcccctgtgaattatataaataatttttcaaccagtgtacagaataccagtattgtgtctgcaccgtatagtagtggtgcaactgtacgtattcagaatctgcagcagtgtaataatccggagataacttctggtgaaactccttatgtatataagggcaaaggcattggtctcgtgccttattttattacccgtgagagtaagttggatggggcaagcttcgatttgattgagacgaagaggagtctgatgaaagaactgaatagtgagattgctcaaggaggacaaaatctttatatcaatgacttgtctggattctgtgttactaaaaatcaatcaagtaccggatatttgacatatacagaatataaatgtaatgaacatggttggggtttgacatggtatgagtgggatgagactggtaaatcgggaacaatatatgattataataatttcccactggatgaatcggtttatactaacactgcaacaggcgctggtacaagttggactgttgagagtcgtcctggcgcttcttctgactatgaaggtaaattatggttaaacggaacaggttatgatttaggtaacggcggtaatacctgcctgtttgccgaactgttcaatggtgaagctgttgcagaatattcttctctaattggtgacttgcgtcagcctttgggaatcgtattgatgaactttgcgggtgtagcaacagttgatgctagtaatagaagttatgctgtacagggtatacgtcttccgggattgattatgatgaataacttcatgttccctctaaaaactggtacaacaaccacaaggtcatcttctgatacctcatattccaaagaaggaaacgtatgggattaatccatgagaagaatgaatgagataaagaaatttttacttccggcagccgcaatgtttatcttcagcggctgcacggaagaatttctatccgatacagaggtgatgggtaatactaccattgtagggcgcatggcagagaaatctcagacgcgtacctgcattggttctgacggaacttcggatgtgagtatttattggtctccggctgatagcattggtgtatatggagaaagatccaagaatgtactgttcgtaaaccgtaatacagtagcttcggcagagggacaatttgtcggttatctttcttccagtgctccgctgtatgcctattatccgtatagtaaggaaaatgcaggagcagactatacttcgctgaaaggaaacctacctttggttcagtattttgatatgtcaaccggcagtttgcagggagactacaaagtaggcgttccgcagaattcacagtctgaagacggtgcgtatgtctttgatttcgaacatctgttctcattgctggaatttgaaatcaatgctacgggtacagctttggagggtgatcgtctggaacgtattacactgactttgcccgatggtcgtcaggcaggtggtgaatttacgtttgacgcttctacgaagaacgtcgtatggggcactgctccggcaaatgccaatgtcatggatatggtatggactgacaaaccggctttgacgaacggtagccaatacaagggttatatcacatgtgctcccgttatccgttctggtgatgaaatcaaggtgaccattctttcagagaaatatgaagcaacctttacccgtacagcaaagattgattttgcagctaatgcctgctatactttgccattgacgcttgcgaattacactgagattacggacggtaccggacttactccgcgtgccggaataagctcgtttaagtttgaggtagcaaacaatgccggcaagatattgggtaccaaactcgtggcatgcgagctgactaacggtgtgacaacaacgacttctcccgttacagaagaggttctgaatattggcgaggacaacactatcagcggatgcatcccgtatctgtatgactttaaccttgtgccgacttttgatgtggcagaaggggttaaggtgactgtaaacggagtggaacagaagagtggtgtgacagcgcagaacttcagcaaaccggtgacttatactgtgacttccggtacagagagccgtgactatactgttacggttactaatacaggattgcctgtagtcatagtgaaccagtcggcatcaatagctggcggtacttggaagacatgggccgaaaccggattgcagattcgtagcaaggacagcgactggcctgaagacgactatatctcggtatataatgccgatggtacggtgaatgtggacaacaaggcttgcggactccgcttgcgtggaaactccagtcagagttatccgaaaaaaccgtttgccatcaagatggtgaaaaaggctgccatgttggatatgcctgaacataaacgctgggtattgttagctaactggatggatcgaacaatgctacgtaaccgcgtggtgtttgagatggctcatcagctggaagagaataatggcggacagctggcatggaatccgcatggaagaaatgtggaactgatttataacggtatccatgtgggtaattatctgctggccgaacaaatcaagatagacggtgacagactgaatatcaacgatgcttacgaagatgtaattgaggataatccggctgcggttcctgcggattgtggttaccttttggagtttgatgactattatgacgagaactgccgattcttgagttccaaactgcatctgccttgcatgctcaaggatgatgtgccctgggaaaatggttccgctttccgttcttatgtagaagataaggtaaacggagtggacaaggctctgaaaccaggcttgttagaaggtgatgctgattattctgcaactgctgcaattctggatattccatctcttattgactggtggtttgtgcatgaactggctatgaatgcggaatatcgtcatcctaagagcgtgtatatgtatattgatggaaaggatggcaagctttgtgccggtccggtgtgggattttgactatcagactttcccgaatcctgacggtatcaattcaataagccgtgaattcggtggaagttatgcatcgttgagttatgatgcatcatctctgaacaagtggctttgcagtaactattcgtttgataatagctggaatcctgctacacctaactatggtgataaaccatatatgtggtatccgttgctgttgcagcatgaagaattcaaggcagccgtaaaggcacaatggcttgtatcctatccgaagctgcagcaggtggtggcttctatccgtatgtttgcggaagaaaatcgcttgtctgattcatttaacaatgccatgtggccgctacttgacggcagacgtactgcagagttgtcgccttacgttatcgatttcagtggagatgagaaaatgacatggaatgaagctatagattctatggtgaagttctatcagaatcgtctggaaacgatgaacgcattgattaccaatggtagtttttaattggatattataatgaaattttggaagttatgatgaaaaaaacaatctttgcagccttggctttggcggctgcaggtcctgctctggctcagtcggagcagaccatacaaaacggtgattttacagaaaccgtggagtacagtaatgacaagtacaaagtggaaaccaatcacttctgggataactggttcctcagtgtgggggccggaccgcaggtgatgtttggcgaccacgacaagcagataggttttggcaaacgtatctcgcctgcactcgacattgctgtaggtaaatggtttactccaggaatcggagttcgtttgatgtacaacggcctttctctgaaaggtgcaacccgctggggagaagctcactctactggcgaacaagtgcctggctggggaagcggtatgaattattcgaagttcaaatattacaacttgcgtgccgatgtattgttcaatctgtctaacctgttctgcggttacaaggaaaaccgtatctggaacagcagcttctatggtggtgtgggatacatgcgcacatgggaagctcctaccgctggtgatgtaacgatgagtgcaggttggttgaactccttccgtttgtgtgacgcgttcgatgctttcatcgatttacgtgcttccatggtggacgatgccattgacggagaaattggtggagctaagtttgacggtctgctgagtgcttctgtcggtttgacttacaagttcaaacgtcgcggatgggacaagagcaagactgtggttcgtactaatgtaggcgaaatcaatgctttgcgtgaccagttgaaccgtgcaaacgatgaaaacgcacgcttgcggaatgccatcgacgaaagcaaccgtaatccgaaacaggaagtgaagaagacagctgcttctaatctggtaatcttccgcatcggaagagctgacctgtcgaaggaagctcgtgcgaacctgggtctgttggctgaggctatcaaggcttctgatccgaatgcagtatacaccattacaggttacgcagatgccggaacgggtagcaagaagacgaatgaacgtctgagcaagaaacgtgcggaagcagtttatgactgtctggtaaatgaatacggtgtatcagaatcacagctcaagatagactataagggtggtgtagacaatatgttctatgacgatcctcgtctgagccgtgccgtaattacacgcgctaactaatttttatgtatcccctttccggtgtggtagagcctggaaaggggatttttttgtgttgattgctatagaatgggggctgataaattactgcttaacaatgaggctttttttatagaagtaagccagatgcttcagagcgggaattcggtaacgctgcgggcaaaaggaaacagtatgttaccgtttattatggaggagcgtgacactgtggtgctgcaaaaggtggaagcgtttgccgtgggaagtgtggtgctggcttgtttgccgggcaatcgttatgtgttgcatcgggtatatagaataaagggagaacatatcatgttgatgggggacggaaacctccatgccacggaatgctgccgcagggaagacgtggcaggggtagtggtgaagattatacgcgacggccgtgtgatagacatcacttcttcttcgcaattgtttatggcggcactttggcgtaagctgcttcctgtacgccgttacctgttatttgtgtgcagatggtggatgcgaagggacaggagaatgaaaaaaagatagtatttttgtctgtatgaggataggaaagtgtataaagtggctttggaatatttcctgtggcttccggataccgataatggtgtatgctttgaccgggatgttgcaggtgggggcttctttgttttttgtgtttgtctgtaagcacttgatagatattgccacaggtgtgtcgggagataatcttgccatatatatcggatggatggtgggttgtctggtactgcagttggtattgtctgctgcccgtagctgtctgaccagtcgcatggagattgcgttacggaatgaattgcaccgcaagctttttgtgcatttgatggagagctgctggtccggaagggagcagctgcataccggagatatgctgaatcgtctggaggaggatgtgcagaccataaccgatgcattgtgccggatgctgcctgcggtgtttatcacgtgtttccagttgctgggtgctttgtatttcctttcttatctggatatgcgtctgaccattgtgctggtttttatcatgcctgtcgcattgttgttcagtaaaggatatatacgaaaaatgcgccgtctgtcgcgcgagatacgtacgacggacagtgagatacaaagtcatttgcaggagaatttgcagcatcgtatcctgcttcgtactttggaatataccagccagtctgtgcataagctggatgcggtgcagtctgtactgcaggataaggtaaagcagcgtacagatttttcggtgttttcccgctcgatggtgcaggtcggtttcatgactggctatgccgttgcctttttatggggcgtattcggtttgcgtgagggtacggtaacatttggaatgatggcggcattcttgcagctggtatcgcagatacaacgtccgatggtagacttgagccggcagattccggctgctatccgggtacttacttcggcggaacgtttgatagaactgactgacttgcctttggaggaacggggagagtcagttcgtctggagggaaacctgggtatccgtatgcacggagtgagctatacttatccggaagggagcaaggctgtgctgtctgattttacgtatgatttcaagccgggtagtctgacggctattgtgggagaaacaggagtcgggaaaagtacgctaatcaggctgattctggctttgttgcaccctgatagaggagatattgtattttataacgggcagcaggaggtggtagcttcaccgcttacacgctgcaatctttcctacgtgcctcaggggaatacgctggtaagcggtaccattcgggataatttgcggatgggaaatcctcatgccacggaggaggagctgaaagaggcactttatctggcggtggcggattttgtatttgatttgccggaagggatggatacgttatgcggagagcgtggctcgggacttagcgaaggtcaggcgcagcgtattgccattgcacggggcttgctacgtccgggaagtatcttgctgttggatgagccgacttcttcattggatagcgagacggaaaagctgcttctggcacgtctgtcggaccagttgcacggtaaaacacttcttttgatcagccatcgggaaacgattgcacagctttgtacttctgtggtctggatgaaaaagcaggaataattcttatcaagaatgaaggcactaaatgaaacgcccttatttccagttgcgcactggagataagggcgtttgtttttagggactattggctgatggttttgcttatagtttcactaccagcttcttacctgaataagctactttcttgtcagctttaaccatgacggtttctgctgactgcttgccaggctgcatcagcgtgatgcggaagttgcggcgtttcagcatcttcgggaattcaccattgcggtcgctgatggtcagtgtgcgtgaggcgtcgtcccagctgaacttgatggtggagaacatacccttttcgtagttatagttatcaaactcgtcttcgtagagcacgaattcgccattggctcccgggtaaacacagatgtccaggttatcccatttcttttcagtagcgtactgtactttcggaccgagcggaaggatacttcccgccttgatgtaaagtggcaggatgtcaaccggacattcgcgctggatttcctgaccgcctgctatggtttcgttagtccagaagtcaatccattgagtacctttaggcagatagacttttaccggagcagaagctttcgctacgtcgggcacggtagtaactcccttgttgccttctactttcttggtgtaaagcggttctgttaccgggcataccagaatgtttttaccgaacatgtattcatcgtccagcaggatagccttacggtcgttggcaaagtccattaccaacggacgcatcatggtaccgtcttcctgtactacggctccatctaagctatatatataaggtaagagacggtagcgaagttcgataatacgtttctgtgcatcgtaagcccagtcaccttccttaccgaagaggtcaatttcattcatcatcggtgaagaacagtggttacgcatcaatggcatgaagcatccccactggaaccagcgtacatgcagttcctgataagctacgttagtgcagtcattgttgtattcccatccgaagaaacctcctaagtccgtgttccagaacgggataccgcaaagcgtgtagttcagtccggccggaatctgctgacggagtacatcccagcttgataccacgtcgccgctccagctcagggcaccgtagtgctgctgacccaggtaaccggaacgggtcatctggaacacacgtttatcgtccgatacggcacgctggtgttcatagatacctcggttgtggtccagcgggaacgcattgtgtacggagcggaaagaaccatcggctgtcatcaggtcgaagtcgctttctttcgggttcagatggtcgggttctgtagagtcggtccaccaggcatcgatgttcattttatgcaggtggctgaggtaacgccagtacaggtcgcgggcatctttgttgaacgggtcgtaaggatgtgcacccgatttcggaggccatgtttcaaatttcagcaaggctcccatcttgtccagttccttgaactggtcggtccatggtccgaagctggcccatacggaaatcatcaggtgcgcattgttcttatgtacgtattccaccatttcttccgggcttttgaaacggggtttcggatagcgtgcattcttgtcttctccattcggaaggtagcgaagtgctttcttgtcgtccatcttgttgatgtagcgtggattcacgaatttcatggcattccagttggaatcacatccccagtactgccagtcctgtacgataccatccagcggaatctggagtttacggtatttatcgagtacgccgcacagttcgtccggactcttgtagcgttcgcggcactgccagtaacccatggtccagagcgggaacatggtagcctttccggtcaggtcacggatgcaggcgattacaccatcctgtgtaccgtcttcgtacaagaaataataatcggagcaaagtccgacttgtgaagaaaaagatgtttcatacggtgtgtcgctgaaatcagagatacctggattatcccagtacacgccatatcctttttcagatgtaaaataggggatacagatattggtattgccgtttgacaggtgaatttgctggttgcggtggttcatggctccgctctggcgttgtcctaatccgtagatagcttcttccggttcaaggctgaatgcctggctgacggtaaatgcgtcacggtttacgtccttgcgcggaatgaaattggtaccttccactttttcctttaacagtgtttcccctttcaggtcggtataagtcacctttccggtaaccacgtcgagtgtcactgtcatttttccggaggtcatgcataccgtgtttccattctgtttgtaggagatttctaccttttccggagtcttgatgaccggataacttttcttttcgggcatttcagccgaaggatactttacgatgcgcacaatagaaggagagtagaaaatcacttccccgttcaatgtgggctgtgcagtctggaactttcctccctgagtggtcttttcaaaagtctgaccgaaggaagacaaacaagtggccagtgcagcaagaaataaaatctcttttttcatgttgaacaagtttgtttttcgttaaatctgaatacaaaggttgatggttcaaatgtaaagagattctttttagagcaggagaacagaatgcgccaaagagcggtatgaaatgcttcagagaggggtctgattcatttttacccctcttttgattcagatgtatcccctttttcctgctgtttctgaaactcgctgggggtcattccgtattcttccttgaagcaggaagtaaaatatttccggttgtaatagcctaatgccagggccacttcgttcacggtggtatgaggatctttcaacatgcggcaggcatgttgcatcttcacgcgacggatgtactccaatggagtaagccccgtaatggccttgagcttgcgggtcaatgtggagcgtgacatgttgactttttctgccagatgctgcacgtcgaattcagcttcactcaaattatcttctaccgctttcaggatatttcctaacagaatttcatccagtttggcaaattccatttctgaaatacggacttcagtttgcggaacaggcttttcatccaggtaggaacgcattttcatcaattccgcgctgtcggcatacagttcttcatttttcagcttcatccggcggaggtagaaacgaagtccgacaaagattccggctatcactaccaatatatagaaggcgatggcccaccccgtctggtagaaggcaggcagacgctcaatgtgaagtctcgtgactttctcactccatattccatacccgtcggtcgccttcacctcgaatacgtagtttccgtgaggcaggtgcttgtagctgacggtatgttgtcctacggtggtgtagttccattctttatccagtccggccaggcgataagcataacgtattttgcgggcattcaggtagtcaagagatgaaaaatgaatgtccagatcatattcgtccggctggagtgtcagagaatttccgttcgctatgggtttgcccatgacgtacagtccggtgataaacgtcggaatatccttgctgggctggtcaaggcggtcggatggagttactgcacagatgcccggaatgccaccgaaataaatccgtccgtcgtgtcccttgcagatggctgtagggatgaaccggcggagcagcatggaattgtcggtggtaaggtaggtggaaaacgagtggtttttcggattatactcaatcagtttctggttggtatctatccacagatggccgtatacgtcgaactccagctggttgacaatatttccgttcaactcgcacaggcgggtatgatccgtcagtttttttgtctgcacatttaaggcatagactcccccttcctgcgtgcccatccagatgaggctgtcttcctgcacactcaggcaggtgatagagagaggagaatgaatctttcggtattcccccttgggagacagctgataaagccctttattcagtgttccaatccatagatttccccgcttgtcttccttgatggcacttaccagtcctaatgtatcgcagaccgtatgccattggttgttgtgcagagaaaaagcaaacagctcgttgttggtacctgcccagagtgtgccgttacggtcctcgtaagtctgggtaaaatgtctttgggccttttccggaaggctcagggtgcggaagtgcttcatttgcataccttcccgtccgagttcatagataaggttgcacccttcaggtatcacccatacatttccttccctccgggcttcggtcatttgcttgatggagccgagagaaagcgttttcagcgtggagaagtcgtggtagagactgactatatggttggacaggtcgtacagcccgagtcctgttcgttcctgtgatatccacatcttaccttctcctgcatcgcagagggccatgatggccggttgaaagcgtacccgctgtggcagagctggcagggaaaattcctccggagcgttttccgtaaaatggataatgaaactttttccgtcaaaagaggctacccagagattaccgtctttgtcctggtaaatttcattcagcatgtttccatattcagccggcagacgaaaatccgtctggcgcaagcagcggcgggcttcatcgtagcgcatggctatcagagaacttctggtagtcatccagagaattccttcgcggttatcctgctccaggtataagatgtctccttctgcttctcccataggatttacgggaagcggcgaataggtatagatggaatctttgggtgcggaagggtcgaagagcaacagaccgtcggaactggtgcctacccagaaataattatgagtgcggtcctgaacgatgcaggtcaggtttcgtcctgaaggcggattggcataacgggtaaaagtgtctgtctttttatcgtagcgatagataccttcccttcctacggtaatcagaatctgtttctgccggctttcgcagaaaccggccatccatgaggattttccttcatggtcgtatagcaggtaggttttctgtaatttcccctcagtgttgtatctcagcagtttatgccccgtagctatccacatagccccgtcggatgtctttcgtatgctgtagataaaacttgtctgtagccgttcagcgtccaacggtgtaacctgtctgctggttttgtccagcatgtaggctccatggtcggttccaaaccagattcttcccctttcatcttcggcaatggactggatggtgttgtcattcagcagtcccggggtattgatgtcggaacggatgacattaatctggtatccgtcgtcgcagcaaagaccgttcactgtgccataccacatcagtccttcgctgtcctgaaaaatgcggtgtatggcactgaccggaagctggggcagggaaggcacgggagtaatccggatattcgaagcggcttgtatggtaatttctatcagactgaaaatgagtaaaaaacaaaatcttttcatgggttttttcaggacgctaaaaaacgcaagtgcgtttgctctaaaacgcaagtacgttttgattgaaacgcaagtgcgttttacctaaaacacaagtgcgttttaattcaaacgctttggcgttttcctttaaacgcaagtgcgttttttcaggtattttgaacgaaaatctcttataatttataatcgtttgtttattaatgctttatccgttgtttcgatattcaagcgggctcattcctacatagcgtttgaagtattttccgaagaacgatacattggcaaaattcagtgagtcggaaatgttctggatggaaagctgggaagacttcaattgcgatttggcatccatgatgaccatggacgaaataatgtctacacaggtctttcccgtaatctgtttcacggtagtgcaaagatgtgcatgcgtaatctgtagcttttcagcataccaggctacgtttcgtgtctgattgtaatgttgcatgaccagctgggcaaagttacggcaaatcagttcactttttgataacgaatgtacttcgtcggtcttgttccgatagaggatagatatacctttatgtatgtcggcatacagattggtcgcaatttccggtcttattttctccggaaggaattcatacatcttgataagcagctgcatgtactcctccatcattttggcgccttccggctttagattgataacgggacgccccagtgtgatgtacatcgtatccagaaaagaatgcgactgaagattgtgttccataaactgagaagagaatcctccgaagtagatgttcaggtctcccttgatgtcgtttatctgaaagatacttcctggggtaagtacgataaagtcgttgggctctactgttatcttgttgagattgaccgaggcttccacttctccggaagtacaaagtacgaaaatctcgcatttcaggcgcaccggatagtttctgtacagccctaacagctctttgctgatgccggtacctaccagccactcttcgggcaggtctattttaggtaattctttttccattttattttgtttttatttattgcatgcttccaccactcttgttgtctccgcctgcctttacgtcatcgtttgtaatgctacgctgtgtctttttcacctgggtcttcaactcaccgaaccgccagctgatgctgatgccgtatctgcgtgagggataactgtttttcgaccatgagcggaacgtgtctgtccacacctcattgctataggagttgtatttctggaagatattgctggcaaaaagcgaaatattcagccgtttgtctttcaggaaagaacggttcaggttgacaccgtaatagtagaaggaagaaccttttccttgcagggatatgtaaggagtgcttcctccaccgtaaaagctgagacgcagttcccaggggatagtctgctgtatgttggcaaacacctcaccggcaaatccgctgttgcgtgagttcagctccttactctggaagtcggaatagcttccgctggtattgagtgagaggcgggtggtgctgcccgggttccagttcatccataaggccaggcgtgtacgctgactcttgcctacattgccgtaggtgttctcctgtaccccattgttcatgaaggagtagcgctcaataccgttgttggtaaacgtataagtaaggttggcattcaggctgaacttggcactgaaggtattgaaggttattccaagaatgtgtgccttttccgtgtccaggtccggattaccgtagctgatggaagtcgggttgctggtatcgcggaaaggattcaggtaccatattcccggacggttgatacgcatgttgtagttggcacgcagggtagcgcttgtacctaacatataagacagattcagggtaggaaccacgtcatcgaatccggctttgaaattgcgttcgggcatatagtcatattccacgtccatgaacgtatgttcgtagcgcacaccggcttttgctccgaatttcttccatttcagctgataatcagcgtatgctgccaaaatatgctgtccctgctggtatttgcttgaaaggtcctggctggcttccatctcgccttgggtgttttccagaaaataccgactgtcactgtaattttcacggaaaatgtatttcataccggcgtctatgtagtgcttttcattcagcggattgacataatcaatctgtgccgtatgctctgccgtatgcgcatcgttgtcgaaatactggtgaagcaggttgaagggtacatctttcatttcgtcatagtcggtatcggcttcattgttgttcggcgagttgttgaacttgtaggacaacgtgaggtattctccttttcgtttaaaagaatgctggtagtctgcattgataccgatgtttccaaactgactgattgaccgattgagagtctggtaactgtagcgttctttccagtcattgtcgctcatgatggtacgcgaatcgccgtgtgtgtcaaatttccctccaaaaacattggctgaaaacgtaatcaggttcagggtgtctatctcataacttccttcaatgttgccaaactggaaattccctgtactcttggaagaaccttgtgtcagcagatggcggtagtcggtagacgtaaaatcttcacgttcgctgtcagaaaggctgcgaggctggttctgatggttgtatgagtagtttccggtgagggtaagctttcctacctgcactgttccgtagccatatcccgacagtcccatgttattgatattggttccgagcgtaacattgtatccctgcatcttggcatcggtcgtaatgatgttcaggatacctccgataccttctgcgtcgtatttggctcccggttccgttatcacttcgatggacttgacggagttggctggcagactgcggagcacttccttcgggttgttgctcatcagcgtattgggcttcccgtttacatgtaccttgaaattgctggagccgttgacttgtatgttgtcctctccatcgacggtgacgagcggtacctttcgcagcatttcgagggtggtattggttttggagtcaggatcatcttctatgctgtaagaaattttgtcaatttccgcttttacaaggggtttctgggctactacttccacgcctttcagcatttgggtatcatcgcaggtataaagtgtgcccaggtcggccacccgctggttattggtgatggtaaaacggcggactactgtacgttttcctaccgaagtgatttgcagggtataatttccggtttgtggtaacttctcctgaaattttcctttcgcatcggtcacattcattctgaccggtttctccggcgatttgtcgagcgtaatgcgtatggtggcatagggttcgctttcatgtgtcagtgagtcgacaagtatacctttcacggaaaattgtgcgtgaacattacaaatgcttagaatcagaaatgtaaagatgcctgtaaattgtgcaagaattttgtgtttcataaaaaaggtgcgtggttgcggtttttggtttcttgtttgtttcaagttgcccaaagatagggaaaaaataaactgcttctgtaggtggtaatttaaaaatatgaaaaggtgtgataaaagaagtaatggtatattttaaaaatagaccattgatgggccgtaaaagtactactttttagttaattatcaaggctatttggacattttctttttgctggctttaaaaatcagccaaaaataaaataaatagaccttgtgagggtttgggaattggtgttactttgcacgcggaaaaatagtgttccgtataagtttaaagaaactgatatatttgatgtttgctgcaatgaatctaaaaaagagagtaatactcatttacagcttattatctttgattttggtgtcctgcgctaaagaggatacagcaaagaataatggaatgggtacttttacaatgaagctgaatgcgactagtgaagtgataggtctgaatgaaaaatcgcgcgcagaagaagctggtgaaggtgaaacattgattctgcccgatgtgaatgatttctcggttagcatttcttctttaggagaacaggtttgtggatggagttcttacaaggacatgtgcgaagaggagatgcctgaattacgtgtaggtacctatcaggtaaaagcatggtacggagatgtgtcaaaagaagggtttgagttaccttactttgaaggaaatcaggaattttctataaagaaaaatgaaacgactcctgtagaagttacttgttatttgggcaatgctcaagtgaaagttaactatactgatgagtttaaaagctatttttctgattactctgctgtcattgcgacctcattaggaaatgaggtggagtatgtaaaagatgagactcgggctgcttatttctctccgggagagttgattgcaaaagtaaaagtgaaaaaatctggtcagtcaactgaaaatgtttatcaggttaaagtgtttgaggcaaaagctcgtcatatttatttgctgacattggatgtggaggcagggtcggcaaccatgaccgtgtctttttctgatgatgtggccggagaagaggttcgattcgatgtatcggatgcggccttgaattctcctgcaccttattttaaggcaaatggttttactgagagtgttccttttcaatcaatcgagggggcagaaccgaaagagcaagttactgcttatgtgaatgcggttgcgggtatccagtcttgccgtctgactaccacgtcgggttttctgtcgggaaaaggatggcccgatgtagtggacttggctgcacccggaaaatatgcctcaattttaacggagatgggattggaaaccaaaggattggagggtaatcgtgaccaaatggctcaggtgaattttactaaattgataaagaacttacctacaggtggcaatcatatatttaaactggaggctacggatgtgtatggcaaggtttcagatactccgctggtgctgactgtgactcctcaaggatgtgagtttgctgtggcggctacttcaacggaggctcctttttacgggaatacttgtcaggtgaatgtatcatttaaagatggaaatccggcaaacgtacattttcaactggcagaaggaaaacaggatttggaatttgtgcgtgctgaagaattaccatcagaagaaggcctgaaggtctatacggtttatttgaaggcacctgaaacagtgaagtttataaatccatttaaagtctctgcttcttacttaagttatataaaagaaacaggagaacttcctgtgagtatgggtatattagtggataacccaggagacgtgtgggctaagaaagctgtgtttcatgtatataatgaaactgctttggctgatataaaactacagaaacagcagggcggttcctggatggatgtgacaactgaggttaatggcagctatggcctgacggcgaaggggctggagtcggggtcctcagtgaagttacgtgccgtaaaagggaaggagtattctaattctgtggacatcgtgacggaagaggagttgcaaatacctaattctgactttgaacagtggtcagtgcaagaagtatggtatcaaacaatctttatgtctggtggagaacatatttattcatattatctgtctggtggttcttcggaggataaatggtggagtacttttaatgatatgacgactcagcaacagagtggcgtcgcttcttggtattattgtgcttatcctggcacaatgcctactaatgcaagtgaaatgcatacggctacctggcattggaataatcatggaggaacctccctgtcaacaggtgcctatgagggaaatgtagctgctgaaatagcgactgtgggatatggagcgaacaactggtctgcaataagtcataatacgaagtacagacaggccgggtatttgtatcttggtacatttaaccgggatacacaggaaaagaatatgacccatacttttacttctcgtcctgacgtagtacagttctattataagttttattcttataatggagaaacgaccaaggcctatgcgaaattgtatgatgcaaaccgtaatgtgataggagaaggagaactgaagattactcaggcggtagatacatatacattaggggtgataaatatttcttatcctcaaaaggaaaaagcttcttacatggaattggtatttatgtcgacagatgcgacatctccaggaacgaaggatattcaaggtagtaaaggggctttgaacgctggttacggtgattcacgccacgtaggaagtattttgacagtagacgatgtaaaactaatttatgaataaaataaacctaacttatatgaagaaacagatttatttcttgttaagcttgttcgcagttgttttattgacagcagcttgtcatagtgaaaaggtggattatgaaataaagcaggaaggacagttgaacttgtcttctttgcagttgactcctaatacggacccgctggttacagaatcacgtgtagcggcagaattaaatgattatattgtggaagtgtatactgaagcgggagaacttgtgagttcatggaagtacgctgagatgccggaagtgtatacactgaaaatagggaaatataagattgtggcacatgctcctgttacggaaggtgcggcttttgatacaccttattgtgaaggagaatcaaaagtgtttgaaattacgcaagataacttgacggatgtgggagaagtggcatgtacactgcataatgtgaaggttactatcaattatgctgataatctaaaacctttattgggcgatgatgcgaaggtgacagttaaaatagattcggagtcactggaatatggaaaggatgaaactcgttcggggttctttcattgtacagaaacgaatacggttgatgtgattttttctggtacagtggatggagttgcggagaatgtaaccaaatcgtatacaggtgtagcgttaggcacagagctgatagttacatataatttgattgatgcggtgtttgtggatcctggtacaggaggaagtgcttctgtaaccggcttaaaactcgatgtaacttgtacgtcggtaactattgagggatcggttcgtcctgaagaagatgaaattttagattttggaattccttccattgtaggagaagggtttgatttgagtcagcctgtcacggatttatctcaggaagtggtagtagacttactggctccagaaggggcagcacatgtatttgtggaaataacttctgataatgcggaatttagtggagtaattgcagaaatgtttcctcagaatccttttgatttggctgaacctggtgaggctgaagaaaacttaaataatttgggcttgcctataaaagatgctgttatcggtcagcaaaaggtgatttttgatgtgacgcagtttgtgggcttgttgggtggattccctggagtgcatcagttcaaattgacagtagaagatgtgaatggggagaaggcggaagctactctgaccatagacagtagtaatgcatagtaaaatttggaaggtgatgaaaagaattttcttaataattggagtcatatcttcgctttgtgcctgccgccaggaaaatcgctatctgagtgaaggagagggagcgttgaacttgcaggttactgtgggggaggccgtagaggtggtgtccagagcatctcttggaaatgaagaaatagaagccttgaagaatgattgtaaagttcgtatttatgaaggcaacaagttgataagaaaatattcttcctggagttctgttccagagaaaatagatttatcagctgggaccgactatcgggtacgggtcgttgccggcgattcagtctcggcgtcgttcgataaaaaattttatgaagggatagagactttttctgtgcttgacggacagacgacttctgtaaaggtgaattgtaatattgtcaatacgttggtaaaggtgaattttagtgaggatatgaagacgtatttggcttcaggtacagtaacagtgtcggttgatgcgaccgatggtgccttagattatagttggagtgagaaggaacaggattcgtatgtaggatattatatgctgccttctggaaaagaatatttgacttgtgtctttagtgctacaacaaagactggaaaaaaaattactcagacggataagatagagtcggccaaggcttctactttatatacgttaaattatgaactcagttctgaggaacctgaacgtccgacagatgaagggggagtcttcttttcgttgaaagtggatgaaactccgctttatacacaagaggaagagattgggatttatcgtcgcccggtaattcgggtgatgtcgggagacgaggaaattagcacagattctccttggtttcttagtttgaactcttctgtttcacctaaggtgattatgactggttcttctgccttgaagactgcttctgtagcgggaacattattggaaaagttgggattttctggtgcgattgatttgttctcatcagaatctgttggagctttgcaacagaaagagattacattgacatttccggaagaggctcagggaagacagattgtcatggattgggggagttcttggaatgagttgctgaaagaagaaaccgtgtattcattgggatatgtactgacagatgaacagggaaagcaatgtgaacttgactggcagattgtggtttcggatatgaatgcacaagccgttgaaattcctcgttttgaaacttgggcagaccgaaccgtcttttatggagaggtgattgaaggacatacttcggaggcaggaactgtatatagcttccagtatcgtaagaagggagaagaagcttggagtcagaatattccggctgttctttctggacagacaatcaagtcggatgtgttgaaaggacttactccgggaactacttatgaatatcgtattttggaggatacaaaaatttcaaatattgtttgtgaggtaactacagaggaagcctctgtattgccgaacagtggttttgaaaattggtcgggagatgttcctaaattaatatatggatcgggtgaaactatgttttgggattcaggaaatcatggttctcagaaggttagccgtaatgtgacgacacctgatgctacggtgagacacagtggtaattactctgctaaattatcgtctatttatgcaagtatgttgggaataggacagtttgcagcaggtaatatatttatcggacaatatcttgatactcagatggatgggcttaccggacacggtgtcttgggattagggcgtccgtttgcttctcgtcctttagctttacgaggatatatacgctacataagtggcaatgtagataaaggaggagacaaaatagcgaatggtactcaggataaaggtatcatttatgtagctttgacagatggcgaaggagaagagttcaacggaactcgctggtcgtttgtgataaagacaaaagaaagtaagttctttgataaaaatggagctaatgtagtggcttatggagataagatatgggaggcttctacagaaggtgagggtatgcatgaattcattataccttttgaatataagagtatggaaagaattccaaaccggattatgctggttgctgccgctagtcaatttggagactatttccaaggaagcaccggtagcgtgatgtggcttgacgacctggagttgatatatgaagaaagtaaattacctgaaaatttgagataagtgaagaaatttatattccttttaagtctcttgtgcttgaccttgtcggttcaggcacaagagggaaagaaaaagatagccgataacgtatttgtgcctaaaggacaatggattgtgggtagttctgtatcgtattctgagcatacagaagaaaactatcagtttttaattattgataagttcaattccgatggatattcttttaaagtaagtccgttggttgtttatggtttgaaagataacttagctatgggaggacgtttttcttatggacgtactttgaccaaatttgataatctgaattttgatttgggagatgatctttcaattaatttgaacgatacgtatgaactgacgcattcatacactgtaatggctatcatgcgaaattacatcaatttgggaagtagcaaacgatttgcattgtttgcagaaacacagttgaaatttggaggtagtcagtcaaaacttgtgactaaatcagggcaggaagtgagtggaacctattccacttctactgatttgggtattggtgtttctccgggtattgttgcttttgtaaataactatacggctgtagaagtgagtgtgggagttctaggtgtggattttggcaaagtacatcagaaaaaagaccagatttatactgcagatcgttcttccagttctgcaaattttcgtattaacttattttctattggcttaggtatagccttttatttgtaacagaatgagaaagataatattattccttttcttgtgcttgggaataggtgtgcagaaaagtttgtctcaagtgcgtgatacgattgtgatacatgatacggtgtatgttgagaaacctaagaaaaaaccaataacagtagattcaaacaatctgataaagatgaaagcgattggtcgttatgatcgtggaatattgaactatcgttttgttcccaaaggaaaatggattggaggattaaccttctcgtacgtgaacttggacagtgataatagcagcatgttgtatgctattttgggtgatatggatgctacgtttacaatgaagtcaattcatccgtttgtgggatatgcactgaaagacaatgtggtggtgggagccaagtttggttacagccatattgtgggtgatttgggtaatatagatttgaatctgggagatgatttgagttttaatataggaaatatgcgttatacggaagatatgtattctttcggggtttttaatcgctcttatgtgggattggatgaaaatggaatattcggattgtttaatgaaacagctttgacttataagcggggaacatcgaacttttcagatggagaaggagatagtatgactcatacggagacagatgtgaatgagatacatctggggattaatccgggagtagctgtttatattactaaaaatgtgtgtgcggaaatgtcctttggagttgccggatttaagtatcgttgggagaaacaacgggatgactcaggagcggtaggaaaaaggaatagtagtggcgctaattttaagattaatctttttaatattaatattggtataaccttttgcatgtagttatgtggaatacattatatagaattgctattagtataatactggctggtactctaagctgttgcatcaaaaatgatataccttttgctaaggtacctctttctattacaggtatagaagttgaggggcagtcgggaagtgcggtcatttcggaaagtgaaagtactgtgacggttactttgcaggaaacggtaaaccctaaaaaggtgatgttgaaaacttttacttatacagaaaaggcttcttctactttgacagccggtacagagatagatttaagccagccttatgaggttactttatccctttatcaggattatcaatgggagataattggaaatcagcctatagcacgtcgcatgataattgatgggcagcttggaaattcggagtttgatgtgaaaaatcatttagctactgcttcaattcgaaagagtgctgatttaaaggatattgttttgtctgatttaaaattgggaccagaaggagctttgaatgacggagtgagtggaactccggaggttcaatggacattttatcgtgattttgcccaggcatctgtacatgtgacttttagtgattttgtggatgagacttggactctccgcgtttacaaaagtgataaggatgtggttacagaatctgctgatggatgggttaatgtggcatggttatatggtgctggtgtggccgatacggaatgtggctttgatattcgtgaagatggaagtgaagactggacacgcgtagatcagaagtatgtgaccatggatggaggtaaatttacagctcgtgttccccatttgaaggcgaatactacttatgaatgtcgcgcttactctggcgatcaggtcggagatgtggtaactttctctaccacggagacaggatctgtacctaatatgggatttgaagactggcatcaggaagagaaggtgatttgtccatgggcacaggacgggactcgattctgggatactggaaaccatggaagtactacgttaagcgagaaagataatattacattatctacagaagacattcgtcctggtagtacagggaagttggctgctgtattgaaatctcagaaaattgtagtaaaatttgctgctggaaatctatttattggtgaatataaggagacaaagggaactaatggcgttttaggttttggaagaagttttacttcctatccgactcgtttaaaaggttattttaaatatcagactgctttgattacggaagctattgataaatatgcttcattaaagaatcaaccggatacttgtatcgtatgggtagctttaggtgattgggaacttcaggaaaatcctaatagtggtgaaaaaactgcggtggaagtgcagacggatgacaagggaacaggaaagtattttgataagaacgattcgcatatcatagcttacggtgagatgacatgtggagaaaatgtaaatgaatacactcctttctctgtggaacttgagtatagggcaacgaatcggaaacctacagccttgctgattgtttgttctgccagcaaatatggagactattttacaggggctccaggggctactatgtgggtggatgattttagcttggaatatgattatgatgattagtcagtaaggttattgtaaaagaattgtagctgaatttagctataccatggtaaacaagtgtattactttatttgttagtaatagatgcaacaaactggatgccagggataccagtcccacgggagatggaaaaacatgctgggaggcttcttcttcgaacctgatgcactggtggctgaatgcgaaccgtagttatgtggaacgttatctggaatacaaacgtcgtctgaacccggaattttcgattccttcggcttatccggattcgaagcatagtgagatttatcaagggtttaagaaccgttttggtaatcagtcggggtatatcgtatcgggtgtaaactggttcttgtcaggaatctgcaactgggtgatgtatcctcagaatgtgccggaacaggaaaatgcgggcttcttttttgatgtgctcggtcgaaattcgctggtgaagcagtatggcaacggctatatgacgaaggaggagtttaataatgccatcaaattggcaaggaagcagggaatggccgtcggattggatatttttattcagggaggcgggcatgccataaatctttggggagctgagtttgatgagaagggagaggtgagtacgatttaccttgtagataacaacgatggaaatttgggtgactggatttacaaggctaaaattgtatatgaacaggatgcttcaagtggagctttgtttacttatatgaaatgggtttataatgaagacttgaagataaaaattatggatttggtactgttggataaaggtacttcttattgggagtcattctttaaaaacaaaaacgggtgaaacttgaaagttcaagtcccacccggatttataaattaagaattaaagttttatacaattccctgagccatcatagcgttagctactttcatgaatccggctacgttagcacccttcacatagttgatataaccatcgggttctgtaccgtatttcacgcaagcttcgtggatgttcttcatgatgctcttcagtttttcgtctacttcttcctgactccagctcagcttgatagagttctgagtcatttccagacctgatactgatacaccacctgcattggctgccttacccggagcgtaaagaatcttcgcatcctggaatacgcggattgcttctggagtagaaggcatgttggctccttctgatacagcaaatacgccgtttgctaccagtgctttagcatcgtcaccgttgatttcattctgagtggcagaaggaagagcgatgtctgctttttcattccatggacgagcacctgctacatacttgcaaccgtatttttctgcatattcacggatacgtccgcgatagaggttcttcaattccatgatgtaatccagtttttcgcggtcgataccgtccggatcatagatgtaaccgtcagagtcggacatggtaactactttagcacccaactgaatcagtttttctacagtatactgtgctacgtttcctgaaccagataccagacaagtcttacccttgatgtcgatgttacgagttttcagcatttccagcaagaaatagatgttaccgtaacctgtagcttccggacggataagtgaaccaccaaattcacggcctttaccagtcaacacaccgctgaattcgcgagtcagttttttgtacataccgaacatgtaacctacttcacggccgcctacacctatatcaccggcaggaacgtcagtttcaggaccgatgtggcgccacaattccagcatgaatgcctggcagaaacgcattacttctgcatttgacttaccgcgtggagagaagtcagatccacctttaccaccacccatcggaagagtagtcagtgagttcttgaaggtctgttcgaatgccaggaacttcaaaattcccaggtttacagagctgtggaaacggataccgcctttgtacgggccgatagcgttgttgtgttgtacacggtaacccatgttggtctggatgttacctttgtcgtccatccaagtgacgcggaactggtatacgcgatctggaatacacagacgttcaatcaagtttactttgtcgaattcagggtgtttgttgtattcctcttcgatagttcctaacacttcttctactgcctgatgatactcaggttcattggggaatcttcttttcagatcttccagaactttagctgcattcataattaaaaaagattatctgtcttatttattggttttgaaaaatcacagtaatatgtttcttcttgtttgatgtgccaaaaatatagataaaaatttatttatgcaacaataaatcaagaaaagtgagaaaaaagcgtcaaaaatccctttttatctatttattcgtgtttatttgtttctgcttttaagagatttaattacagggataaacaccaaagctcctgatatgagaatcataatgacaagcggaccgtcaattttgggagtagaggtgagtactaaaaagcaaagtgcggcccagcataaagtaagtacgacacattgtgtatgattgagtggttttctcatggcttttagaaaaataatacacggaggaacggtggcaagggtgaatgtttggcttgcagctgctcctccgtgtagggtgaaataaatcagtaatgtttattgtgcttttttcttcttgtcgacaatggcatcaatgcaggcgatagctgtgatattgacaatatcgcgtacagagctttcaatgtcggtgaagtgaattggtttgttcaatcccatctgaatcgggccgattacttcagtttcactcatgctttggatgagttggtaggttgcattggctgaactcaggttagggaataccaatgtgtttacttcttttccttttaagcgtgtgaaaggatatttctcatcgcgaagggcattgttcaaggcgaatttcacttgcatttcaccgtcaatagccaaatccgggtattcctgatgcagctggttgatggcttcgtgtacctttgccggacttccttctgcatcggaaccgaagttggagtaagacagcatggccattaccggttcctggttgaagaaacgtacagccttggccgacagtttggcaatgtctatcaaggtatcggtgtccggatgacggttaatcaatgtatcggcaatgaaataagttcctttcttggagttcagaatatgcatggtaccgaaatgtttgtatcccggttggataccgataacttccttggcaaccttgatcgtgttggagtacttggtgtacaatccggttacaaaggcatctgcttcgccggtttccaccatcatcataccaaagtagttgcgttcgaacatcttgtcgtttgcttcctggaagttggctccttcgcgggcacgtttttcgcagaggatgcgtgcataacgttcgcgacgttctgattcacggtcgtggcgcaggttgacaatttcaatgccctccaggctcaggtcaagttccttggctaatttttcgatgcgttcttcgttacccaaaagaatcggatggcagataccttcagctttggcttctactgcagctttcagcatgttcggatgaataccttcggcaaataccacatgttgcgggttgcggcgagctgtttcatacaactggcgggtcagcttgttttcctgtcccatcagttctctcaagtgattcttgtattcatcccagtcggtaatctgtttgcgggctacacctgattccatggcagccttagctacggccatggacacttcggtaatcagacgcgggtcgaccggtttcgggatgaagtattcaggtccgaaagtcaggttgttcacatgataagcttcgttgacaacgtcgggtacaggtttcttagccaggtcggcaatggcatgtacggcagccagcttcatctcttcgttgatggcagtggcacgcgtatcaagtgcaccacggaagatataagggaatccgatgacattgtttatctggttcggatagtcagaacgtccggttgacatcaatacgtccgggcgagaagccatggcatcttcgtatgaaatttccggagtcgggttggccaaagcaaatacgataggatgagaagccatgctgcgtaccatatcctgactcagcacgttacctctggaaaggccgaggaatacatcggctcccttgatggcttctgccagtgtgtggatgtcagtacggtcggtcgcaaagtatcttttctgttcgttcaggtctgtacggtctttagaaatcacccctttactgtcgagcatgacaatgttttccaggcgtgcaccgagagctacatataatttagtgcaagatacggcagatgcaccggcaccgttgactactatttttacctcttcaattttctttccggctacttccagcgcattcagcaatccggcactggagatgatggctgtaccgtgctggtcgtcgtgcattaccggaatgtccagttcttccttcagtctctgttctattttgaagcattcaggagctttgatgtcttccagattgatacctccgaaagtaggagcaatggcttttaccgcttcgataaatttatccgggtctttttcatttacttcaatatcgaatacgtcaattccggcataaattttaaacagcagtccctttccttccattacgggttttccgctcatggcacctatatctcctaaacctaatacagctgttccgttagagattacggctaccaagttacctttgtcggtatagtcgtatgcggtatccggattcttttggatttccagacacggttctgctactcccggtgaataagccaatgataaatctcgttgagtttgataaggtttggtggggaccacttctattttccccggtttgccttgtgagtgatagagcaaggctgcttctttcgttatttttgtcatatttcttcgttttttagttgtttcaaagaataatgtatcgcgcaaatgtaggaataaaataacaaatggactgtttttttctgaaaaaaactataaaatgaacgaaggttgttttggagtattgaagattttttgtcgatagtttttgtcgattggtctgataatattggctatatgtaatgatattagggcattatggttattcttagttaaagtcactttccggaccttgattttttttctatatttgcacgataaaaaactagagaagggtgtaaagttttcagtggaaaactttaatagagagaagagataaaaccaaattttatatatgaatataagtatgagcacaaaaagaaacagaagtttttcttctagccgagtggcattctatgcattgactctttcggtgctgactgcatgtggaggcggtcaggggggtatgaaaatgggtgatgatgaatttgcggttgaaacacttgcagctgcttctagcaatcagacaacccagtatcccgctacaattaaaggtttgcaggatattgaaattcgtccgcaagtatcaggatttatcgtgaagttgtgtgtagacgaaggtgctacagttcgcaagggacaagctttgttccagattgatcctacacagtataaggctgcatacgatcaggctaaagcaagcgtggcttcagcaaaagctaacttggaaactgttacttcaactgaagcaaacaagaagatgctgcatgagcagaaaattatcagtgattttgaataccagacagctgtaaataacctgctttctgctaaggcaagtttggcacaggcagaagcttcttatgcggctgcaaaacagaatttgggcttctgtaccgtaaccagtccttcagatggagttattggtactttcccgtatcgtgtaggtgcattggttggtccttctgcagctgaaccgttgactaccgtttctcagattggagatatgtacgtatatttctcaatgactgaaaaacagttgctggctttgactaaagcaggtggtacattgaaggaacagttggaaaagatgcctgctgtcaaattgcagttgtctgatggaacaatgtattcagaagaaggtaagattgatgccgtaagtggtgtaatcgaccagactactggttctgtaagcatgcgtgcaattttcccgaacaagcagaatatccttcgtagtggaggtatggccaacgtggtattcccatacactatgagcgacattatcttgattcctcaaactgctactcaggaaattcaggacaagaagtttgtgtatgtattacagtctgataatactatcaagcatacagaagtgcaggtttctaacttgaatgatggtaaacattacatcgtgacaggtgggctgaagcctggggataagattgttgtagaaggtgttcagacattgaaagacggacaaaagattactccgattacacaggctgaaaaagaagctaaattccagaaggcgttacaagaccagcgggatggtaacattcagacagcttttaaataataaaaaatgattcttatggtgctgggggaatgtgtttgatgaaaaccctcgggactgtaattataaatggtatttaaagaatgaaactagataaatttattaaccgtccggtactgtcaaccgtaatttctattttgatagtaattctgggtgtgattggtttggccaccctgccggttacacaatatccggacattgcacctcctaccgtatcggtaagagcaacttatacaggtgcgaatgcacagactgtgttgaactcagtgattgctccgctggaagaccagattaacggtgtagaaaacatgatgtacattcagtctagtgcctcaaacaatggttcagctgatatcagcatttattttaaccagggtactgacccggatatggctgcggtcaacgtacagaaccgtgtgtctatggcacaaggtctgttgccggcagaagttaccaaagtgggtgtgaccacacagaaacgtcagaactctatgttgttgattttctctttgtatgatgcagaagataagtataacattgagtttattgaaaactatgccaagattaacttgattccggaagttcagcgtgtaaaaggtgtgggtgatgccaacgtgatgggtcaggactactctatgcgtatttggttgaagccggatgtgatggcgcagtacaatttggttccgtctgatatctctggtgtattggcagaacagaatattgaagctgcacctggacagtttggtgaacgtggtaatcagactttccagtacaccattcgttacaaaggtcgtttgcagcagactgaagaatttgaagatattgtagtgaaggctctgcctaacggtgaagtactccgtttgggagatgtagcccgtatcgaactgggacgtctggcttatacctttaataatacagtaaacggtcataaggctgtaacttgtatcgtattccagatggcaggaaccaatgcgacagaaacaatcaacaacttgttggatgttattagtaaggctgaagaaagcttgcctgccggattgaagattaacgtggctcagaatgccaatgacttcttgtatgcgtctattcacgaagttatcaagactttgattgaggcgtttgtgctggtgttcatcgtagtatatgtgttcttgcaggatatgcgttctacattgattccggccattgccattccggtagccttgattgctactttcttcgtattgaaactgattggatttagtgtgaacttgctgacactttcggcgatggtgcttgccattgcgattgtggtcgacgatgccattgtggtggtggaaggtgtacatgccaagttggaccagggatacaaatcatctcgtgaggcttctatcgatgccatgagcgaactcggtggtgcactggtttctattacattggtcatgatgtccgtgtttatcccggtaagtttcatgggaggtacggccggtacattctatcgtcagttcggtattacgatggcgatttctatcgcattctctgcgttgaacgcgttgacactttctccggcattgtgtgctattttcctgaaaccgcatgattcagaacacaagcagaagaagatgagtatggtcgatcgtttccatacctctttcaatgctgcatacgattcattgctgaagagctataagaagcgtgtcgtattctttattcataagaaatggctttcattcggactggtggctgcatctatcgtattgttgatgttctttatgaaaaccactccgactggtatggtgccgaatgaagataccggtactatcatgggtgctgtgacattgcctcctggtacttctcaggaacgcgctatggaagtgttggccaaggtagatagcctggtagctgcagaacctgccgttcagtctcgtactatcatttctggatatagctttattggtggtcaaggaccttcttacggttctgtcatcatcaagctgaaagactgggaagaacgttccatgatgcagaattcagatattatctattctactttgttcttgcgtgcacagaaagtcattaaggatgcacaggtattgttctttgctcctccgatgattccgggttattcagtatcaagtgatattgagttgaacatgcaggataagaccggtggtacgctggatcacttctttgaagtggtaaaaagctatacagctgcactggaagcacgtccggaaatcaactctgcgaagactaccttcaacccgagcttcccgcagtatcagcttgacattgatgcggcagcttgtaaaaaggcaggtatcagcccgagcgatattctttctactatgcagggatattttggaggtttgtatgcttctaacttcaaccgtttcggtaagatgtatcgtgtaatgattcaggctgaaccggatgctactaaaaacatggaatcgttgaacggagtgaaagtacgtggtagcaatggagaaatggctcctatcacacagttcgtaagcatgaagaaagtatacggcccggatattatcaaccgtttcaacctgtatacttcaatgaaggtgatggtggctcctgcttctggttatacttcaggtcaggcattgcaggctattgctgaagtggctaaggaaaatcttccgatgggattcggttacgaattgggaggtatggcacgtgaggaagcacagacaagtggcagtacaacaggtattatcttcgtactttgcttcgtcttcgtttacttgctgctgagtgcccagtatgaaagttacatcctgccgttggccgtattgctttctgttccgttcggtttgatgggtagcttcatcttcgtcaacggatttagtgcattgggaagcattcctgcattgaagatgattttgggaaccatgtcaaatgatatttacatgcagattgccttgattatgttgatgggtctgttggctaagaatgccatcttgattgtagagtttgctcttgaccgtcgtaaacaaggtatgagtatttcctgggcagccgtattgggtgctgcagcccgtcttcgtccgattttgatgacttcattggccatgattgtcggtttgattccgttgatgttggctatgggtgtaggagctcacggtaaccgtacattgggtgcttcggctattggtggtatgttaatcggtatgattttccagattttcatcgttccggtattgttcgtggtattccagtggttgcaagaaaaagtgaaaccaatggaatgggatagcctcgatgaaagtgaagtggaagctgaaattgaacagtattctcctaatacgcataaataagattgataatgaaaaaacagataataggaatgatgtgtctggctgctatgatgagcagttgccacatttacaaagcttatgaccgtccggaaacgatagatgcctcaggtgtctatcgtgacccggcttcggcaaccgatacactggctgccgatacggccaatatgggaaacttgccttggaaagagattttccgtgatgccaaactgcaggccttgattgaagaaggactggctaacaatgtagatatgcaggcggctgctctccgtgtacaggaagcgaaagtgatgctgactgccgctaaattgtcttatttgccttctattaatctggctccgcaaggttctacaaccagcatgggaggtggaaactatgtaaaggcataccagcttccagtgtctgccagttgggaaattgacttgttcggaaagattttgaataccaaacgtgggcagaaagtagcctacgaacagagccagtatgcagaacaggctgtacgttcacagattatttgtggtatagctaatgtgtactattctttgctgatgctcgaccgtcaggtagaaattacgactgaaacggctgctatctataaagaaaacgtacgagtaatggaagccatgaaaattgccggtatgacaaccgaagctgctgtagcacagatgcgtgctgccagccatcaggtagaggcttcgttgatggatttgaaacgtcaggtgcgtgaaacagaaaattcacttgctgtactgttggctaaggctcctcagaccatcgaacgcagtacattggacgaacaggttatgccggaagaactggcagcgggtgtaccgatgcagttattggaaaaccgtccggacgtgaagatggctgaaatgacgcttgcggctgcttattataccaccaactctgcacgtgcagctttctatccgggcttgaacattactggtctggcaggatggacaaacggttcaggtattacagtggctaatccgggtgaatttatgctgcaggctttggcttcattggctcagcctattttcaataacggtaagctgattgccaacctgaaggtttcaaaggcagaagaaaagattgctcagatgaattatcagcagactattctggaagctggaaaggaagtgagcgatgctctgtatctgttcgatacacagaataagaaactggtggaagaccgtggacaggtagagcagttggataaggcagtgacttataccaaggccttgttccagagcggagatgccacttatctggaaatcctgaccgcacagcagaatctgctgagtgcacagttgtcagaggtagctgataatttccagcgtatgcaagctgtgatcaacttgtacagtgcgttgggaggaggaagaaattgattaaccttaaaatgagaaaactatgataagtcctttagcttatgtagatccgtcagccaaattgggtaagaacgtgacggttcatccatttgcctatatcgacaagaatgtagagataggtgatgacaacgtgattatgccttatgccagtctgatgagcggcacacgtatgggaaatggaaatacagtttatcagggagctgttgtggcagcagttccccaggattttgcctttacaggtgaagaaacactggctattatcggcaataacaatgtgattcgtgaaaatgccgtgattattcgcggtacacatgcttcacatgctacaaaagtgggtgatggcaacttcatcatgagtggagcccgtctttctcatgacgtggaagtgggtaaccgttgcattatcggtaacggttcacaggtttcgggcaactgtatcatctatgacaatgccatccttacttccaatgtgctgatgcagggaaatacacgtctgggaagcttctcagtagtgcagggcggatgccgtttcattaaggacattcctccatatattgtagcagcccatgaaccgattgcattctatagcattaatacaaaggtgctggagcataccggtttttctgaaaccattatcaaacacattgcacaggcataccgtatcctttataaggcaaatacttcattgcatgatgcattgggacgtattcgtgaacagattcctaacggaccggaaattgaaaacattatccagtttgtggaaacttcaaaattaggaattattcattgatgtagataatggcagggcgaagaaaggaaaacgaccgtgaagagttaaagttgcgtgtggtggaaacagcctccaaatcttttatgactttggggattaaggctgtccacatggacgatatagcaagttcgctttctatatccaagcgtacgctttatgaactgtttggagataaagaagaacttctgctggaagttttccgtttttatcgtcattgtatgaatgagtatatgcaagagattgcttccagcgcgaataatgtgctggaagtaatccttacattttatgagcgtaagttcaatgagttgtgttcggtaaaccctctgttctttcgtgacttgcgcaaatattccaaggtgttggactatatacatgatgaccgtcgcaggggagatgctgatgcactggcctattttcaaaaaggggtagagcaaggtatttttcgtagtgacatcaattttcagattattaatcaggccatggccatgcagatggacttattgatttattcagacattacagaccattatccgctggccgaaatctatagtgaaatcactattctacacatgcgggggattaccacggaaaaaggttaccgcatggtcgatgatttcttgaagaatattcgagagaaacataccagataattttgtacttaaactcctctatctttgatttctcgaagataggatgcggttcggcaatacttgcactcaaaagcaagcttttggtttggtattgcactcacctttcgctatctttgcacccggttttagaggaaagttcatgaaaaataaattattatacacttttctgttcacccttctggtggtggcaggcttgtttgccatgcattttttgccgtctgtttcttttcgtggcgaacctttgagaagggttgatttgctttcagacattcgtataaagaaggaaatagcagaacctatggattctgataccttggtgttgccgcctcctgtaaagcctgcttttgtggatacctgcaagagtggaatggtctgcattgaagaatatgctgattctgcagggcgtggaatggagtatttctatgaagctttgggaaaggtgtcttctttggaccgcccggtacgtattgcctatttcggagattcatttattgaggccgatattctgaccggtgatttgcgcgaaatgttgcagaagcgttttggcggatgtggggtgggatatgtgcccatcacaacgaaaatagctggtttccgtcctacggtacaccattcgtttggtggatggggcagtcactccattacagattccacctattttgaccgttcccgtcaggacatttccaatcattattttattccttcttcgggagcttatgtcagcctgaaaggtgagaaacgcttcttgtcgcatattgatacctgcgaagtgtctacctgttatttcctgacttccgattctttgcggttggctgcatctgtcaatggaggagaggcacagccattttctgtgggtggaaaagaagagttgcagtctgtgtctgtgaacggacgtatcggatctgtgcgctggaaagtggagcagctggattctacagctttgttctatgccgtgacgatggatccgcgtcaaggtgtggtagtcgataatttcagtacccgtggaagcagcggacagcagttgggtaatattccgatgtcgatacttcgtcagtataaccgtctgcgtacatacgatttgattgtgttgcagtacgggctgaatgtagcttcagacaaggtaatgaactatacctattacaaggatgcgatgaaaccgatagtggagcgtttgaagacggcctttccggaggcttctgtcctgattgtcggggtgggagatagagaaaacaaggatgaaaacggcgaattgcgtaccatgccgggggtgaagcgcctgattcgttaccagcaggcacttgcggcagaaacgggtgtggcattctggaatatgttcgaagccatgggaggagaaggtagtatggtagagatggtgaaccacaagcctcagatggccaattatgactatactcacatcaatttcaggggaggaaagcacattgccggacttttgtttgaaacgttgatgtacggcaaggaacagtacgaaaaacgaaaagcttatgaaatggagtgagatacgtttttggaggatattcttcggattccttttgggggcattgccgcttttagcgcaggatgtgttgccggagaagtcgcgtccggaccgtcattccggtcatgtgtccgacagcgaggccatgcagcagctgatgcgctttgtggaagtcagcaatccgatgcctgccggctttaagggaacaactgagaatacgattacagaccctacgcatgaactggagcctttctggcagaagctttccgtgctcgaccgtccgttacgtatcgtgcacatcggcgattctcatgtgcgggggcatgtgtatccttatattgtacggcgtcagctggaagacgatttcggacgggaggccgtgctcgatatgcaggtgagttaccgtacttcgggactggcgcaggaaacgggggccgcaggaattgtgtatcacatagtaggagtaaacggagcgacttgtgcttcttttgctacacctgagaatattcgtcagattatcgaactgaatccggacctggttattctttcgttcggcaccaatgaagcgcatggtcgccgttatttttcggcggagcacttggcacagatggataatctgttagaagaattgaagaaaggatgtccgcaggcggtatatctgctgaccactcctcccggagcgtatgtccgcaatggccgacggggcgcaagagtaatcaatcctcgtacgaaattagtggtaaagacagaactggattatgcggcttcgcggaaactcgctatatgggatatgtatcacgtggtaggaggtgaacgttatgcttgtctgaactggagtaatggaaactatttccagcgtgacaagattcatttcacgcaggaaggatatattttgcagggactattattacacgaagcgattatcaaatcatacaacaattatgtggaaactcaactggacggaacttggaattgacttggacagactgaaagaggtattgacatacgatgcggcgcagccgatgattttcagcagcggcttcttcctgcttctttttctcggattcagcctggtgtatctgcttttgcagaaacggactacggcacgcctgctgtttgtcaccttgttttcttattatttctattataaaagcagcggaacctatttcttcctgctgggcattgtcacggtgtccgacttcctgctggcgcgcaggatggagatgacggtggagcactggaagcggaagatgctggtggtgtgcagcttgtgtatcaacctcgggctgctatgttatttcaagtacaccaatttcttttacgaaatgctggctccgttgtggaacggacggttcgagccgctggacatattccttccggtagggatttctttctttaccttccagtcgctgagctataccatcgacgtgtaccggcgtgatttgaaacccttgtccagtctgctggattatgctttctatgtgtctttcttcccgcagctggtggcaggacctatcgtgcgtgcccgcgatttcattccgcaaatccgccggcccttgtccgtcacgtccgagatgttcggtcagggcatcttctttatcgtgagcggtttgttcaagaaggcggtgatttcggactacatcagcgtgaacttcgtggagcgtattttcgacaatccgggattgtattccggactggaaaacctgtttgggatttacggatatgccttgcagatatactgtgacttttcgggctacagtgacatggctatcggacttgccctgctgctgggattccatttccctcccaactttgattcgccttataaggcggacagtgtgaccgatttctggcatcgctggcacatctccttgtctacctggttgcgcgactatctgtatatttccctgggcggtaaccgaaagggaaaaatccgtacctacatcaacctgatactgaccatgcttttaggtggtttgtggcacggtgcttcgtggaactttgtggtgtggggcggattgcacggagtggcattggccttacataagtttttccgtaacctattgggtcggcccaaacaatatcgcagccgaggaatacgtaaattctttgctgtggtgttgactttccattttgtatgcttctgctggatattcttccgaaactccacgtttgaggcttcggtgaccatgattcgccagatatttacagccttccatccggaattgctggagcagcttttgacgggctactggaaagtgtttgcattgatgggagtaggcttcttgcttcatttctgtcccgacagctggcagaatgcgtgcagccggggcatggtgcgtatgccgctcatagcccaggcactgataatgattgcgctgatttatctggtcattcaggtgaaaagcagcgatattcagccgtttatctacttccagttctgatgtgtgaggtcgtataggcgtgtaagagtaaaactattttagttttcactccctattttttcaggaaaaaattaggagaaaagaccgaataattgtatttttgtcacgctttcgaaatatcctttctcaaaaaaggacgttggaaagtgtgcttattgatatttgcgcccgtagttcaatggatagaataaaggattccggttccttcgattggggttcgactccccacgggcgtacataaagcttattagactgaaaaagaacggtttaataagcttttttgtttatagataccagccttcagacatcgcgatttgtactttcggaaaaaacgctcctacgtttgtgctaaaacgcctttgcgtttgatataaaacgtacttgcgtttcatgtaaaacgcacttgtgttttaagtaaaacgtacttgcgttttgattgaagcgtcaaagcgttttccggtaaatgcaaaggccttttctgagggtgaaaaaaatcactgtttaaagttgactgagagatgaaaaactacatgtttgaaatttgtgcgaactctgcagagagttgcgtggctgcccagcagggaggtgctcatcgggtagaattgtgtgccggcatgccggaaggtggaactactccgtcgttgggcgagataaaagtggcccgtaagttgattgacatccgtctgcatgtcattatccgtccgcgtggaggagattttctgtacacgccttctgaactggagattatggaagaagatattcgggctgcccgtcaggcgggagctgatggagtggtgttcggttgccttacaccggaaggcgagctggacaagccggccatgcagcgtctgatggaagcttccaaaggactttcggtgactttccaccgtgcatttgattatgtcaaatctccccgtgaggcacttgaagaactgataggcatgggggtgaaccgtgtgctgacttctggccagatgcctacggccatggaaggggcacctttgctggctgaactggtgaagcaggcgggcgaccgcattatcatcatgccgggctgcggagtgaacgaacataacattgcggaactggcccgtgtgacgggagccggtgagttccatttttcggcacgcgaacaaaaagaaagccggatgcttcttcgcaatccggctttgtcgatgggaggtacggatatggatgaatatgctcatccggtcacgactcccgaaaaggtgcgtcgcaccattgaggcgcttacagtccgtggataacatggagcagttgctcgcccatgccgatggtgtatccgtgtgattcgaagactacacggttgaacgtatcgcccaggataatcaccggcagggtgggtttgctgcccagcttcatattttcagcaatcattttcagaatgcttccgtctttgtctataccgaacactacgttcgacggaaggttggggaattccttgcggtcgaatttcttataggctgcttcgtcagtgaaaagcagtacaatcgtacgtccccatttctcaaattccgctttctttacttcgatgtctttcagggcatgattggtcggttcctgacctacgcccaatacgccgacaatgtaatatcctcttccggtagtgttgaggacagatacttgttcatcggtgcccggacgggtgtagagtgcttcggaattgaagctgccgatgacacgtacttcttccgtattgttgcgcatgcagagaggagtcaccgtggtctttcctttgtcgacagagaagaatgaaacctggatcaatacgcctccgttggccatacggctacccgttaccatcatataataaccggtcgacatgctgcttccgtttttcagcagagaagcccagctggcatcttccggatggttctgcaactggaatgtgccgttgtcatacttcgacagggtgaagtgagtgtaatatttcggattgtccagtcgaggaatagcctggtaagtagctttcaatacaccttccgacagacttccaccttctgaactttcaaagtccaccaataccggttttccgttgaggcggtagcagatgttaccgtttacttcatccttccaggcggggatacctaagctacgggcagcagctacgaagaaaatgtctctggactgtgagtcggttacacggctgcgccatacaccttcgggtgaggtaatggtgaatatcgtactcaggtcgttgcggatagacaggctgtccttacaccatttcatgagcacttgcgggtcagctttgatttgtgcggctagttcggcagacaaggctttctgcaggtaggtacggtaaggagtcagcatttcagtggcaatacgcggtgcaagcacttcttttacgtcagctttcgcatcggtagcatacaaatggtcttccagaatgctgcaaggtgtgtcgcgcaggtctttatcagccagtgtgctgagcaattccaatgcacgggcaccctgtcccttttccgcagcattcgacaggaactgcatgatgtccgcatggtttcctctggatttcagaatgtatgtgcttgtttggttcacatccagtttcagtccttctgcaaaagccttggccttttcttcggtggggaagctggctacgtaagcattgcggatagaatcttcctgagccatacgccggttgttttccttacgctgtgcatcggtcacttccgggaagttggctttttcagccggtggcacaatgtgcaaggtatcggtaaatacatctcccggacggtgagaaagcgttaatgtgacttctttatcttttccgaaagaaactttctgcaagccgaagtggtcatttgccgaagcgtagactaccatgtcgcccaatccggcagaaagtgatgcttttccttgtgcgtcggtcgttttgttggctacggtgaagaattcagcgtaattgtaaatcttgaactctacgtgtgcaccttctacggccttaccctgagcatctaccaccgtgacagtgacgggggcactctgtccgtagttgtcgatgatgttgatttccgtatagttggcagtggttttcatcacttcttccggtccgtcgtatgcaccgaatactttggtgtgcatcagcatacctctgctggcaggagcattgaaccatcctaagttcagtaccggttccggttcgcaggcaccaaggaagtaccatttgccgtccacccaggcttctacccaggcatggttgtcgtcagtatgtgcccagcgcggggtgtacacctgacgggcagggatacctacggcacggagagcgactaccaggaaggtcgattcttcaccgcaacgtccgtaagccgttttcacagtagccatcggggcactggtacggatgtcggtcggggtatagattactttttcatggcaccagtggtttacttccagcacggcatcgtacatggatagtttttccacacgcggcatcagttcctggcggaacacttcgcgtgcattatccaggttttcgttgtttactctgacagggagtacaaagtggcggaatatcatgtcgggaattccggctccccatgaagtctcttttcggttctgaagtgccagacgtacatttttcaggtagaattctccggaatagtcggaaatatcgcccggagtcatgtaggcatacaggaacatcatggcttcccgttcctccagcgacatgtcttcattgaagatgtcaaaaagatttccccggttgagaatctccttcttctgtccgaaatcagcttccactttgttgcggtagtcggcttctttcagaaaatggttgggagaagtcgaggtacacgacgggaagaggcaactgagccaaaatgcaaatgcgggaatgagtagttttttcatgcaggtaaaaagatttggtaaatacagaaataaaaaagacacggaaacgagaagttcttcctttcggggtgaacttctgcgtttctgtgtcttttggcttaaaatgtgatatgcacttaaataggtttatattctacaaatgcttccatagcttcatagcaagccagacctaactggtcgtaaagtgaagcagttccgcggttgcggtcttcacttctctgccagaacagacgttcgtcattgcccaggaacggtgcgctttccatctgagactggtgtttcaggatagagttacgttttgcacgaagttcttccggactcaacggtacggccatttcgatgttttcgatttcccattctgcccatgcaccacggtacatccagatgcggcagtctttcagccattctgcaccggcattcttttcttcatcgatagcggcaaaaacagcgtccgtacatacgcggtgagtaccatgcgggtcggccaagtcgccggctacataaatctgatgaggtttcacttcgcggagcaggttgagcacgatttctacgtcggcctcgctgatcgggttcttttcaatctttccggtttcatagaacggaaggtcaaggaagtgacagcggctgagcggaatacggttgaatgtacaagcagtacgagcttcaccacgacgaatcagacctttgatggtcaggatgtcgcgtgtatccatgtcgccttctttcttggtagagaagaactgtttgatttcagcatatttgtcgctgataaccttgtcttcactattttcgaacaactggttaaaaccgttgatgaaatgcatgaaacgtactacttcttcatcgcctacggcaatgtttccggaagtttcgtaagccacgtgtacttcatgtccctgctgaacgagacggcgcagtgtacctcccatggagattacatcgtcatccggatgcggagagaataccaccacacgtttcgggaacggtttggcacgttccggacgataagtatcatcggcattcggtttaccacccggccatccggtaatggtgtgctgcaggtcgttgaataccttgatgttggcattgtaggcagagccgtaaagagccagcagttcgctcaagccgttttcattatagtccttgttggtcagtttcagaataggcttgttcagtgtagtacacaaccatacgatggcacttcttaccagtttgtcgttccattcgcagctggttaccagccatggacgctgaatacgagtcagatgagctgccgcagccaggtctacgcaaacagaagtgttggcatgaagctgcaggtaagatgccggcagtgtatcacttaccttgtcttccactgcacttcggatgatgtcagctttgtcttcaccccaggccagcatataaacttttctggctcccataatggtattgatacccatggtgatggagcagggaggaagattgtctacaccgatattatgtgcagcttcagaacgagaagttgcatcaatcaaaatcaggcgggtagtagagctggcatgtgaaccaggttcgttcataccgatgtttccttcacgtccgattcccatgataaccatatcaagacctccaaaggtctgtatacgctgttcgtacaaacggcagtgttcgatgatggcttcctgagggatgctaccgtccattgtaaagatattctggcggtcaatgtctatctgtgaaaggaaaagcttgttcaggtggctgaaactgcttccagcaccttcggtcagcggataatattcatacaggttgaagaataccacgttgcggaaacttacgccttcatccttgtgtttccgaatcagttcggtgaacagcggacgcagggaagcacctgtacctatggcaatggtacagaattttccttcacgctgtctgtcctgtatctttgcgacgatttcattggcaatctgtaccacaccttcttcgcttgtttcgaagatgttggtcgggattttttccagtcgtgtcaggacagaacgttctactgcgtttcccggacgatagtaacgtggggaaacgcgattcagtgaaatttgagagctaagattggttctcatgattcagcgaattagaggttgtttttttcaatatctttgaagtacttgtaggtaccaactttcagttcgtcagtagctgcttcgtcacatacgatgataccgtgctggtgcatctgcaatgcgctgatagtccacatctgtgtgatgccgccttctactgcatgctgcaatgcacgtgccttgttatgtccgttacagataatcagtacttctttagcagaaagtacagtaccaactcctacggtcaatgctgtcttaggcactttgttcacgtcgttgtcgaagaaacgtgagttagcgatgatggtatcagtagtcagtgttttcacacgtgtgcgtgaagtcagtgaagagcccggttcgttgaaagcaatgtgaccgtcaggaccgatacctcctaagaacaggtcgatgccgccgaacttttcaatttctttttcatagttggcacattcagcttccaggtcggctgcgttaccgttcaggatgtgaatgttttccttgcagatgtcaatatgattaaagaagttattgaacatgaatgaatggtagctttcaggatgagattccggcaagcctacgtattcgtccatattgaaagtcactacattcttgaatgataccactcccttcttgtttaattcaatcagggccttatacatacccagaggagatgaacctgtgggaagtcctaatacaaacggtttttctttagtaggattagctgcgttgattttttttgcaacatagtttgctgcccagttggacagagaactgtaatcgggttcaatgattaatctcatggtggttagaattttgaatattgaaattaaattaacttgtttctttctcctttgtgataagaattttcttactccatgcaaatatatcaaagcttactcagaaaggcaaataaaaaaatagtttttttatgcatgagtttttaaagaaaaattctacatttgtaaatgtttctataaaaaataacaaatatgggtcagactctattgaagaatatacagaaaggcgtaaaaagtgcattggtaaagcagcgtatcattacgcacctgatttatgcgggaagcactacaatcacagatttgtccaaatcgatgggactaagtgtgcctaccgtgacaaagtttgtggatgaaatgtgcaaggagggatatgtgaacgattgtggaaaactggaaaccagtggaggtcgtcatccaagtttgtatggactgaatgcggattctgcctattttatcggggtagcgatggcggtacagtcgttaagcctgggggcaatcaactttaagggggatgtgcttcagaccaagatggaaattccgttcaagctggaaaatacaccggaatgtttggaacatatctgtcaggaaatagaaacatttatcgatgaacttccgtgcgacaaatcaaagattctgaatatctgtattggtatgaccggacgagtaaatccggaaacgggctgcagctatacgcatctgacttttggtgagaaacctttggcagagatgttctccgaaagattgggtattaatgtgtgcattgataacgatagccgtgcaatggcatacggagaatatatcatgcgctcggagaaatgtccgaagaacctgatttatgtgaatgtaaactgggggttgggactcgctatcatcattgacggtaaactgtattcgggaatgtctggttttgcgggtgagtttggacataattacggatatgataaccagcagatctgttattgcggaaagaaaggctgtattgaaacggaggtatcctgctcggctttgtatcggaagtttattgcccgtttgcgtcagggagaaaactctgtgttgctgaaagagaaatccatcgatgaaataactttagcagatattatttctgctgttcgtcgtgaagatgtgctggccattgagctggtggaagagattggcgcgaaactgggacgtcacattggtgacctgattaatgtgttcaatccggaacaggtaattatcggaggagaattctcgaaggtaggagagtatttgttgcctccggttatttcggcagtccgtaaatatacgctgaatttaatgtataaggattcggatattgtattgtcggaactgaaagaaaaggcaaacgtcataggagcttctctgttgtcaagaagtaagttgtttgcattggaataaaattttgttgagataaaaaatccccggaaagtgaagttgtacttcggttttccggggatttttctttatagggatgtatcttgtaaactttgacggcatgtctcccagttttcgttgaaggcagccatggaggggaacaggatgttggcaccttcttgcagaagcacgtcgtttggaagcggaccggtgttcagtgcaatggtgaagataccggcagctactccagctctgactcctaacggcgcattctcaatgactaccgcttcgttggcttgtatgccggctttctgcaaggccatcaggtaaggttcaggattgggctttccatattttacatcaaaagcggttaccatcagttctcgttggaagatgtcggggaagtagtggttcaacttgtccaataacgagagttgtccggagccggttacaaccatcggaatcagtccgtctgcttttatttttttcaggacctcgaatgcgccgggcatagggtcggctttgggcaactgattgaatatgtcgctcttggtctggtagattcgtttgatttcttcttcatcggcctcatagcctctttctctttggctgacgatgttgatggttgccgcaccggtacgtccttcgtggaggtaggcttcctctttgctcaggctcattccgtattgcttcattgccttatgccaggcggtggcatggttcttcatggagtcgaacaatactccgtccatatcgaacaatacggcctttaagtcgatgcgtgtataatgatgggtggtaagatattggttgatttcttgttggaacatgatgatatggtttataatattcaggcacgcattacatgaatgcactttccttgtagaaagaaagagtgcttttcatgtaattcgtgcctgtcaattaaaaacggagtgatagactctcgtttatttattttttcagacgagcccggattgcttcagattctttttcgtatcccggcttgttcagaagagcaaacatgtttttcttgtaagcttctacgcccggctggttgaacggatttacttcgagcaggtatccgctgattccgcaagccttttcgaagaaatagataagctgtcccaagtagtattcgttcaatgaaggaacgcttacacgcaagttaggaactccaccgtctacgtgtgcaagctgtgtaccgagttcggccatcttgtttacttcgtcgatgcgtttgcctgccaggaagttcaggccatccaggttttcttcatcgctcgggaagtgaagttcgtggcttggagtttctacagaaaccactgtctcgaagatgctgcgttcaccctgctgaatccactgtcccatagagtgcaggtcagtagagaagtctacagagctcggatagatacctttcaggtccttgccttcagattcaccgtacagctgtttccaccattccatgaagtagtgaagtttcggctggaagtttactaagatttcaattttctttccgctctgatacagttcgttacgagtagcagcatacaaagcagccgggttttcgtacatgttttcgttggcacaaactttttccatttcgcaagcgccggcaaccagctggtcaatgtcgattccagctactgcaataggaagcaagcctaccggagtcaatacagagaaacgtccgcctacattgtcaggaatgatgaatgatttgtaaccttccttgtcggctgttgtacgggctgcacctttcttggcatctgtaacagctacgataaccttgcgagccatttccttgcctctctggtcttcacactgctttttcaacagacggaaagcaagagcggtttcagtagttgttccagatttagatatgttgattacaccaaattttttgtctttcaggaattcagtcagttcgaacaggtagtcttcgctgatgttgtgtccggcaaaaataatagtaggctgtccggcttttttctcctgcaaccaagcaaagctgtttgacatagcttcgatgactgcgcgtgcgcctaggtaacttcctccgataccagctacgattactacgtcgcagttttcgcgaagtgtctgtgcggtagctttcaggtcatccaagtgttcctttgtgatggaagaaggtaaatgcaaccaacccaagaagtcgtttcctaagcctgtgcctttttccagcgtttccatacaagcttttacctttggttcataagaagccaatttttccttagatataaaatctaaagtcttttcaatgttcagattaatgttttccataactgttttctgattttatctaaatgagtcagttaataatttgatttctatcattggtgatatacgttcgtaaagaatattatagacggcatccacaatgggcatattgacatgcaggtgcttgttcagttccttgatacatttggttccgtaatatccttcggcaatcatttccatttcaatctgggcactttttacggaatatcccttaccaatcatggtaccgaacacgcggttacggctgaaattggaataagaagtcacgagaaggtcgcccagataggctgaatcgtttgtacagcggtttacgggatgtacggtatctaagaaccggttcatttcctgtaaggcattggacaccagcacggcctggaagttgtctccatatttcagaccgctgcagattccggctgcaatggcatatacattcttcaacacagaagcatattcaatgccggctacgtccgtattgaccgaagtcttgatgtaatgcccggccagttgccgtgcaaacatcttggctttttcaatgtctttgcatcccacggtgagataagaaagtcgttccaatgctacttcttccgcatgacagggacctgccagtacggctatgttgttttcaggaacgtcataaatcttatggaaataatcggatacgataaggttttcgtcgggtacgatacccttgatggcagtaacgatgaatttatccttcagcttggtttttagctttttgaggtgacttttcagatacggtgaaggtgtgacaaagatcagggtatccgactctttcactaccttgttgatgtctgatgaaaagttgatgcatttcatgtcgaaacgcacacttgtcagataggctggattgtgacccagacgcttgaattcttcaattcggtcgtcacggcgcatataccagtttatggattcagcctgggttaaaatgattttagctatagcagtggcccagctgcctccccccataatcgctattttcccgggtaatttcatactcttatatttaatgaaaaacagatatgaaggacaagacatgtgctttgtccttcatacactttcattcatttatttaatcttttctatccagccagctacttcgtctactgtggggttggcaagttccagtttgtatttcttgttgatgccacaaatatcctgatgaagtttctgcggattcacgtccttcatgtcagtcacgaggttgtatccggctttctgaattaccggaacccagtcttctgcgattcctaattccatgaatttagcaggcgcatctttcgggattactttttccggacgcatctgcgggaagaacaacacttcctgaatggtactctgaccggtcatcagcattaccagacggtccataccgatacccatacctgaagtaggaggcataccgtattccaatgcacgaacgaagtccttgtcgataatcattgcttcgtcgtctcccttttcactcagtctcatctgctcttcgaagcgttccagctggtcaatcgggtcgttcaattcagagtatgcgttacacaactctttaccgttcaccatcagctcaaagcgctctgtcaaatctggattgctgcggtgtttctttgtcagcggagacatttcgataggatagtcagtgatgaaagtcggctgaatgtagttgccttcgcagaattcgccgaagatttcgtcaatcagcttacccttacccatggtgtcatcaatttccatgttgagcttcttgcaaacttcacgaatctgttcttcgttcatgcctgtcaggtcatagccagtgaattccttgatagaatccagcatggttacacgtttgaacggagctttgaagttaatcatgttgtcgcctacctgtacctctgtagtaccgtttacatccagacagattttttcaatcatgttttctgtaaacttcatcatccagttgtaatccttgtaagcaacgtagatttccatacaggtaaattccggattgtgtgtacggtccataccttcgttacggaagtttttaccgatttcatacacaccttcgaaaccacccacaatcagtctcttcaggtacagctcactggcaatacgcatgtacaatggaatatccaatgcgttgtggtgagtgataaacggacgtgccgcagcacctccggcaatagactgaagaatcggagtttctacttcgatatatcctttcgagttgaaatactctctcatagagttgtagaccttgttccgtttcaggaagatttctttaactccgtcgtttactaccaagtctacatagcgctgacggtaacggagttcagggtcttcaaacttatcgtaagccactccatctttgtattttacaatcgggagcggacgaattgatttcgacaatacagtcagtttctgtgcatggatagagatttcgcccatttgggtacggaatacaaaaccttcgattcctacgaaatcgcccaaatccagcaagcgtttgaaaactacattatataaatctttgttttcatccggacagatatcatcgcgggttatatatacttgtatacggcctttagaatcctgtaattcaatgaaagacgcttttcccattacacgacgagacatgatacgtcctgcaacggatactttgcgaggttcagcatcatctttgaattcggcttttatgtcagtcgaaaaagcgttggttacatactcggcagcagggtatggttcaatccccattgctctcaactcattcaggctgttacgtctgattatttcctgttcgcttaattctaatacgttcatttgttagtatattaactcattctgggcacaaaaataaaaaacattttgcaaataatccctatttataaggttcttttagaataaaaagccacgactcttgcgtgaaaaacaggcagcaggctagggttttatcatcgtggctttgacgtttttaccttgacacgtacgtgacgaggtcttgacacgttcgtgcggatgtctcgtcacgttcgagtcgagaccttgacagcaacgtgtcgaggtatttttgtataagcgtttgcagaaatatacaattacgtgtgtctttaaagtattttgatgctaatttttggtttctatgattaatttgttacctttgggcgtttctaatgaatgaaaagcatgaaagttattttattacagacagatatttgttgggccgatcctgcagccaatgtggcttacatggataaactcatcagtgcccacgcacaaggaacagacttgtttgttctaccggaaatgttttccaccggattttgtacttcgccggaaggcattgccgaatcatccgatagtgctacccttcggtggatgaagcaaaaagctgccgaacgtaattgtgcgattgccggaagtgtttcggtcgaggaaaacggaaagttctataaccgcttctattttgtgcatcctgacggaaacgtgcagtggtacaataaaaagcatctgtttacgtatggaggggaagacaaacactatacggccggacaggaacgggtggttgtgaatttccgtggtgttcgtttcctgctggaagtttgctatgacctgcgtttcccggtatggtcacgcaaccggggcgactacgatgcggcgatttatgtagccagctggccttcgcccagagtggaagcctggaaagctttgttgcgtgcccgtgccatcgagaaccagtgctatgtactgggggtaaaccgggtcgggaaggatccctattgcgaatatagcggaggaacagcgggcatagacccgtatggtaaaacactttctgcctgtgcggatggggaagaaggctttgcagaagttgtgattgatatggaggaactgcaatcgttccggaaaaaattcccggtattgaacgatgccgactcttttacactgaattaatttctatattatatgaaaaataaacgcttattgttgggcgaccaggccattgcgctgggagctattcacgcggggatttcgggagtgtatgcttatccgggaactccctctactgaaattacggaatatattcaaaactctcctatagcaaaagaacgcggtttgcacagcagctggtgcaccaatgaaaaaacagccatggaggctgcattgggtgtttcttatgtaggaaaacgcgccttggtctgcatgaaacacgtgggaatgaacgtatgtgcagacgcatttgtcaattctgccattacaggcgtgaacggaggggtagtggtactggctgccgatgacccgtctatgcattcttctcagaatgagcaggattcccgtttttacggcaagtttgccctgattccgattctggaaccgtcttcccagcaggaagcttacgacatgatgtcgtatgcatacgacctttcggaacaaatgcgtacgccggtactgatgcgcattactacccgcatggcacactctcgtgcggcagtcgaagtgcaggaatcaggaaaggaagtgacttgcacggggcgtccgtcggttccttctgattgggtactcttgcccggtaatgcccgccgccggtatgtggaagccatcgctactcaagaaaagttgcgtgatgaggctgaacagtctgcatttaatcggttggcaggtcaggaaggtatggctgagaagggaatcgtggcttgtggaattggttacaattacgtgatggaaacctatccggatggatgtccgtatcctttgctgaagatttcacagtatcctttaccggtggaaaccttgacccgtctggccgactcttgcaaagagattctggtagtagaagacggacagccttttgttgaagaacagctgaaaggtattcttccttctaaatatgtggtgaaaggtcgtttaagtggtgaattgcctcgtacgggagaactgacgccggataatgtgcgtcaggctttgggactttcttgcgaacaggtttatgctgccgctcagaatgtagttcctcgtcctcctgctttgtgtaagggttgtggacaccgtgatgtatatgatgccttgaataaagtagctgccgaatatccggatgccaagattttcggtgacatcggttgctatacactgggcgcacttcctccgttccgtacattgagcagttgcgtggatatgggagcttccattaccatggccaagggggctgcggatgcaggcttgttcccgtctattgcagtgattggcgactccacatttactcactctggaatgacaggtctgctggatgccgtgaatgacaagtccaatatcacggtggtgatttctgataacctgactaccgctatgactggtggccaggattcagccggaaccaataagttcgaagccatttgtctgggcttgggagtagaaccggagcacgtacgggtagttgtgccgcttcctaagaacatggaagaaattacccgtgttattcgtgaggaaatagaatacaacggtgtatctgtcattattccgcgtagggaatgtatgcagactttaaaccggaaactgaaacagcaaaaagcacagaaacaatgaaaacagatattatactttcaggagttggcggacagggaatcttgtccatcgctacgattatcggagaagcagctcttcatttagggttgaacttgaaacaggccgaagtacatggaatgagtcagcgcggaggggatgtgcagtctaaccttcgcttgtcggatgccccgattgcttccgacctgattgccttgggaacggcggatatgattatctcactggagccgatggaagctttgcgctacctgccgtatctgtcgaaagacggatggattatcacttcggctgctccttttaaaaacattccgaactatccggacgaagaaaagctgatgcaggaattgaagtcacagcctcatgtggtggtgctggatgtggaaaatctggcgaaagaaaaccacatgcctaagtcggccaatgttattctgttaggggctgccgctcctttcctgaaaatcctggatgcagaagtcctgcgcgaaagtgtaggccgtatttttgcatcaaaaggcgaagaagtggtgcagatgaactatcatgccttcgatataggtcatgaatatgtcaaacagttgaaattctgagtgcctatgagtcgcgtgtttagtgaagagctggtaaattccgtagcgaaggaaatgaaagtggccgacttggccaatgccaccataggggatgtgttgctggtagcttcccgcctagaagaactgacaggtattccttttatccggatggaccaggggtctcccggtcttccggccaataaaataggtattgaggcagagaagaaagccctcgatagaggagttggttcgcaatatccggcagctgccggagtggcagaactgaagcaggcagcttcacgtttcgtgaaagcctttatcgatattgatatttctccgcgggcatgtctgcccactaccggttctgtggcagcttctttcggtgcttttatcacttgtacccagcgaattccgggaaagaacaaggtcttgttcattgatccgggtttcccgatacaaaaatctcagttgcgcattttgggtattgagtgggagttgttcgacattcatgatttccgtggtgaaccgctgcgtgccaaactggaaagtttcctgtcgaagggagatattgccgctgtggtatattctaaccctaataatccggcatggatttgtctggaagaaagtgagttgaagattatcggagaattggctacgcagtacgatgtgattgtgctggaagaccaggcttatttctgcatggacttccgtcatgcgttcggccgtccttaccagccaccttttgtacctacggtcgcacgttataccgataattatattctgatgttgtcggcatccaagattttcagctatgccggccagcgtatagctttagcctgcgtgtccgataaattgtttgatacgcagtatccggcactggcaacccgttatgaagactcaggtgtattcgggccgactttcattgcttctatcatgtatatgattacctccggttgcacggctactactcagtatgccatggccgaaatgttggagaaatccatttcaggagaaatcaacttcgtagaagatgtgcgcgagtatgaacgtcgggcacgccggatgaagcagatttttactgaccacggtttctcgattgtgtatgataaggatgtcactcagcaggtgggcgatggtttcttctttaccttgggataccccggactgacaggaggcgaattgctgcgtgaattgatgatgtatggcgtgagcagtatttccttgtctaccactggaagtgaacagcaaggagtgagagcctgtacgtcgcgcatgcgtgaagaactttatccggtgctggaggaacgtatgaaagcgtttcaggaagaccatccgctgaaataagaaatcacaaaactactactgaaataaagaaaaacacagcttatgatttggaatccgaacaaagaatgtatgccgcgcgaacagatgcgcgagctgcaaggaaaacgcttatgcaaactggtgcagtatgtataccataatgtacctttctatcgtcataaaatgcaggaaatggacctgactccagatgatatccggagcatagacgatattaccaaactgccttttactaccaaacaggatttacgtgacaattatccttacggactgatggcggctcctccttcagaggtggtgcgtgtacatgcttcttccggtacaacgggtaatccgacgattgtggggtatacacgtcgcgacttgtccatctggtcggaagtgatgtcacgctgtctgtcggcatacggagtgacccgtgacgatactttctccgtaagctatggctatggattgtttaccggaggattgggcgcacattatggagtagagaacttaggagctaccgtaattccggcttctacaggaaatacggaaaagcatgtacgtttgattcgcgatttacacattacgggtattgcctgtaccccttcgtatgccttgtatctggcagaggtggtagaaaagatgggtatccggaaagaggaattaggactgcgtatcggtgcgttcggagctgagccttggaccgaaaacatgcgtcaggaaatacagaaccgtttgggcttgaaaggatacaatatttatgggttaagtgagattatgggtccgggtgtatcttacgaatgtcaggagcaatatggctctcacatcaacgaagaccatttctatccggaaattatcgatccggttaccctggaatctcttccatacggcacacagggagaactggtatttaccacattgaccaaagagggcatgccgttgttgcgttaccgtacgaaggacctgacttcgctgattgccgatgcgtgtccgtgcggtcgtaccagtgtgcgtatgacgccgattatgggccgaagcgatgatatgctgattatccgtggtatcaatgtcttcccgtcccaggtagaaagtgttattctgggtatgaaagagttcgaaccgcaatatatgctggtggtagaccgcaagaacaatctggataccctggaagtacaggtggaagtgcgtcgtgatttcttcagtgatgacatcggttccatgctgaaactgaagaaaacactgtccgaccgcttgaagagtgtattgtccatcagtgccgacgtgaaattggtagaaccgaacagcattacccgcagcgaagggaagtccaagcgtgtgatagataaacgagtattggtataactaaagcaaaaagaactatgataattaagcaattgtctgttttcttggaaaacaagaccggaagaattaatgatgtagtgcatactttgggagcaaacggtatcaatatgcacgcttttagtatggccgaaacagcagattttggtattttgcgactgattgtgtctgatgtggacaaggcggtagaagtattgcgtgaaaagaattttgccgtgatgtcgaccgatgtggtttgtctttcgtgtgccaatgtgcccggctcgttggctgtggtattggaatacttggccgaagagcagattttcattgagtatatgtatgcgtttgcacaagccgatcaggctcatgtggttatcaagccgaatgacatgtcacaatgtctgaaagtgcttgaggcacatcattgtcatgtgttggcaaaagaagaattgtaaattctatatgcaaattcccccgtcacggttttaggttggcgggggaatttttattgttagaataagctccatgaaacggtcagacctgccatgacgatggctaccatgctcatcagtttaatcaggatgttcaggctgggaccggaggtatctttaaacgggtcccctaccgtatcgcctacgactgtggcccggtgtacttcactgcctttcccgccaaagtttccttcttccacgtatttcttggcattgtcccaggcacctccggaattggccatgaaaatcgctaaaatgaaacctgaggaaagtcctcctatcagcagaccgatgacgcccggcacaccaaacagcagacctgtcacaatgggggcgatgatggccagcagtgacgggaataccatttctttttgtgcaccaagagtggaaatctgtacacagcgtgcgtagtcaggttcagtctttccttccagaatacctttgatttcacggaactgccggcgtacttcctctaccatgtgggcagctgctcttcctacagcattcatggtcagtccgcagaacagaaaggccatcatgctaccgataaacattcccgaaagtaccttgggattcataagcgtgacatcgtagaacatcatgaagtccgtgaatccggcttcccgaatcattacttccagtccgttgggaagttccagtacggtggtaccgatacgttccaggccgatgcgtatttcttcaatataagaagccagtagtgccagtccggtcagggcggcagaaccgatggcgaaacctttacccgtagcggctgtggtattgcccagtgaatccaatgcatccgtgcgtttacggacttctgctcccaaaccactcatctccgcattaccgccggcattgtcggcaatcggcccgtaggcatccgtggctaatgtgatgcccaaagtggacagcatacccacggcagcaataccgatgccataaagtcccatgctgatgttggtaaaatcgaaaccagaggccagccagtaggacaggatgatgccggttacaactgcaatgaccggaatcgtagtcgataccattcctaatccgatacccgaaatgatgacggtagccggacctgtctttccgctttccgccagtttttgagtaggcttgtaggattgggaagtgtagaattcagtagactgtccgatgacgatacccacaatcagtccgatgactacagccagtgaaatatacagccagttatcaatttgtagtacccaaagaatgctaaaggtggcgatgacaatcaatcccgcactgaggttggtgcctgtagataaagccttgagcaattccctcatgcctgcattttctttggtacgtacggcaaaaataccgatgatggacaagatgatacctacggctgcaatcagcatcggagcgatgacggctttaaactgcatggcggtatctcccgtgccgacataggcggcagctcccagggcagcggtagccagaatcgagccgcagtaggattcgtagaggtcggctcccattccggctacatcacctacgttatcgcctacattgtcggcaatcgtagccgggttgcgcgggtcgtcttccggaatgcccgcttctactttccccaccaggtcagctcccacatcggccgccttggtataaatacctcctcctacacgggcaaacaaagcctgggtggaggcgcccattccaaaagtcagcatcgtggtggtgatgacacacaacttggcagtgggattcaatgcatcttccggaatacagaaatccaacagcaggtaccagaaagaaatatcaaacaatcccagtcctacgaccacaagtcccataaccgctccactgcgaaatgctaccttcaatcctttgttcagagagttgcgtgcggcatttgccgtacgtgcagaggcatacgtagcggttttcatgcctaaataacctgacagaccggagaaaaagcctcctgtgaggaatgctacgggtacccacggattttgcaagttgaacccataggccatgatggcaaacaaggcagccagtccgataaatacaagggtaactattttatattgctgtttcaggtaagacatggctcctttccggacatacgatgcaatgcgtgccatggtgggggtaccttcgctttcctgcttcatttgccggtagaagtatccggcaagtgccaatgccagcagcgatgccgccgggaccagccagaatagatatgtttccataatacagttgaataagagtttctccaaacttacaaaaaatcccgaagaaaacgaataaaatgcgggagattctactggcagaaaaggcggataattgggcttttatgtgatggctctgtttttttctaagttcggtaagtttattcggaaacttttcaaggtttttttatgtttcccgtcgcggaaccgtatgttttccgttcgggaaccctacgtttttgcgacgggaaacatagggtttgcagtaggaaaacgtagaaaacgaacaagaaaaatagcaagaatatgcaggtaattttcaatttaaggataatgacgtgtcaaaaagttttccggaatgcggtaaaaaccagccctctgttataaagggatgaggttttgtggcagattgttgttttttatttaatacaagtgtgatattgtgagatattttcaatatatttgcgcacgaagttataaaagattgttcagatgatttacgacatggaaatgcagaagacgttctatgcgtcgtatgcagaaaaagtagaaaaggcccgtaagaaactggggcgtgccatgactttggctgaaaaaatattgtatgcacatttatacgacgaaaacacggttgcagctttccgtcggggggaagagtatgttaacttccgtccggaccgcgtagccatgcaggatgcgacggcccagatggcgctgttgcagtttatgaatgcgggaaaatccgtttcagctgttcctgctaccgtacattgtgaccatttgattcaagcatataaaggagtggaagaggatttgccttctgcttgcactactaataaagaggtatacgattttctgaaaagtgtggcttcgaagtacggcatcggcttctggaaaccgggagcaggtatcattcatcaggtcgtacttgagaactatgcgtttccgggtggcatgatggtgggaaccgactcacacaccccgaatgccggtggattgggtatgattgccattggcgtgggcggtgccgacgcagtggacgtaatgaccggtatggaatgggaattgaagatgccgaaactgattggtgtgaagctgaccggtgcgttgaacggatgggcttcaccaaaagatgtgattttgaaactggcaggtattctcaccgtgaagggaggaacgaatgccattattgaatatttcggagagggaacccgctcgttgtctgctaccggaaaggctactatctgtaacatgggagctgaggtgggagctacgacttctgttttcccttatgatgaggagatgaagcgctacctctgcgctaccggacgtgaggatattgccgaactggctgaggctaatgcggccgatttgcgggcagatgcggaagtggcacagcagccggagaaatattacgaccgtttgattgaaatcgacctttctgcactggaaccgtatgtgaacggaccgtttacgcccgatgcagcttgtccggtatcggaatttgctgcccgtgtgaagaaggaagggttcccgcagaagatggaagtgggattgattggttcttgtaccaactcttcttatcaggatttgagtcgtgcagcttcggtagcccgtcaggtaaaggcaaaaggtttgaagatgcaggcttcgctgattatcaatccgggttcggaacaggtatattgcacggctcagcgcgacggcatgattgaggacttgaagagcatcggcggtgtggtgatgaccaatgcctgcggtccttgtatcggacagtggaagcgtgtgactgacgatccgcttcgggctaattctatcgtgacttcgttcaaccgtaactttgccaagcgtgccgatggcaatccgaacacacatgcgttcattgcttcaccggaaatggctgtggcgtttgccattgcgggcgacctgtgctttaatccgctgacggatacactgaagaatgagaagggagaagaggtcagacttgattcgccgacgggggaaacactgccgctgaaaggatttacagtagatgacaatggctatgtggctccttcggccgacggaggaaaggtggaagtgaccattcagccggactcacagcgcttgcagaaactggaaccgtttgctgcatggaatggagaagacttcatggaacttccgctgctgattaagacgcagggaaaatgtactaccgaccacatctctatggccggaccatggttgcgcttccgcggacacctggaaaatatttccgataatatgctgatgggggctgtcaatgcattcaacggtaagactaactgcgtatggaatcagttgactggcgaatatgaagccgtttcggcagtggccaagcagtacaaggcaaagggcatgggctctatcgtagtggcagaagaaaactacggagagggttccagtcgtgaacatgccgccatggaaccgcgctttctgaacgtgcgggtaatcctggccaagagttttgcccgtattcatgaaacaaacttgaagaaacagggtatgctggcactgacttttgccgacaagaacgattacgacaaggtgcgtgagcacgaccggatttctatcttggggttgcaacgctttgctccgggtaaaccgttgcatgccgtattgacgcacgaagacggcacgacagaaacattcgaagtgcttcatacctataatgaaatgcaaattaactggtttaaggccggttcagccttgaacacctttaaaaaatgagagaaatgagcaataagatgtatatgcaggacgggaaactggtggttcccgatcacgtagtgattccttttatcgaaggggatggagtaggagcagaaatcactccggtttgtcagaaaattgtcaatacagcagtagagctggcttacgtaggcaagcgccgcattgaatggaaagaggtgctggctggtggaaaggcttttgagcagactggtgaatggttgccggaggctacgctggaagcattcaaggaatatctggtaggtatcaaaggtccgttgaccactccggtgggcggtggtatccgttcgctgaatgtggcattgcgtcagacgcttgatttgtatgtctgcctgcgtccggtacgctggttcaaaggagtcgtttctccggtgaaagagccgcacaaggtgaacatgcacattttccgtgaaaatacggaagacatttatgcgggtatcgaatgggaacaaggtacaccggaagcacagaaattctatgctttccttcgtgatgagatgggtgtgactaaggtacgtttcccggaaacctcttcatttggtgtgaaacctgtgtcaaaggaaggtacccagcgactggtgcgtgcagccattgaatacgcgttgcaacacggcttgccgtcagtaacactggtgcacaagggaaatatcatgaagtttacggaaggaggtttcaagcgctggggatacgaagtggctgaaactgagttcaaggaccagactttcaccatgaacgaatatgaccgcttgaagaaagagttgggtgaagagtctgccaaggctgccgtagccaaagccatcaacgatggaaaagtggtggtgaaggattgcattgcagatgctttcctgcaaaataccctgctcattccggaagaatattcggtcattgctacgctgaacctgaacggtgattatgtgtccgaccagctggcagccatggtgggcggtatcggtatcgcaccgggagccaacatcaattacaagagcggacatgccatctttgaagcgactcacggcacggcaccgaacattgccggaaagaatgtggtgaatccgtgttccttgctgctctcttctgtcatgatgctggagtacatgggctggaaagaagctgcccaactgattgtgaatgccttggagaaagctttctcgaaaggagaggctactcatgatttggcgcgttttatgccgaatggccacgcgttgggcacgaatgaatttggacagaaaatcatttctttgctgtaatagtcggaggattttcttgtcggagtgtttttaatggataaaaagagaagtttatgaagaaagaatatatagtttacaaactttccgagtgtgccaagcaggcatgccgcatcgacaatgaactgttcacgaaatacaatgtaaagcgggggctgcgtaacgaagatggtacgggtgtgctcgtgggactgacaaagattggtaatgtggtgggctatgaacgtaccgaccagggattgaaggctattccgggcaagttgttctatcgcggatacgatttggatgacattgctcatgccttgctgcgcgagaagcgtttcggctttgaggaagtggcttacctgttgttgtcgggtgaacttccggacagcgaacaactggcttcgttcaaggagctcatcaatgacaacatgccgctggacaagaagacgaccatgaacattatcgatctggaagggcagaacatcatgaacatcctggcacgtagtgtgctcgaaatgtacacgttcgacccgaatccggatgatatttcacgcgacaacctgatgcgtcagtccatcgaactgatttcaaagttcccgaccatcattgcgtatgcgtatagcatctatcgtcacagcatacatggacgttcgctgcacattcgccatccgcacgagaatctgtcgctggccgaaaacttcctttacatgattaagaaagaatacactccactggaagcgcgtatgctcgacttgctgctggtgcttcaggcagagcatggaggtggtaataactcaacatttaccgtacgtgtcaccagctctactcgcacggatacgtattctagcattgcagccggaatcggttcgttgaaaggtcctctgcacggaggtgccaacattcaggtggtcaagatgttccatcacttgaaagaggtgatttctgactggacgaatgtagacgaaatcgatacttatctgacccgcatgctgaacaaggaagcctacgatggcagtggattgatttacggtatcggtcatgcggtgtacacgatttccgatccgcgtgccgtattgctgaaggaactggctggtgaattggtggcagaaaagggatgtgagaaagaatttgctttccttgaactcctggaacagcgtgccattgaatgcttcaagaaagtgaaaggaaccaagaagcaggtttgctcgaatgtggatttctattcaggctttatctacgaactgatgggtttgccgcatgaaatctatacgccgctgtttgccatggcccgtattgtgggatggacggcacaccgtattgaggaactgaacttcgaaggtcgtcgcattatccgtccggcgtacaagaacgtactggaggaagtggactacaagccgattggagaaagataaaagttcaagtgattttatatggaggaagcgacagaaacccgataatgaggtatctgccgcttcttttctttttaggaatgtcggctaaattgtgtacctttgcggcgtttttatcgtaaaatcagaaaatatgaatagcttgaaaggttttttctatgggattgccacttcggtaacatttggtttgatacccttgtttacgctgcctttgatgcagaaagggatggtgtttgattcgattcttttttatcgttttctctttgccacctttgcattgggtgccatgatgaaaataaagaaggagtcatttcgtatagaaagccgtgatattccgatgtttcttttgttgggactgctgtacacaggatcagctatgttcctgttctggggatatggatttatgggagccggggtagccacgacacttcattttacctatcccgtatttgtgaccttgctgatgttggtcttgttccgtgagaaagcttcctgggtaacgtgggtagctattctgctggcaatatatggcgtatctgaactttcgttgaagggagatgagttgtcggccgatgcgacgggagtgattattgtcctgctttcagccgtatgttatgcgggctacattgtagcagtcaataaatcaagattgcgtgacatgagcggacggaaattagctttttacgtatttatcgtaagtacggtgctgtttgccataaaagcgttgaccaatcagggaatacagcctgtgccggatgcagtttcaatcggtaatctgttcttgctggcggtggtgcctactgttatttccaatattaccttggtcttggccgtacagaatattggtggaacaatgacttcggtattgggagccatggagccagtgacggccgtatgtatcggtgccttgattttttgggaagagtttaccatgcaggaaggctggggaatattccttatcttggtggccgttaccttaattgtgctgacccggaccatccagaaaagtttgtcgacggtagtacgcaaaattcgtccgcgtcatgcttgacacggacgaaccttgcggtgggaaaatcacgatttcccgtatagtttgttgataaggtcgtttcgaccgattttccgtaattcgttgataatggccttccgttcctcaggtttataccagaagaagaacatgcgctgggcaagtttttcacgaggggtcttggccgagaataccggttccaatgtgtagggatgtacgcctgtgtaccatgcttccgtagagacggtcatgggagtaggcgtaaagtcctgtacctgctccagatggaagtccagtttcttggtgatgaccgccagttcggccatgtcctcttccgtacagccagggtgactgctgatgaagtaggggataatctgttgccttaatcccgcttctttgttgattttgtcaaagatacgcttgaactcgtagaactgctcgaacggtggcttgcgcatcaggtatagcactttgtcactggtatgttccggagctactttcagtcgtccgcttacgtgacgtgtaatcagttcgcgagtatattccttggtactctggttggtctttgcatctttactctgatgcagaagcaggtcgtaacgcactccactaccgataaagcttttcttgatacccggcaaactgtctactgcatggtatatctctaataatggctggtggtcggtattcaggttcgggcagactttaggatggatgcacgacggacgtttgcagcgacggcaaagagccgtatcttttccacccatttggtacatgttggccgagggacctcccaaatcactcagataccctttgaagtcaggcatttcagcgatggctttcacttccttgagaatactttccttgcttcggctgacaatgaactttccctgatgagccgagatggtacagaaagcacatccgccaaagcatccgcggtggatgttgacagagaacttgatcatttcataagccggaatccgcttgtttttgtatttaggatgcggaaggcgggtgtaaggcaggtcgaacgacatgtccagctctccttgcgtcatgggaggataaggtggattggttaccaccgtctgctttcctacctgctgaaggatgcgggctgccgcatagcggttggattcttcctcaatatgtcggaagttctgtgcctgctttttcttatccttcaggcattcttcatgcgaatagagtgtcaggtcgccttggccgttcggattttctggcagagcggctacctctttctgtgaaatcaggtaggctgtttgtggaatgtcgtgcggcaagtctccagcatgaacttctccttttacttcaagcaagcgctcgctcagttctgtaatgggtttttctcccattccgtaaataagcaggtcggctcctgattctaccaagatggaaggacgtaatttctcttcccaataatcatagtgcgtcaggcgtcgaagagaggcttcgataccgcctaaaaccaccggtacgtcagggtacagttttttcagaatctgcgtatagacaatgctgggatattccgggcgcatgtcatggcgtccgtcgggcgtataggcatcttcgcttctcagccgtcggttggccgtatacttgttgaccatgctgtccatacatccggcagatacgccgaagaacagtcttggtcttcccagtttcttgaagtcgcgcaggtcatcgcgccagttgggctgggggatgatggctactttcagtcctttggcttcaagcattcgtccgatgacggcagcaccgaaagaaggatggtccacgtacgcatctccactgaagatgatgacgtcaagttcgttccatcccctcagttcagcctctttcttggtagtaggcaaccagtcggtcagcttgtattctttcaaggcgtttctttaattgtggttttcttcagtttcttcttgttcctctttctcttctttttctctttcccatttgatataaagaaggatgagctggtgtaagccgaacgctttcatgttgttgtgataaatcacgtcaatgcacaggtcgagcaagtccttgctgttttcttccatggacgcaatgagcgaacggatgttcagtttcagtttgtcgagcacggtttcgtccacaattccgttgctgtcaataagctgttggaagagcgaatatttttcaatggtttccagatgcttttcagaaatttccatgctgcgtgtgccggaagcgttggtctgtatggtatacataatatgataattttaaagtttatgtaacaaaggtattttttttctggatacgatgactcgttttctctcttttctttagggatttttgtgtattttcggctggtggaaacgcggtgcctgccttatctttgcctgacggatatgtttcagacaatatacctacaaatggtgattgcgggtgttgaaaggattctcttattttgcagtgtgaatttatgaatacgatatttatgtgtaacaatactacgcgaatgtataaacccaccgacaagatgggcgacttgatttgtgagaattatgctcttctgcaggtgatgagccgttttggcatctcattagggtttggtgacaagtccgtgcaggaagtgtgcgacatgaatcaggtggattgcaatacattcctgatagtggtcaatttcctgggcgaggagagcaatcatattcacgaccatttgcagggactttccattcctgcactggtagaataccttaaaaaggctcattcctattttctggatttccagttgcctaccatccggcggaaactgatagaggcaatcgactgttcatcggagaatgaagtcgcttttctgattgtgaagtttttcgatgcatacgtgcacgaggtacgcaagcacatggaatatgagaatgaaaaggtatttacttatgtggaacatttgctgaagggagaacggctgaaagattacagcatcggagtttttgcccgtcaccatgaccagatcaatgccaagttgaccgagctgaaaaatatcattatcaaatattatccgtcgggcggggacaaccagctgctgaatgctaccttgttcgatatatttagttgtgaggaggatttggcttcgcacaaccgggtggaagattttattttcgtgcccgcaatcatggagttggaaaaggagataaaatgaaaccgcaggaaacaatatacattgctgtggcagatacgtcgatgattattcgcagcggactcgtgtctgtgttgaggcgtctgcctgatttgccggtacaggtaatcgaggtttcttcagaagagggcctgaagcattgtatggaggcacatactccacaaattttgattataaaccctcaatttggaggatggttcgatgtggctgctttcaagcaggaatatccggaagctgccatgaaattcgtgtcgctgatttacacgatggtggatgccaaccagttgaaaggctacgatgattcggtcaatttatttgacgacgtggattctttgtcgcataaggtgtcgatgctgatgaacgtgccggatgaggaagaaagcgaccaggactcattgagccagcgggaaaaagaaatcgtaggttgtgtggtgcgaggaatgaccaataaggaaattgccgaaaaactctatatttccgtgcatacggtcattacgcatcgccggaacattacgcgaaaattacagattcactcggccgccggactgaccatttatgccatcgtaaataagttggtagagttgagtgaagtgaaaatgaatctttagaaaggtcgttatttggattaattctaaaatacctacatttaggtattgcgggtacagcctttaacacctatctttgcagtgttagtcatatagaaattacgtaaaccacaaaagtaaaagaagttagttattagttgggtgcgccctgcgaagtgattcgcggggcgcacgcattttttacattttgttatggtggtttaaatcgttttcaaaatctgaaataaagttttcatttcccgagaaaaccttttacttttgctcgaaagaagacgaataacagattttaagtatatgaaagtaggattatttattccctgttatatcaatgccgtttatccgcaggtgggagtggcttcttttaagttgctgaaaagcctgggggtggatgtagattatccgctggaccagacttgctgcggacaaccgatggcaaatgcaggatttgaagaagagtcagtagagttggccaaacgttttgaccgtctttttgaacagtatgattacattgtaggcccgtcggccagctgtgtggtatttgtgcgtgatcattatggacagttattagccaaggaacctcatcgttgtgccagcgagggcaaaatttatgatatctgcgaatttattcatgacgtggtgaaacccacttccttgcaggcttctttccctcacaaggtcagtatccagaacagttgtcatggagtgcgcctgatgcacctttcttcaccgagcgaattgaatatcccgtattataataagcttcgtgatttgctttccttggtgaaagacattgaagtggtagaaccggaaagaccggatgagtgttgtggatttggaggtatgtttgcggtagaagaacacgccgtatccggacagatgggacgtgacaaggtaaaacgtcatatagatacgggggcagaatatatcgtaggtgccgatggctcctgtctgatgcatcagaacgggataattgccagagagaagttgcctatcaaaaccattcatattgtagaagttttagctgcaggactatgagtacgaaacattcaaaaaccgccgagaagtttcaggaaaataaggaactggcgggatggcatgaccagaccttgtggatgatgcgtgccaaacgagataagattagccgggaggtaccggaatgggaacagttgcgcgacatggcttctgccatcaagatgtacagcaacagtcacctggatttgcttttgcaggagtttgaaaagaacgcacaggcaaacggagcccatgtgtattgggcgaaagatgccgatgagtattgttctataatctataatattctgcacggacacaatgtgcatcgctttatcaagagtaaatcgatgctggccgaagaatgtggactgaatgaattcctgattcagaaaggaattgatgtggtggaaagtgatttgggagaaagaatccttcagctgatgcataagaaacccagtcacatcgtggtgccggccatccatatcaagaaggaggaaatcggtgaactgtttgtgaaagagatgggcacggagccgggcaacaatgaccagacttatttgacgcatgcggcacgtaagaatctgcgtcataagtttattgaagcagaagcagccatgactggtgctaattttgccgtggcttctacgggtgagtttgtggtgtgtaccaatgaaggtaatgcggatatgggtacttcgcaacctaaattacagattgcagctttcgggctggagaagattgtgccagaccgtgaggcactgggcgtatttacccgcttgctggcacgttctggtaccggacaacctatcacgacctatacctcgcattatcgtaaaccccgcaaaggaggtgaactgcacatcattatcgtagataacgggcgtagtaatattctggctgatcaggagcatgtaaagacattgaactgcttgcgatgcggagcttgcatgaatacatgtccggtgtaccgtcgttccggcggatattcttatacctattttattccgggcccgattggcattaatctgggaatgctgaaagcacctttacactattatgataatgtatcggcctgttctttgtgttattcttgccagaatgtgtgtccggcgaaagtagatttggcagaccagatttatcgttggagacaaaaactggatggcttgggagtagccagctcgtccaagcgtctcatgtcgggcggtatgaaggtgctgatggaacatccgtctttatttaatttggctctggcacgggcttcgtgggtgaattctttccctcgttcactggtgtacaatggattgaatgactggggaaaagaacatgaaatgccacagtttgctaaggaaagttttaatgaaatgtggaaaaagggtaaagtaaaatagggaagctatgagtagtagagaagatatattgcagaacatacgtcgtaatacgcgagtacgttatgaaaagccggacttgtctgcattggaacaaggagcaattacgtacgctgatcaggtagcacaattctgtaaggttgtggcagaagtcggcggacgtgtggtgacggtcaatgagggagaagatgtcaatgcgctggtccgtaaattgtatccggatgccaaacgtattgcttccaatctgaagaatataacctgtgccacttttcatcctgacgatgtggaggcttctgctgatttggatggcacagacctggctgtggtagacggacgcatcggtgtgtgtgaaaacggagctgtctgggtacagcaggatgtggaacagcgtgcggtgtactttatttctgaggccttgatacttctgctcgaccggaaaaatctggtaaacaacatgcacgaggcgtatcagaaaatagatacaggagagtatggttacggtgtattcatctctggtccatcaaaaacggcggatattgagcaggcgctggtgatgggagcacacggagcgcgtgaactgaccgttttattactgtaataaggtaacagatagaaaaaaggagtcccggtatctttgaacttggataccgggactcctttttgtgttgattccccaatgacagggtttatcggtgctgcatggcctgttgattgaaaggttttgcagtttccgtaatattgtggttgttgttcaactctaagaactgtgtacctgtccaccacaatatgttcatgacaattactgccagtatgacagtgaaggccgtaatcctggcttccagttgtttgctggaaattcttttaaaattttcttttcccatctcggttttattcactaaccttcttttctccatatagtaattatagtcttattatttcctgttgtctgactaataaatgacacatatatgtaaatactgcatgagggtgataaattttttcagaaaaagttgcagttttttattttaagttggagtcggtcagtacttcctaaaaagtatcgtagtactgccgcggaagtactccagtacttgcttggaagtactacagtacttcttaaggagtactgagattgagtaatttgttgtaaactaattacttagtttatgtaaaccgtcctgaagtacttttcaaacaattctttcgcttcatctaattgcgcttgcgtgttgagttgtacatctttcagctggtagtccattttcatggcttcatatttatgtacacctagagtgtgatagggaagtatctcaacccgttcaatcatgcgatagtctttgaaatgctcgccgagtgcttctatgtcttctttaaagtagctgtacttttgtaccagtacataacgcagccagaacggtttctggttttcttcaagccaggctgcagttttcagggtttgtgcattacttctggaggtgagtgctttatgacgttcgtcattgaactcttttacgtcaagtagtacgaggtctgccagcgaaagcaactcctttacatcttcgttccagattccgccatttgtatctatgcagatatgaatgcccgcttctttcagcatgcggaataaaggaaccaaggcttttgcctgaaaggtcggttctcctccactgaaagtaatgcctcctttcttcccgaaaaaaggtttttggcttacagccatcttgagaatctcttcaggagcagtttctttactttcacctttggcatcaatagtatcgggattggcacaataaaggcatcggaaattacagccttgcaagaaaacaacgagacgtattcctggaccgtcgtatgtgcctaatgattcgtatgaatgtactctaatcatgataggataaaaaataatagacacaaactaccggactgaaaatccgggtagcttgtgtccagttaaaattatatactctttatgcaagaattacatgcgttcgtggaagctgcgtgaaattacttccagctgatgctcacggctcagtttgatgaagttcaccgcataaccagatacacgaattgtcagctgaggatatttttccggatgctccatggcatcttctagcatttcccggttcaatacgtttacgttcaggtgatgcgcacctttcacgaagtaaccgtccatcatcgttactaggttctcgatacggttttccatatctactcccaaagatttcggtacgatagagaaggtattactgataccgtcctgtgagtcacggtagcgcaatttagctacagaactcagagaagcaatggcaccgttcttgtcgcgcccgtgcatcgggttagctccaggagcaaatgctacacctttggcacggccgtctggagtggcacctgttttcttaccatacatcacatttgaagtaatggtcaggatagacaaggtcggtttggcattcttgtaaaccggcaatttcttcaattcttcgtcgaagtagtaaatcaagtctactgccaggtggtctacgcggtcatcgtcatttccgaagcaggggaattcaccttcgatgtcgaatccttctgtcagtccgatgtcgttacggcgagctgttacctttgcatacttgatggcagacaatgagtcaacagcgatagacatacctgccacaccgtaagccaggttgataaccgggtcagtatctacgaaagccatctgagccttttcgtaataatacttgtcgtgcatgtagtggatgatgttcatggcttcgttgtacacgcgtgccatttctttcagcactttcttatagttggcaagcacttcttcaaagttcaatacatcaccgctcaatgccggaatgtcctttaccatcagtgtgccggtgttttcacagcgtccgccgttgatagccagcagcaatgccttagccaggttacagcgtgcaccgaagaactggatgtgacggccgatgtcctgataagatacacagcaagcgataccgtagtcgtcagagttacgtacttcacgcatcaggtcgtcgttctcgtactggatagaagatgtatcgatagaaacctgtgcacagaagttcttgaaaccttccggcagttccggactccacagcacggtcaagttcggttctggtgaaggaccgaggttgtacaatgtctgcaagaaacggaatgaagtcttggttacttttgtacgtccgtcgttgaagcgtccgccgatagactcagtcacccatgtcgggtcgccggcaaagatgtcggtataagcctgcatacgcaagtggcgtaccatacgcagtttgataacaaactggtcaatcaactcctgtgcatgtgcttcgtcaagcaggccatgagccatatcatattcaatatagatatccaggaaagacgatacgttacccaatgacatggcagcaccatcctgttcttttacggcagccaggtaagccatgtatacccactgaacagcttcctgtgcattgtgagccggacgtcccagttcaagaccgtattgttctcccatgatcttgatttccttcagggccttgatctgctctgccacttcttcacgaagacggatgcgggcatcagtcatcggaccagtcaggtgacgcaaatcattttgtttagcttcaatcagtctgtccagaccatacaatgccagacgacggtaatcaccgatgattcgtccgcgtgcatagttgtcaggaagtcctgtcaagaaaccaagtgagcggaaagaacggatttcttctgtgtatgcatcgaagaccccgtcgttatgagttttgcgataatgagtgaaaatatctttaaccttcgggtcaacttctactccgttttcacggcaagctttttctactaccttgatacctccaaaaggtttgattgcgcggcgcaacacttcgtcagtctgcaagccgacaatgacttcattttccttatcaatatatcccggtgcgaaagaagtgatggttgatactgtggacggatcgagcgagcgtacaccattgtttgcacgttcttcagccaaagcttccaaacatttgttccaaacagcttttgtacgttcagttggaccgaccaggaatgaagcgtcgccctcgtaaggcgtaatgtttgtctttacgaaatcggtgacgttgatttcatggttccaacggccttctttaaaattcattgccataaatttgaaatattaaaaagttatgtaaatgtggttctctaaaccgagtgcaaaggtagtgaaaaaccttgtgttgtacaatacctattttgtggtatattattattttgcattaattacaaagtagtataggttatagaaacgggttaagggagaggtgtgtttgcgaaaaaatctttgcaaaagtttgcacaactcaaaaagtcgctctatatttgcaccgcatttgagagaagatgcgttcccaaagaagattggaagtttgggtgagtggctgaaaccagcagtttgctaaactgccgtacgggtaaccgtaccgggggttcgaatcccccagcttccgcttctgtaattaggaaagagaatggcgctttcgtctagtggcctaggacgcggccctctcacggctgaaacacgggttcgattcccgtatgcgctacatcagctactggaagtttgggtgagtggctgaaaccagcagtttgctaaactgccgtacgggtaaccgtaccgggggttcgaatcccccagcttccgctttctgatagaactccgccaattggcggagttttttttgtgcccttttgtatattatttttggttctgttttgttgtagcgtcgcacttttttagaaaaagaatctttgttcaaaaaaacttggatgtaacggatgttgtcatacctttaaactgtaacttcttttattttattgttagaatgtgtatgtctatgtgaagcctttctgattccttgtttgttttttaactcatataatattaataatatttaattttattcatttttctatatataaagagtggattatttaaaatatatctatatttgtactatgaataattttataaatgtaaacattaatgtaatatctatgaaaattagccatggatatttttaaaatatttaattgatatcttgttgacttctcgtcttttttgaataataaattctaattctaagttatatcattaatctaattaatttatgagaattggtaggttttcacaaatgtttttattgttggttgtttccggatggggaactgtatgggctgctcctgaaaagtcagtggatgcatctatactacaacagtctgctaaaattaccactcaaggtacagttgttgacgctcaaggtgagcctttgataggtgtaagtattcttgaagttggtactacaaatggtacgattacggatattgatggtaagtttactttacaagtaacttctggagctacacttgaattgtcttatataggttataagacacaacagttaaaagctgtatcagatcttggaactattcaaatgtctgatgatactgaggtccttcaggaagtagtggtgactgctttgggtatcaagcgtgaaaagaaagctttgggttatgccattcaggaagtcaaaggagaatctttggttgaagcccgtgaaacaaacctcgctaatgctttgtctggtaagatttcgggtgtacaggttattcgttctagtaatggacctggtggatcttcaaaaattcagttgcgtggtgcaaactctgtgacaggtacaaatcagccgttgattgtggttgatggtgttcctatggataactttaccggtgcagataatgcggacttttataatccgtctttggatatgggtaatggtctttcagatattaatccggaagatattgaatcaatgtccgttttgaaaggtgcttctgctgccgcactttatggatctcgtgcaggtaatggtgttattttgattacaacaaaaaaaggtactaaacgtgaaggtttaggtattaccatttctggatcagtttctgcagaaacgattttcatgaatcctaagatgcagaaatcatttggtcaaggtgataatggtgcatataatacagaaacatccaatagctggggacctgctatgggaagtgaatataccttcaacggacaaaaacgcgtgatgcagtattatgataacgtagacgcatttttcaagactggtcttaatttgacggaaagtatctctttctctcagcagtatgataagacatctatctatgcgtctttgaaccgaatggatgattcaagcaagattcctggagctacattggatcgtacaaacttgactttgcgtgctttttatacatttggtaaggatgatcgctggagtttggatgcaaaggtacagtatatcaatacgaatgcagataaccgaccaatgacaggttcaaacgatcagaatatgttccgcactatttaccagttgccttcttcaatggatattcgtgattatagcaatcctttgactgatgaaggtaaaattaattggtataataatagtggaatgaacccttattgggctgaactgtataatacgaaccatgatactcgtaaccgttttttgatgaatgcttctttgaagtataaatttacagattggttgaatgcggaaatcaaagcgggtagcgatatgtataatacagaaagcaataacaaactatatgctggaagtaatcgtaataatggtaacagccaatatagcttggaagaaaagaagttttatgaaaataacttcagctttttgattagcgctcagaaagaccatttgattgataagtttggtggtacaatgacttttggtggaaacttgatggaaagaaaaaccaccggcttaaaaggtgatgcaaccaaacttacagttccaaacttgtttaacttgttgaatagtagtaagaatgaccgtaactttaaggaaacttacaatcacaagaaaattaattcattgtatggtacattgggtattaactatgatggatgggtattcttggatgcaactttccgtaatgactggtcttcagctttgagtaaggaaaatcgttctttcttctatccatcaatttcagcttcttggattatcagtgatatggttggaaaaatggataagatgatgccgtcatggtttacttatgctaaagtacgtgcttcttttgctcaagtaggtaatgatatggatgcgtatcagttgtataattattatgaaatatcttccgaccctaatggtaatacaacaggtaagcctcttgaaacttattatgattcaacagtgcaaagtgagttgatttcttcatgggaagccggcttggaattgaaattcttcaacaatcgtttaggatttgatgtggcatggtataaatcaaatgcaaagcgtcagttgatgaatattccgatggataatatgtctggatacaaatctcgtaagattaatgcaggtaatattcagaatacaggtattgagttgatgattaatgcacgtcctattgaaacaaatgattttagctgggatactcagttcaacttctctaagaataataacaaggttattgaattagctcctggagttgataaatatgaattaggtggtgccgctgaattaaaagtttacgctgtgcagggtggtaactatggtgagatttggggtaccaagtttatgcgtgtaacggatgaaaatagtccgtattatggtaagttattattaaataaagctggtttgcctcagtctacaggggtttctgagaagattggtgatcagcaggccgactgtatgttaggttggaataacagctttagatataagaactttgctttgagcttccagattgacggacgtttaggcggtgatatttattcttatactaattatgcattacagattgccggccgtgcagaatgtacagcaccgggtggaatgcgtgagaattttgtagtggatggtgtaattgcccagcaagatggaacatacgctcctagtacaataaaggtttctcagcaggattattggcaggctataggtacaggtaatactggtattggagaagcaaatatttatgatgcaaccaatattcgtttgcgtaatattgcgttgaactattcatttccatcatctatgttaaagaagactattttccagcagttgaaattaggtttctctgtgaataacgtatggatgatttacagtgatatgaatggcatagatcctgaagctgtatttatcacaaatactaatgctacaggttttgagaactgtgcatctcctacatcacgttcttatttatttaacgttactcttggtttctaatcaaaaaaagaattttaaatgaaagcgattgataaattatttttagggttaagcctattcagtttaggattaacttcttgctctgattttgatgaggtgaatacagacccttctaagacacaattaggatctgttaaatcctactttgccttgaatcagtcttttagcaagattcagatggaccctagtacaggtgaacgtgtatacgtttataactggggagaaggtgctcgttttcttacagagaagaaacatctgtctattggtaattatgatgatgattatatcagctctttttactatccagcaattgcattttctataaataatgcgacactggctgttcaaatagctgaaactcatccggatgaggtggccgatcagaaattttatccgaatatgaagcagtttgctcgcatttggcgtgcatatttgttagcacagtttgctgatagttttggtccttgtgctttacctcaagatttgacggggggattgaatcctgtatatagcagcgagaaggatacatacaattatatattggatgaattagctgatgcggtaaaagcgatagatgtatctgttgaaccaacagaagatcaggcaaaatgtgacccttattttgggtacgatgccacaaaatgggtgaaatatgccaattcattgcgaatgcgtttgtctatgcgtttgagcaatctgaaagatagggatcctgaaatgtatgctaaagctgtagctcagtttaaggatgcagctgctgatttgagtaagacaatcagtgaagatgcggatattatggaaattgtgcagaataatggatgggatgattattctggtccgtatacccgctcttataatcagcattgtttgtctggtactttggctaatttgatgactaacttaggaggaatttctattcaagaacaacgccctgatattgcagcaagttacataaaagatgctgattatttaggaaagcgttttgagaagcattttgtattgaatactgataatccgactaaaggatattggatggacggacttcctgaaaacttggatcctcgtgcattgaaattatattatttaccttatgattcaaatgcagataatacgattgatataggttctgaagtgaaaaaatataaaggtacttttgggcttatttcttttgaagacgagacagataccataaagatagatggtacgtattcttggaatggtatacctgctggtacaacaactagtttttcgccttctatgtctaagaacgagttgcctaatagtagtagtgcacgtttgaataattatcctatattgggttctcaggctagagatgcaaaggaaaagatggtttacttcggtccatgggaaacttatttccttgttgctgaggccttggaacgtcagtgggttacaccgggtgaagttggtggtcttactgcagaaaatgcttataataaagctgttaaattgagctttattcattttggcgtttctcagtattacgatgattatattagttcgagagagtataatcgcgtaggtacttctgtggcatataatcatacagatcctgcttcttctgtgacaatgaagtatgttgatggttatacagatcaggaaggaactgttcaatatcagtatccagatggaactcgtacattgtatggtaatcagttgaatgatcatttatcaaaaatatttactcaaaaatacattgctcaattgccatatttggtgcaagagtgttggtctgattatcgtcgtgtaggcttgccattctttgacattatagcaaatgaaaaaatgatgacaggcactgatatgactgagtgggatccggaatcatggaaatctggacagaaatggcagtattatccgcagcgtatgagatacccgactacgcttgataatgcaaatccaacggaatataagcacgcattggaattattaggtggtgctaatactacgatggttccattgtggtggtcattggcgtatagtcagaaataatatttaaaagaatagcctgacaacctgtttgcagatataatctgcgtaagaaatggttgttaggctatttttttgtgtatacaaatctattttttatataaataaagaatgcagtaattggttgttatgaagaaacgattatttgtagcattgttatctttgagcattgtcacttctactatcggacaagtgtcggaaaaatcaccacaagacgttcagaaagaaaaaaggatggagtggttctcaaatgccaagttgggtatttttattcattggggcatttattcggtgaagggggtttccgaaagctggtctttcttcaataaatacctgccgtatgaggaatacatgagccagaaggatggatttactgcttcgaagtatgatcctaaggcttgggtggacttgataaaagagagtggagcccgttatacggtgattacgacgaaacaccatgatggaatggctttatgggatacaaaggcgggtgagctgagtacggtaaaatgtacgccggctaaaagggatttgatcagtccttttgtaaaagaagtccgcaagcagggactgaagttgggattctattattccttactggactggtcgcatcctgattatccgaacatgacacgtacggaagtgcgttatacgaatgactccgtgcgctggaaacgtttcgtgaattttaatatggcacaattggcggagttgaacaagacttggaagccggacttgtattggtttgatggtgactgggagcagactgcggaggcatggaactctaaaggaattgtggatttgttgcgctcggacaataagaatgtaattatcaactcgcgtatccagggatatggagattatgctacgccggagcagggagttcctattgtacgtccggaagataaatattgggagttgtgtatgacgatgaatgattcgtggggctatcagcatacggataccaactataagtctccttatatcttattgcggacttttgtggattgcctgagtatgggaggaaatctgttgctggacatcggtccgaaagaggacggtacgattccggaagagcaggtagctatcttgaaagagttcggacgttggacgaaaaagcataaggaggcgatttatgatacgcgtgccggtatcccgacagaacacttccagggatatacaacactgaataaagggggagatattttgtatctttatttaccttataagcctaatggccccattgaagtgaaagggctgatgaataaagtcaaccgggtatgggtggtaggcaatggttctatgttgtcttataaggtgtataataagaactattggagtgaagtgcctggtaatctttatattgatgtgcccaatcatgtgcttgattcacaaattacggtaattgccgtattgctggacggaccggtcaaattgtatcggggagcgggacaggttattgaaagtaattaatgaaaaaaatcgattatgagaaaacaattgataggtagtttgtttgcatttgcaatggcaggacagctctgggggcaggggttatatgaaaagtatgaacgtatgctgacgcttcccgaaggctatgtgtgctatcgtgtggatggaaaaattaaagtagatggaaaactgaatgaggcagactggcaaaaggcgcagtccacttcttcttttgtagatataagtggggaaggatttgccaaaccttgttatgatacttctgccaaaatgttgtgggatgataattatctctatgtaggagccgtgttgctggaggatgatatcaaggcaaaactcagtcagcgggatacaattatctattatgacaatgactttgaggtttttctggatccggatggggacgggcagaattactttgaaatagaaaccaatgcgaagggagttatttttgacttgatgctggacaaaccttaccgttcgggaggtaattttatgattcagtgggattgtccgggacttcagctggctattcatcgtgaaggaaccttgaacaagtcgaaagataaggacaaacagtggagcgtggaaatggctattcctcataaagcgttgacagtgaatttctccaacccggatcaggctggaaactgctggcgtatcaacttctcacgtgtgcagtggttgaagcctggacagcgtgaagaaaactgggtatggatgcctactggacgcatcgatatgcacatgcccgacagatggggattcttgtatctttccgataaggtgataggaacgggtactgattccttcaagtatccttacaatatggctgcctataagttgctttgggccatgttctatgcacaattggataattatgccaaggagaaaaactacattcgttccaaagaaaatttcttcctgaccgaggcagaattgaaggatttgcctgctggtgctgaaatcttggtagaggctacacaacgtacattctgtatgtcggtgagcgtgcctgaagaaaaagtgcgttatgtggtagaccataacggtaggtttactcgtgaagctattactccccgtcaggtaaagaactgggtatggatgcgcattaacaaggaaaagggagatgcgtactataagaaatactttgctctgatgaaacaatgtggcatcagtggagtcatgtttgaaggctatgatgaggctacttaccggatgtgtaaggaagcgggtctggaggcacattattggaagtggaccatgaaccgcagagaagtgcgtgagacacatcccgactggtttgcagtgaaccgtaaaggggagtcatgctatgataagcctgcttatgtagattattaccgcttcttgtgtccgaaccatgaaggtgtggctgaatatttggctgctgattacctgaaagaagtgaatctgccttatgtggatggagtacatctggattatgtgcgtttcccggatgtagtattaccggtgagcttatggaagaattacggaattgagcagacttctgaattgccggaatatgattattgttattgtgaggtatgccggaagatgtttaaggaacagaccggtaaagacccgctggaattgaagtatccgatggaagaccagtcatggataaatttccgtctggatgccattacacgtgtggtcaataagattacgcagaccatcaaggcagatggcaaacgtatctctgctgcggtattcccgggaccttctatggctcgcaagatggtgcgtcaggattggggacagtggtcgctcgatgcatacttcccgatgatttacaatggtttttattatgaaggaccggagtggattggacgttcggtgaaggaaagtgtacagacgattaatggccgggctaaaatttatgccggattgatgttccctgatattaagaatacctttgagcaggcattggatgaagctttcaacaatggagcttcaggggtttccttctttgacgggccggacgaagagtatctgcataagtttaaggcttatttggataaaagaggttttgaggttgcaaaataataaaatgagtatatgaagatagttagtatgtttgtttccttattcgtggcgttgaacgtatgtgcggcaggacataaggaacttcctgcaaaaggagatttgaatttgacggtatttgacaaggagaatattcattttgtaccagatacgtatgcagggtattctgcagcgggtgcggatggagtcattcatctggtgaacggtcgtattattttaaagaagattcagattcccgattaccagcgggatgtgacggtcagcttgaaggtgaccgtagcctctaatggtgaccgctgggataaatccggttcttgttttgtgcttcccaagaattcggctgtgaatctgctgagtattgcacagggaaagaaacagtttccggcaattgacagcttgaaactggaaaatatgattggaattgtaccgggaaaggactatttgcctacaatagagctgatgcgtttcatgacgcctttcggggtagggcatttcagcgcagaagatgattctttgtccagcaagcgtcgtccggtttatattcctaagtgggagaaatgtgtgcaatgggagcaggacattacggatttatattcggcccttaaaggtgaagtgtatgttggtatctttattgacacgtggacaaaagaagggtatgtggccagtatggagctgaaaatcaaggaaactccggtaacatgtgaaaagcttgtccgccgtcatgtggaaccgctgatgaacacggtatattatatcggtcagtcttatccggacatttttgctcgtaaatctgtttctactgattttgtgcttccgaagaatgcgaaaaatgtgcgtttgaaatacattgtaaccggtcatggaggccattccggtggtgatgaatttgtgcagaagcgcaatattctttccgtggatggtaaagagatttatagttttgttccttggagagatgactgtgcttctttccgtcgtttcaatccggcgactggtgtttggcttatcaaacgcctggcggcctatattagtgaagatggttataagaccaaggaggtagaggaaccattggcatcttctgatttatcgcgttctaactggtgtcccggatcggatgttttgccagaggtagttgaacttccaggcttgcaagcaggaaagcatacattcactgtcagcatacctgaagcccagcctgtaaataaggatgagttgaaccattggctggtgtctgcttatctggtatgggaagaataagaatgtgtttgaatcatagatgattgaataaaaaagttcgccagattcttttacggagtctggcgaacttttttattgaaccattatttggagtgtgaagaaatgaatggcggaatcagctggatacgttttccaaagagtggtgtttttacaggcgggagtgccttgaagtgtggggaagctgcactacggctgcctacaccgttggtttcgtatgaacgtccggcttccataagtgcctgtttcaagagaggctcgttgacgtctcctatttgataagcctgtatcgggtcatcctcaatttggatatccgggatgagtccatcaggcatacagggagtttttccatcggcattctggtaaatgctgaccattacatagattccccagttcttcagttcttgtgggcatttctcgtacatctcttctgcgctgagcatccacccggtgcagtacttgccgtgtgtctgtgtgccgatgagtcgaacgtttgtataaggcattaatccgccaagcagtgcttcggatgcggatgctgatccggaaccgattaatccgtagatttttttcaattcgatgttagcatcttttgtgcttgcattgacttccacttccgggtaattgaattctgtggtgaagcgggtttccagactttctccttgtttctggtagctttcgctcaaatagctgttgtagatttctttttcgaatactttcttgctgctgacagcttcttgtggagcaaacatggaggctaacacgttttcagtgataacataacctcctccgttgtaccggaggtctaaaaccagttcttcaataccttcagctttaaactttttcccgatttcaatcagtggattgatggatttcaggtcaaagccggtataggccagatagcccactttctttccgttgaattcatatacggagtcgcaaatgataggattttcgtacatgttgacagctgtcagctctattgatttgttccggctgacaatgatatcttcttgcagttctccgagggaaacttttaaggtaggtttgtagtataaatcctcatagttgtcgggggtgattttttcatcatttatagaaaggataatatctcctcgtttaaattccgcttttgcagcaggagtcccttcatggacaaagtttacgactgctacatattgattcttttctttgtttaccggatagaaagtcagattccagccaaatgtagtagaaaccccttccacactgctgttaaaggaagccatgtcgtcggtgagcatggaccatttgtcaatgtatttatctccttggtggtaccttattcggtcaacggtgccgattgggtcattgttagtctcgatgttccagttgtccaggtcactactgatttccttattccagtaatagtaggtactcatagcctccttgccgaacatgttggcataatagagttctgtgggggtcttcgatgtgggattctgatcaccttctccgtttgtcggttttggattttcttccgaacatccagtcagtacggctcctcccaatagagtggaaagcagtagccatgatagtttttggttcatagtttaatttttgagaattagtacaaggttttacttgacaaaagtaacaaaaactatctgttttctttctaataagaaggagaaagtaaagattttttaagcttaacttctggcttctcatgtgttgggcagatgagaagccagaagaggggggtaattagaatttatagttcagacttaatccgaatactttgttcgtacggttgtaaatgtcggtccctttcaggcctgtaccgttgtagctgtctgtttctttggtgtatttgttgtaatgtgtccagaaataggccacatcaatgctccatgcttgtgtaaggttgactctggcaccaaatcccaatgagtaagagtcgcatgagaaactggtatcagtctggaaatcattgctcagaccatagttggttttttggaaaccactactgacagtcagtcgtttggtaatgtcccattccataccggcaaggtattcgtgagtaccgtgcttgagggttttctgttttgccacactggttccatctggaagagttacatttgccatgcctgcatgcttgtcatcgaaaaagtgatattcaacggaggcacgtagggtgggaagaatttcataaccgatggcagcagagaacatagatggaatgtcgctcggcgtattgactccatcttcatagtctgccaaatattttcggtctacattaatcaagtccatcttttcggttatattttccaggttcaggttggctttaaattcatactttaatcctatattaagtttgttgaatttaaggtctgctccaatgatcggagtaattccccatccggtttgtttgcagtccaaatcgatactggccagtgtctttccatcaggaagccccatcatctgtcctatttgtgtataatcgtttttgagttctgttttcaggtagccctcatatccacctgtaaaatagttcattcggccgccggcaaatacactcagccagtcgttgattttgtagctcaatcctaattgtactccgtaaatgtattgctttccatccatagaagtattaatgtcatacatctggggagttacttgcccgtcagtttgcttggtaatcattcccatagctaatgcatcgaacattggaagaccgttgctgaatgaggcttttcctccaccacccgtaatggcaaagctggcagagattacccaattattctttttatataatccttgaaagctcggaatgaagggagcagaggccgttcctttgtacaatcggctgccatttgttccgtcagcttgtttaaagagtgggaaattagcgtcaatttcgcgggtctgataagcactttgtccggtcagtgacaggtagaatccctcgtgcgaaaggaaagaaagtcctgcagggttactatacacaccgtctatatcaatagaagctcctcgggctatcattcgaaggaaagcggcgttttgattggtgttggtcagataatctcccgcgaaagttgggaaagagatacacagtgtcgctgcactgatgaaaagaaattttttcattcgtttttaggttgtttgttaaaaatcggctgcaaaaatagtgctaaattgcacacaaaccaacgaaatgagtaaaaattattttatttgaaattgttttatttgaaactaaacctgttggcggaattaatttagtgcatacttaat

SEQ ID NO: 3780 - DNA, 133988 bp, Unknown
  gut microbiota DNA sequence
aaactgatgaaaaataggccgtaaaccacattaaaaaagcggctgctttcacgaggaaaacagccgctttcaaacattatatcagatctctattttattctgcttcaccaacctgtttcggcatcttatgacccattgtcaggtaagctaccggagcagctacgaacaatgaagataacgtaccgattactacacccagaatcatagcgaatgcgaagctgcggatgctgtcaccaccaaggatgaagatactcagcaacacaatcaatgtactcaaagaagtgttgatggtacgggccagagtcgtgttcaacgaatcattgaacagctgcgtacggtcgcgtttcggatacaaaccgacgaactcacgtacacggtcgaagattaccaccttatcgttgatagagtaaccgattgcagtcaagatagcaccaatgaatgtctggtcaatttccaaagagaacggcatccatccatagcacaaagagtatgcaccgataatcaatacggtatccaccatcaatgctactgtagcaccaatactaaaggcgatgttgttgaaacgaatcaaaatatacagaccgatagcaatcaaagccaatacaactgaccatacagctgaagtcttaatatcgtcggcgatgctaggacctaccttctgagaactgatgatagaacctccggcacgattatcacggtcgataaagatttccagtgtagtaccttcacccaacaaattaccttccttcaatgcattgtaaaggaactcttcaatttctgcatcgattgtaggagaatcttcgttgatacggtagttggtagtcacacggattgtcttaccgtctgtacccaaagcaatagcctgcacgtttgcatcacccactttcggctgcagcaagctacgtacagtttccggctgtacaacctgttcaaactgaaccacgaagttacgtccaccggtgaagtcgatactctgtgcaagaccacgtacaaagaatgaaatgatacatactacgatgacaactccccagatagtaaacgaacgtttcgtaatacccatgaagttatagtgtacattctgcatcaggttctttgaaatacctgtagtgaatgtcaggttcaaccacttgtctttgttcatgaagtgttcgtaaaccagacgagtcaagaacacagctgagaagaatgagcagaggataccgataatcaaggtagtggcaaaaccacggatcggaccagtaccgaagttaaacaggatgatacctgtaatgatagaagtcaagttcgagtcgaagatagcagagaatgcattcttgtaaccttcggccagggcctgcttggttccctttcctgcacgaagctcttctttcgtacgttcgtaaatcaatacgttcgcatccacggccatacccagtgacaataccataccggcgataccagacatggtcaatgcagcctggaatgaagaaaggatacccagtgtgaagaagaagttgatgaacaacgcaccgttagccaccatacccggaatgaatccgtacatcgcacacatataaatcatcaggacaatcaaagccacgatgaaagatacgataccctggttgatagattcctgtcccagagacggacctacgatgtcttcctgtacgatacgtgcaggagccggcatcttaccagacttcaatacgtttgccaagtcttttgtaacttccggagtaaagttaccggtaatctgtgagttaccaccagtaatttcagagtttacacgcggagcactgtacacatatccatccaatacgatagcgatttccttaccgatgttcttcttggtcaaggcagcccaacgacgagaaccttctgtattcatggacatgcttacgcaaggcttattgaactggtcgtattcatcttttgcatcagttactacatcaccttccagcggtgcacgaccgttacgttctgtcgacttgatagcatacaattcgaagatacgtcctgtcttgtccatatccgaagctttcacaccccacatcagtttcaagtcgcgcggcattacttccttcacagctttcatgttcaagatacggtttacatcagcagtatccttatagtcggcataaccaacgatacagcctacaccgctctgattcaactgcagtacagccagcaacggatgttctttcttcagttcttcaatatttgtattggaagcagtagcagtttcgcccttcaatgcagcagccagactgtcttttgcagatacagcagaagcctcagctacagcagttgtatcagcttctaccattgcagaatcagcaggagcatctgcattcagcaggccacgagcacggttgtcggcagaagccagtaccggaacgatgtcctttgcttcgaatgtttcccagaattccaggttagcagaaccctgcaaaagttttctcacacgttcgggttccttgatacccggcaattctaccatgatacggcccatcttaccttccagtgtctggatgttcggctgagctacaccaaaacggtcaatacgtgtacgcaaaacattgaatgagttatcaacagcagcacttacctcttcacgtaatactttttctacttcagcgtcagtactacgggtatttactttatccttcaactgctgagttgcaaagagttcggcaagcttgccctccggtgccagtttcttgtattctctgataaacagcgtaataaagtcttcctggctgttaatttgcaattttgcagcttccgctacagctttattgaaagcttcatccggtttgttgtcggccaacgccttcactacatctggtacagaaacttccagaatgacgttcataccacctttcaggtccaaacccaacccgatttccatctcacggcattgtttcagcgtataaatccccaaccacaccttctgattctgcatggaatccaggtaatgtgccgaacctttcgggtcctcagccgccttgttcatctgataacgtgtaacgaatgagaacgaaaggtaaaaagcacacgcaagggtcagtaataccgcaaaaacctttacaaatcctttgttttgcatgttactttagtttattatatttacttttaaaatttgatacgtttattcaaggttgcaaatatagtttttttttcatttatatgcggaaaggattgtaaatatttaaggcttagagcctaaaaaagggagtacagcttgcaaaaatgaagctatactccctcttttagttatactctgtacagattttctctgctatccggacattttatttcaatccgcgagtcttcagcaacgcatccagactgggttctgccccacggaaggttacatacagtttcatcgggtcgtctgaaccacctttttccagaatgttcttgcggaaagaggtagcagtagcctggtcgaacaagccatgttccttaaacgcttcaaaggcatctgtatccagacgttcagcccagatatagctataataaccagctgcataaccacccatgatgtggttgaagtaagtagaacgataacgaggcgcaacctgcgggatcagtcccaatttgtccatcagctgtttttcaaactgaagcacgtcgaatccttccatcgtagtcagacagtgcatttccatatccagaatggcagctgccaacagttctgtagtcataaagccctggttgaacaatgcctgattttcaatcttggcaatcagagaatcaggaatagcctcacgagtctggtaatgtttggcatacattttcagcacttcaggtgatacagcccagtgttccataatctgtgaaggaagttccacgaaatcctgagctacagaagtaccagacacacctttatacttgcactgagtcagcaatccgtgcaaagcatgtccgaactcatgatacatggtgcgtgcttcatcgattgtcagcaaggaaggaaggtcaccagccggtttggtaaagctggccacattataaatcaacggacgaaccccttcctgctgttcacggaagttactcatccaggcaccgctccgtttgctggcacgaggcatgtagtcgctatagaacacgcccaacaatgaatcgtctgcatccttcacaatataagtcttcacatccttattatatacagaaatagaatcacaaggagtcaaggtaatgccatacaacttgttgaccaccgtacacagtccattgtgcacatcttcctgactgaaataaggcttgatggcatcttcattcaaatcatatttctcctggcgaagcttttctgcataataccaccagtcccatgcttccagtttctcaccttttccttcacggtccatgattttctgtaactcagctgcttccgctttggcattcttgatagaatattcccacaagccatacagcaggtcaagtgcatttttcgggttcttcgccatgttgtcagccaactgatactctgcgaaattgttgaatcccatcagctgtgccttttccagacgaagagcaagcacctttttcagcacttccttgttgtcattggcattgccacggttacccaggctggtatatgcctgatagatattctttctcagttcacggttctgagcatactggagcaacggagtacggctggattcctgcaaagtaaatacccacttaccgtcttttccgtgtgccttggcttcctgtgcagctcctgcaataactgcatccggtagaccagccaaatcttctttcttatctaccaccagcagataatcgttgttgtcggccaacacatgattaccgaactcaatggtcagtgtagaaagctgcttgttgatttcacgcagacgttcctgcttttgtgcatccagtccggcaccagaacggataaattccttataatatttatccagcagataatgctgttcggtggtcagctgaatctttccagcctcttcctgagcatgaacagcagccactctcttatacagctcctgattcaggaaaatattatcactgtgttcagacagcatcggcgcaatctttgcttccagcgccatcatttcgtcattggtatctgcttctgtcaaagcaaagaacacaccgctcacacgagccagaatctccccgctattatccaatgccacaatcgtattctcaaaactcggttcctccgggttctctacaatggctttgatttccccattctgctgctcaatgcctttcaagaaagccggttcataatgttccaccttgatacggtcaaagtccggtgttccataaggggtctcaaactctgacaggaacggattgcccgtatctgccgcctgctgaccgcaggcacataccatacaactcatagctgctgcaaaaattaaattcttcatcttctatttattatcaggttataacttctctaccaaacaccacaacggataatggtcggatgctgaaatggaattgtccacacggcatttcaatactttaaatcctttgttcacaaacaaatggtcaatgcggaaatacagaaaattccggttatacgagaatcccggtccccagccggcttcacgataagcatctgtcaatccttttccgatggtgtgatgcgcatacgaaataggagaatcattgaaatcaccgcataccagcagatacttacctgactgccgggagatggcctgtgccaccgaatcagcctgcggtccacggatggccacggcatcagctaatttatgcaacaggtatttactgtccgatttcacgttctgttcttcaggcgatttcagcaatccctcgtatacttccttatcatgcgcatccagtttattcgattccagatgattgcatatcaacgtcagtgtatccccttttatgtttagccgaagtaaaaaactggcattactcccactttcataaggaatctgttctaccgagagaatcgggaatcgcgacaggcaagccatcccatttccgttagacgctttcagcaactttctgtaaggatacatagggaaaaccttcctagtctcttgagcatcccactgatactcctgcagacaaaccacgtctgcatcactttcctgaatataatgttgcacgggacgagattcattttccgcatctccgtacatattcataacgttgtaggtcagaaatttcagtacatccccgtccgtaggttcttcccctcctccaaacggagtatacgtcgcgactgcccctcctcctgccagtaagagcagcaaaggaaggcacataaacttccatccatgaaacagccccactactgcaagaacaatcaaagccaacaagaaaaagggaaaaaacaaccccgcacaagccagcaccggatgagccaccggcgatagaagcggactgtaagcacagcacaaaaatccggtcccgacaaccaggtttcctaaaataaagactcctctaaacgtatgtttccaaatactcatttcttacttgcatcaaataagctttttttctcgtcatccgtcagactgttatagcccgacttacgcagtttgtccagaatccggtcaatttctgcctcacgttcctttttccgggcattgtattcataatctgcctgacgtcctccgtagtgcaccttcatcttgggtttacgcttcaccggacgtcgcaagcctgcaaaccagtcgcacaccaggtttatccattttgtggcatcgtggccgctctgcaatcctgccgcaaaccaccatccggccagtgctccacccagatgtgcgatgtgcccgcctgcattgtcagaagtcatgaacagcaaatcaagcaccaccatgaacaaagccacatatttcagacgcaccgtaccgataaacaggaactgtaccggataattcggttcacgtacacttaccgccaccacaatggccaacacagaagccgaagcacccagcaaataggaagaatacacggcatcctgaaaataaggaaacacattatatgccagcatataaagcaatccgccacagatacctcccaggaaataaagtccgcgcaagtgcttcgacgagaaaaaagccagagacagacgaccgaaccagaatagccacagcatattaaacaagatgtgcagcacaccggcatgcatgaacatgtaagtaatcagggtccagggcctacggataaagacctccgtccatgccggcagttccagatagttcatccacggtgaagcagacacattgaataaggtcagaaaaatctgcaccagtgtcactgccagaaacaccgctacgttcacatacaccagacgcagcacaatgtctccctgctggaactttcttttcaaatcagtaataaatccgtccgccgccatttttctttctccaataaacaatcagtatcaagccgaacaacatacctcccaggtgagcgaaatgggctactccatcgttgcttcccaatcctaaaagcagctccagcaccgcatatccaatcacaaaatacttcgccttgatgggcaccggtatcgggaatacaaacatctgactgttgggaaacaacataccaaatgccagcaaaatgccatacaccgctcccgaagcacctacggtagtcagctggttcaggaacacatccataggaatgatacccagtcccgtattgaccgaatcataattagaccacaccgccagatactccacatactgcaccaactcctgaatcaggccggcgccaataccacaaatcaggtaatacgtcaggaagcgtttaggtccccacacctgttccagcacccgtccgaacatccataccgcaaacatattgaagaagatatgcgagaaattggcatgcatgaacatgtaagtgataagctgccccaggttaaaatccgaagccaggaaaaagtgaagacccagcatattttctatatccactccgtatttccgggccacaaacatcccgaagaaacagagcacattgataataagcaggtttttcgttactgttggaagattattcatattgttaaatcattgattcagttacaaatgtacaacataaaatcgggtttgaaggaatatgtatccttaaatttcattgaacgcacgcaccgagtcacgcagcaccagtaagctttccggtcccatattgaacagcaggtcaatcacactgagattaggcagaaaacccagcttctggtcaaacacctgataataaggtttaggaaagaatgccttgtccgcctcccgataatcccgtttgggatgaatcagttcccggaaatcatcggcacactccacttccggcatgtattcctcggtaggtatcaggcgaggctccatgtcaatctgccggcacacccactcacacagctccaggttaaactcgaacagaaactcatatttctgctcaaagaaccggtgaaactcatctgcatagtaatcaaagaaaggactatgcttgtaagcggctacaaacgcattccagtgcacatgccgccagttgccatggtctgaaatacgtacatccttcatcacacacttcaggtcgtcactcttttccgtcggaatggtcagtaccaacggtccgtcggccgatgcaatcacgcaccggttgcggtaagtctgcttcatgtagtggtcataacgctccacacgtaccgaaggataagcaaaaagtttggtataatattctacgggagccagataggccgaccccaaaatcacttcattcttcattctttcttagtttatgtcattgcatccgctgccagaagcgccccttccgcgaagagtaccagatgcgccaagccttccctatcaggtggtcctccggaacgaacccgaacaagcgggaatcacaaatattcaccgggtcattggaagccacccagtaataatccttgccaaacgtataagcctccacgggctttcccttcacatacaacgtatcgtgacgaacctctgcaggctggtgttcatgcgccacaatcgtattgcagagcaaggtcacattccagggatataccttcaccggaacgcctttcgccggaatcacatacggatgcacttccgtacggttcttttcatccagcggaaccagcggaatccgtccctccagtttctgcgaaatcaagtaatattcatattggctgaaactccgtatataccccccgtcggaagtatatccggccagcgtatttcctttgatacccagcaccgacagcacggtcagcatcaagtcttccgaagacaccggataagcatacagcgatttggcatccgggctgagcacctctccgcccacacagttcaggtcggcatccaacatcagcgtatctcccggcgtgccgatacagcgactgatgaacagctctctccactctattcctttctccacctgctggggatgagggttattgaacaagagaatatcccccttctccgcacgcgaagatgccagccgatgatagccgaaaagcgaacaaaaaggcaaacgcagcccgtagctccacttgttgaccagaatccgctctccctgataaagagaattttccatcccggaagaaggaattacacaagtcgtcacaagcagggtccgcaccagccatacggtcaacaccgtcaggccggccgctctcaaccaccaccatccggactttcctttgttcatagattatttaatggaatccacaaacttaaacagacggttccagcgaatctttccgtcaaaccagccacgatcctggttcagcgacagccagataaaaataggtttacccacaatatggtcttccggcacaaagccccagaaacgtgaatcggccgaattatgacggttatcacccatcatccagtaataatccatcttgaaagtgtatttcgtcgtttcctgtccgttgatgtagatttttccgtctttcacctccaggctgttgccctcgtagttcttgatcggacgttcgtacatcggcaggttatccagtgtcaggtctatggtagctcccttcttcggaatccatatcggaccgtagttatctactgtccagcccgtcagcttgttatccggatacagtccgcctgcatcatcatccggcacgttttcaatggcagtcaccaagtccttccgtgccagcaaggcagccttcgccttttcagtcaacggcatgttatacaccgattcctccgtataataagccatcaggtcctcctggctgatgcccagttcatgacataaatcctccggcagcatgcccttggtatgcacgaaataacgatactgcacattatccggctccttgttggccttaccgtccaggtaaataatccggttcttgatttccagtgtctggcccggcatacctacacaacgcttcacgtaattctctctccggtctacaggacgggtaatcacctcaccatacagctgcggattttcgtcaatatacttgcgtcctatcgagtaataataatcatacacatcccgttgctgctccaggttcaggctgaccaagtcaataggctgcgaaagttgcttaccaatggcatagctcatgcgatagatgtcttctgccggattgccggtagccaccgtatcccctgccgggaagttgaacactacgatgtcattcagctgcacctctcccagtccggccacccgtttgtagtcccacttcggccattccagatacgacttgcagttgaacaccggcaacgtatgctgcgtcagcggcatgtggagcggtgtctgcggaatacgggcaccataactcatcttgcttacaaacagatagtcacccaccagcagcgatttctccagcgacgaagaaggaatcacgtagttctgaaagaaatacagattcacaaaatagactgccaccagtgcaaacacgatggcatccacccagcccatcaccgtcagcacggtcttgttggtcgatttcttccaccatgtccagggaatctttttggaaatatatgcgtcaaagatgaacggaaccactaccagtcccagccagcttttcaaccaaatcaggaaaatcaggtaaagcaccagcactatgccgaactttatccattgtttacgcgatgcctgtatcatactcaaaactgaaataaatcattcatacctaagaagccctggtgcgcagccgtatattctgcagccagcaccgctcccaatgcaaaccccttgcggttctttgcgtcgtgtgtaattacgatagaatcagcctccgattcatatttaatggtatggatacccggtacttccccttcgcggatggcactcactggcaattcatccggtgcacagtcggtcgtgcccgtcaccgtaccgtcgggagcagtcagtgtgcccatcacccatttctgcttgcggtccaggttttccagaatcccttcagccagtgtaatggccgtaccactcggggcatccagcttgtgcacgtggtgggtttctaccatcgacacatcgtagttcgggaactggttcataatctttgccaggtacttgttcaccgccgcaaagatagcgacacccaagctgaagttagacgaccagaacagcgtcttaccctcttcctggcacagacggcacatctcttcgccatgctctcccatccatccggtgctgcccgataccacttttaccccattcttgaacgcctccagacaattgccgtaagccactgaaggagccgtaaattcaatggccacatcggccgaacggaaagcctccgaagcaaaatcttcccgattatttatatcaatgatactcacaatttcatgacctctggaaagggcgattttttcaatttcctttcccatctttccatatccaattaatgcaattttcataattctgatgataattttattcgcaaagatagtgtttttcagtattaatcattacatttacccaacatttacagctcgttaacatggaacatctactccagtttgtatggaaacacaagctttttccgctcactccgctgcataccacgcaaggacaaaccgtggaagtcattgaccccggactccccaatcccgatgcaggacccgactttttcaatgcgaaaatcaagatagacggcattctgtgggtgggaaatgtagaaatccacgtgcacgcttccgactggaaacgccaccaccatcatcaggaccgcgcctacgactctgtgattctgcatgtggcttccgacatcgatgccgaaaccttccgcaccgacggcacacccatcccgcaaatggagctgcactatccgccctacctgttagacaactaccgcgagctgattgaaaccagccattacccggcctgctaccgccttatccctcgcctgcccaaactcctgctccacagctggctctccagcctgcagaccgaacgtttcgagcagaagacacagcgcatccaggcccagcttacccaaagcaaaggcgactgggaacaagccttttttctcaccttagcccgcaacttcggtttcggcaccaacagcgacgccttcgagcaatgggcacagaccattcccttgcaagccgtcaacaagcaccgcgataatctttttcagatagaagccattttcttcgggcaggccggcctgttgcaggaactcccgtccgacgactattccgcccagcttaccagggaatacgcctacctggcccacaaattcgagctacagccctccgaacaccttcgatggaagatgctccgcatgcgtccgggcaactttccgcacgtacgcatcgcccagctggctaacctctaccaccgttcccagggcatgctctcccagttgctgctggcctctacggtgaaagaactgcgcgacctgctgcgtggaggtacctccctttactggctgacgcactacgttttcggcgaaccctcgcccgcccgtccgaaaaccctcagcgacgcctccatcgacctgctgattatcaataccgtgattcccttcctctatgcctacggcaagcacaaaggcgaggaacggctcaccgaacgtgccggcaacctgctggagcaacttaaaccggaaaacaactacatcatccgactgtggaaagaatgtggtctgcaagccgcccatgccggcgacagtcaggcactcattcaactcaaaaagaattactgcgacaccaagaaatgtctgttctgccgcatcggatacgaatatttcaagaaaaaagaaggttaagaacccttcccaccccttacacacaagtcacattaaatcagtacttccttggcagtactctagtactttccttggagtactacagtactttcgtggaagtactcaagtactgacaaggaagtactggcaactattaaatctgtatttctcaatatgttacagaaatttatagaaaatccatccctttcaaagaaaaatcatttccgtcttgacaaaggaatatagaccgaacactcccagcctgaaagtcggttacgcaagaaaggagacatattgaacttccttgtcatcccccatttgtattgcacagccacttccatgaatctgaagtcatacgccaatcttgcaaataccggcaagtcgaagaaacttttgtcataaaaataaaaagtaggctccactcctaccgacagattcaatcctcgaaacaggtaccgtcccacacttccagcaaaagatgccgaccacagattacggattccttctccgcccacatacgtcgtatgcacgtcagaagaaagataacggaatccatagctgtagcggccatatcttgccgataacgacaagtcgaagaaccagccggtatccggacgattcagccgccagcggtatccggcacccaaagtaaaatcagcccccaaacgggagtttgccaaatcgaaaggcggtaatcctttctccggtgaagccacctggtagtttacggtatttttccctccataaagcactaggcctgaagaacggagcatctgtgcacgaactgtcatccataaaaagaaaaggaataagaaaaaagataatcgtttcatactgatttccaattagcgttattatttttaatctagtttctgttttatttacttaacgattcattattcagcgaaataaacgggtgattcttttttatcgaatccacattatattcaacattaaacactgcatggtcaaaatctaactgtgtttcagactctgacagttccatccactccgtttgccgcaagcagcaaccacctaccagtccgaaaccgttctccacattggtgtaagtagcccgcataggagccagctccacattacccagttcattattcttctgctcattaagtgatttcaaataacggtagaactcttcagacagactatataaataaaccttatattgctttctgtttataaaagtttcatcttgaatagaagtcttgtaatcaggtatgtaagtcatattcaggcgaagtgtgtaattctttccctgaattttctcatcgctccaaaaatacagattctgatagtacgcatagtttcccataaaaatgtcattcaaaccagaagaagcatccaacattggctcatcactccagtccatataagcagaagacggtttgccataatgcacctccgaagtcccctctttccaatacttcaccctttctttgaccgttaccgcatagtaattttcaatctttgcataatcggtaaaatttatctgaagctggagcacactcaactcagagggttttcgttctattttaacagcgtttaagggaaaaggagcaggaataatggtaaaggcagatactgctttcaccccttctaccgaagctgtaagccggacacggtcactcgtctcatagggctgcaccacataataacttttggcggggactcccggcaatgaatcctctgtccacaacaaaggaacagcaatgtcattcacttccagtctgatgtcccttccctttaatccatacattctcatgcctttgtcataaactggaagactgtgcgaaagacgtaccaccgtagtatctccacttccaggataactatataccgttaatttaggaacctctgaaatttcatccaagtcaaaatgatacacacaagatgacaacagactgaaagctgcaagtattattataaaattctgtttgtttaaatgcataaatacaatgtttagaaatttgttataatcaatgacattccaatgcataccgattcagaaatttaaggtgtagctaaaagaaggaattatcgggaacagtccgatagcctttcctctgaaacttccatccacctgccgttctatctttgtataaaaaggattcatacggcaataagcattatagatactcacattccaaattcgctcgaatccccgcttggtagtccgccggaaattgatacccacatccagccggtggtaggcaggcaaagtaatattgttaggttttccatacatcggctctaagtccgacaactgcgaagttccaggtaggcaaggattttccacatactgtgtaggaaccgtcgcatggtcaccactacgataagtccacgctgcatatacatccattcgatggctgaatttacgacgatagacaaaattcagtttatgacgattatcaaacttgctgggataccaaccggaatagaaatcatcaaatttttgcttgctccatgataaagtataaccagcctgaaagaggttctgctcatcatgatacaccaacgatgtttccaacccatacgatttgccgtctcccacccgtaccacctgttcccagtttccggcaggcaatgtaagactgcctcccgcctcgtactccaacattcggctggtagtacggaaatagctttccacctccaggcgcaacctccacggaagttccatgtacacaccacctgccacctgtcgcgaatgcataggacgtatacgggaggtagaaggaacccaacaatcggtcggcaagtttaaataagaattggataactggtgcgcaaactgactcatcccggtataggaaacttttaaaatggtacgactgaacagacggtaacttgccgatattctcggctccagcgaatgatatactgctcccgaaacttgatacatggtataacgtccccccacgtttatccgcagctttcgggtcagcctcatatcgtcttccgcataaaaagagaattcattccctttgtaatggctctctactgatgacaataacgtatccgtcatttcctccgtacctcttatatcctgtgataacgtatgctgcggacaatagatatgatacaagtaatcgcttccgaagcgaacatgatgactcgccgtaggaaggtaatgaaaatccatgcgaaaacctacgtcatcaatagtagaataactgtccctctgcatccggtctacagaatattctttatcatcttcccctttataaaaactatcatctgacctaaagtcatatttagacagattacgggcatataccaaagaaaaattaccggtcagtttatgattgaactgattattccatgacaacgcggcagaaagatttccccatctgatatgatattcatccgtggtctgttctttctcttgatggagcagatttcctgacgggaaaagctgtttatccttcattttaaacaaatctcttccagaatacacactaaaagaaagcctgctctcattggaaaaccgatgtgtgattttcgcatttatatcatgaaaagcataacgggcattgatatcttcttcgggaaagaaacgattggcaatccgcaaagcaggagcagaaagcacgtccaaccaactccggcgcataccgaacacaaaagaagttttttcctttatgacaggcccttcgaaacgtagccttccgtccagcagccccaacgagaccataccatgaaactcctttaagtccccctccttcatacggacatctgtcacagacgaaagcctccctccgtaacgtgccgggaaaccactcttgtaaaaatccacgttcttcactatatccgtattaaatgcagaaaacaatcctccaaaatgattcacctgatagagaggcatgccgtccaataagaataagttttcatcattcttccccccgtgtacataaagcccggagagcagttccgtgccagcagatactccgggaagctgctgaattgccttgactaaatccggtgaactgaacagtgagaattccgtattcaactgttctgaagtcaacgaaatctttccagtctgagttgtaaaaagagaagtattcaaatcggctgttaccactaccccttccaatgcagtggaactttccttcaaataaatagtaccagaataatctgaacgcaagtccaattctttcaccacctcttcataacctacataagagaaacgcaaagtatgctttccttccggtaatgtcaaactaaaaaaaccatgttcatccgttaaggtaccgatatgcatattctgatcatacaccgtgacattaaggagtgattccccattatcctgacacacgtgtcctgagaaagtatactggctcgatttaaacaacaaaacatagctgccttttatctcccattttattccggttccggaaaagactgtttgcagattctccttcaatgacttaccagaagaaaaaatgccagataaccgtatcatttccaaagaagaatcatagacgaaattcacatgatacaagtcttgcattcgtacgattgctttcttcaattctgaagtttcagaacgaggatgtccccctaaacacaaacagacagccgccacagtccacaaggtactcatcatacttgctttttaatatgcacttttaatactttttctattatctcgatgatttcgtccagactgtgtgcatcgaaattggctgtcaaccgtttgtctgtccggtcagctaccagctttaccccataataatgggaaagctctgtaagtactttcggaagaggagtattctcaaatacaaaacttcctttctttacagaatccggacgatggatgatttgcggaacatgctgaccttttactacttgtgcctccattccagccagaagttctacaccttccgactgacctagtacagaaaaccgcacttttcccgattccacctgaacccatgcggtatccgcacggctttcatccatcacgaaacaagtacccaacacttgaacttcagccaactttcctattactttaaacggacgagtacaatctctttttatcataaaaccaactttccccgtcaatttcacttcacgacatacatctgtataatcctttgtacggaaacaaatagaagaatagggatataccgtaacgaccgaactgtccggcaactggtactttactgcatgttcgtatgctgccaattctgcccactgcttctcaggagatatacccacccagacaataaacgccagcaatatagccgcagccagcccagataaaaacaggaaataccggttctttccgcctgcccttccaaccactccatgcttttccttgaaaactttcaaagcctgccgtgtgtccaatttattcttttgatagtgcctcaacacaaaacgaaggcatttttcttctaattcattcatgtttctggtgatattatacattcaaccctgtgacaatagaaaccccaaaaatcactacgtgaaaacactgaattttagttaaagagaaacatatacactttatatgccccctcacgtatcaaacgaaatgccttctgaatatgactgtcgactgtatgaaccgaaatatgaaacttttcagcaatctcctgatacttcaggccatcccgtttatgcaaaagaaagacctcacggcaacgctcaggcaaggcatctatggcagtccacattcgcgcctccatcacactccgttcctccacctcctcatccaacaaggtttcttctaattcagtaaatgagactcccgatttgaacagattttcctgactcaaataatccaagctacggttcttaaccatcacatacaaataagccttcatattacttacctcgcaagacttttcattattcattttctcccacaaagacgaaaagcaatcctgcacaatatctttggccatctctacgtcctgtacataatgtgttgcatacaaacacaaaggtctataataaaacttgaataactcatctatatttaatctgtctcttcccatgtgcaaatcgatttctatttcaaatagagacagatgaaaataccaaaatcaccatcctacttctgtaaaaaaagttaagtcttttcagttcttcatacctctcaccgcaatgcctcttccactgcccgcagatacccatccaggcgattgctcttcaagatagccttccgctgtttcttgtccagctccggcaacaggtactcccagcaggtcttcagcttggccagcagctgggcctctccgccctctatcacccgatgataatacagatacatctgccggtgcatctgcgctacccgtgccttcaattcgttctcggacaattctccttcacggaaagccagcgccagcgccggattcgccagcaacccgcggcccagcatcacccctttcagccggggaaacgcttccagtacctcccggatgtcggccaccgtcagcaaatcaccgttgtacaccagcggccgctcacacgcctcatagaacgcacggaacgcctcccagtccaccgtccccttgtactgctgcttcccgatgcgcggatgaagcgtcacctgcgtcacacacgaacggttgagtaacggcacgagcgccttccactcctccgcatcctggccgcctaacctcatcttcaccgaaaagcgaatctccggaaacaccttcatcgtctccaacagcgcctccaccttctccggagaagacaagatacccgctcccttaccacggcgtacaatcagcggaaacgggcagcccatgttcacatctatctcccgatagccctgcgaagtcaaaaagtccgtcagcactttcagctcctccggctccgaggcaatcacttgcggaaccagctggggcaccgtgttctcttcaggcgacacgtcgcgcctgtccttgttacgaatctctcctttctccaaccggacaaaaggagtataatacgcgtccacacaccccaggcactgcgcatgtgcattgcgccacgccacttccgtaaagccctgcaaaggggctgcataaattactggtacattctctttcatatcccgcaaatataggaataattcgctatctttgtgaaaatacataaacttcactctcatggagaaatacatctttgaactgaaaatgaaggttcgcgactatgaatgcgacctgcagggaatcgtcaacaatgccaattaccagcactatatcgagcacacccgccacgagtttctctcctccgtcggtgtcagcttcgcccagcttcaccagcagggcatcgaccccgtggtagcccgcctgaacatggcttttaaaaccccgctgaccagcggcgacgagttcatctcccgtttggcactccgcaaggaaggcatcaaatacgtctttgtgcaggacatctaccgcctgcccgacctgaaacccgtcatcaaatcgaccgtagaaaccgtgtgcgtagtcaacggacgcctgagtgacagcgccctcttcaatgaaatctttgctccctacctgaaccaatgaacgaaaaagaactcctctgccgcatggcccttccccttctgcccggcatcggtctggtaggagcccgccacctgattcaggctgccggaagtgcgaccatgcttttcgaacacgcccgcgagctgccggctcttcttcccggagtcactccgaaagtagccaccgcctttcagcatacggaagtattccgtctgtgcgaagccgagctctcgtttgcccagaagcaccagattcagtgcctgaccgaagacgacgaagcctacccttcccgcctccgcgaatgtcccgatggcccgctcgtgttgttctacaaaggctcggccaacctgaacagccgtcacatcctgagcatcgtaggcacacgcaatgccaccgactacggcaaaggcctctgccagcgtttcatgcaggaactcagcaccctgattcccgacgtgctgatagtgagcgggctggcttacggcatcgacatccatgcccaccgtgaggcactgacccacggattcgacaccgtgggcgtactggctcacggtctggaccgcatctacccagctgtacaccgccgcaccgccaccgagatgctgacacagggcggactgctcaccgagttcatgagcggcaccaaccccgaccggcaaaacttcgtgaagcgaaaccgcatcgtagccggcatcagcgacgccaccctcgtggtagagtccggccccaaaggtggctccctcattaccgccgagatagccgaaagctaccagcgcgactgcttcgcctttccgggccgcgtaggcgacacctactccaccggctgcaacctgctgatacaaaaaaaccgcgctgccttgatacagggcgcggaagatgtggtaaaagccatgaactgggaccatgtgcccatttcccctcaggtagtccagcgccagctgttcccggagctgacacccgaagaagaacaagtcatcacccatttacagaaacatcccgacgggatacaaatcaatacgttggtagtggaaagcaacatcgccatcaaccgcatgaccagcctgctgttcaacttagagatgaaaggcgtggtccgtgcactggcaggaggagtttacaaaatggcataaaaaatgggagaacgctttctcccaaccttgttaaccttaaatctaatactatgaaaaaaatcacgtgacaaatgtaagaataacacttattctgtgcaaatattcaacccttgattttcagctttttaaaagtttttaaaagacaaaaagaattcgccccgaaacagcgtgtgcttcggggcgaatcgttatctgtctgtaaagagaattagtctttcagttttgctttgatgaagtcgcggttcaaacgagcgatgttgctgattgaaacgcatttcggacattctgcttcacaagcacgagtgttggtacagttaccgaagcccagttcgtccatcttggcaatcatagcctttgcacgacgcaatgcttccggttttccctgaggcaacaggttcaactggcttaccttagcagaaacgaacagcatggctgaaccgttcttacaagcagctacacaggcaccacaaccgatacaagaagcggcatccattgcttcgtcagctaccggtttcggaatcaggatagcgttggcatcctgaggagcacctgtacgtacgctgatgaaaccacctgcctgcataatcttatcataagcagtacggtctaccatcaagtccttgataaccgggaaaccagctgaacgccacggttctacagtgattacatcaccgtctttgaaacgacgcatgtagatctggcaggtagtagcacctgtagcaggtccgtgcggatgtccgttgatgtacaaagaacacataccgcagataccttcacgacagtcgtggtcgaacactaccggttcttttccgtcttcaatcaactgttcgttcaagatatccagcatttccaggaaggaagtatcgcctggaatgtccttcatctggaatgtatcgaaatgacctttttccttaggtccgttctgacgccaaactttcagcgtaaatgatatatttttatccattttacttagattctttaattgtttaacttcactgattagctcttgtagttacgagtctgtaccttgatagcttcgtaaaccagcggttctttgtacaataccggagccttgtcgtcgcttccctggtattcccagcaagctacatagaagaagttttcgtcatcacgttttgcttcaccttcttctgtctggtattcttcacggaagtgaccaccgcaagattcgttacggttcaatgcatcgtaagcaatcagctcgcccattgtgatgaagtcgttcagacggaaagccttatccagctctacgttcaaaccttccttagaacccgggatgaacagttctgtttcgaattccttacggatgtctttcagcttagccagaccggtcttcaaaccttcagctgtacggcccatacctacgtattcccacattacgcgacccagttccttgtggatagagtctacagacttcttacccttgatgttcatcaggtggtcaatcttgtcctgaacagccttttctgcttctgcaaattcaggcaggtcagtagagaaacgaggaacagtaatctggtcggccaggtagttctggatagtgtaaggcaatacgaagtatccgtcggccagaccctgcatcaatgcagaagcacccagacggttagctccgtggtcagagaagttacattcaccgatagcgaacagacccttgatagaagtctggagttcgtagtctacccagataccacccattgtgtagtggatagccggataaatcatcatcgggttgtagtatttcacaccgttgatttcgcgagccagttcgcccggatttacgtcggtgatttcttcgtacatatcgaacaagttaccgtaacgctggcgaactacgtccaagcccagacgttcgatactttcagagaagtcaaggaatacggccagacctgtgttgtttacaccgaaaccgtggtcgcaacgttctttagcggcacgtgaagccacgtcacgcggaaccaggttaccgaatgccggataacggcgttccagatagtagtcacggtcttcttcaggaatatcgctacctttctttgttccagcctgcaatgctttggcatcttccagtttcttcggaacccagatacgaccgtcgttacgcagagattctgacatcaaagtcagcttagactgcttgtcaccgtgtaccggaatacaagtcgggtgaatctgtacgtaagccgggttagcgaacatagctcccttacggtagcaagacatggcagctgttacgttacatgccatggcgttagttgacaggaagtaagtgtttccgtaaccaccagttgcgataactactgcgtgagcagcgaagcgttccaacttaccggttaccaggttcttggcgatgataccgcgtgcacgaccgtcaaccaatactacgtcgagcatttcgtaacgagtgtacagttttacagtaccggcaccaacctgacggctcaatgcagagtaagcacccagcaacagctgctgacctgtctgacctttagcgtagaatgtacgagatacctgtgcaccaccgaatgaacggttagccaatgtaccaccgtattcacgagcgaaaggaacaccctgtgccacgcactggtcgatgatgttgtttgatacttcagccagacggtaaacgttagcttcacgagcacggtagtcaccacctttcactgtatcgtagaacagacgatagatagagtcaccgtcgttctggtagttcttggcagcgttgataccaccctgtgcagcgatagagtgtgcacggcgaggagagtcctggatacagaagttgaacacacggaatcccatttcacctaaagaagcagcagcagaagcacctgccagacctgtacctaccacgatgatgtccagacgacgtttgttagccgggttcaccagtttctggtgagctttataattggtccatttctcagctatcgggccttcaggaatcttagaatcgattatcttagtcataatgttttttcaatttaatcagttacacttaaattagcaagcaccgcaacccatcatgtttttcaggaagaacacaacggctaccagcatgaagccaagtacgatgatggtagaatagatgttagagatgcatttccaacggttaatccagatggtgttgttccaacccaaagtctgcatagagctccagaatccgtgagtcaggtggaaccacaaggcaatcagccagatgatatacaacacgaagaacaccggattagagaatgtctgcatgatgtagccgtaaccgtcggctgcatgaagaccacccttcatcgggttgccgatgatttcagcgaactgcattttgtaccagaagtttacgaagtgaagagccagacccaggattacaatgatacccagtaccagcatgttctgagatgcccattccacgtttttcggttttgctgtcactgcatagcgttcgtgaccgcgagctgcacggttctgcatcgtcagccagaaagcgtagatgatgtgaattacaaacagggcagccagtccgacagtagctaccagcgcataccagttggcaccgaggaactcacaaaccatgttgtacgcctcgcccgagaacaatgcaacaaggttcatcgccatgtgaaatgtcagaaacaggacaagggcgataccagtaacactcatcaccactttccttccaatagatgaattacttaaccacataaatgattgaatttaaattatttaattgttagaactataaattcgcactcgaaggtccaaattatgatgcaaaattagaagatttattgagataacacaacagattatggaaaaaattctgtaatcggaagccgtgagccacacgtaaaaagcctatcttttgggaaaattcatgccgggcttgcgcagtagttcaatggcctttttcatgctgtcgttcagcgtgttaatcacctggaagtattcgttcatgtcccagatgtcgcgggccagcagggctttcagctgggtcttgaccagcggaagtgccgtacggaactgggcctcgttgtaggtgatgcccatggaggtgccttgtgccaccagctcatcgagcatggcctggctcacctcaaactcgcggttgaagcggtcgaacgtcttatactgctggagccattctttccggtggcggtcaatcagcttgatgttcagctgcaccatggcgcctttgtcgcgcaatgacagataatagttggtgtacatcgtggtgtcgatgggcacgaaatagtcgggcatgatgcctccgccaccgtacacggtacgtcctagcttcagggtcttggccttgagcgagtcggggaagtggatgctgtcggcactcatcatctcaccccggttgtaacggtctatcaagtctttattgtattgctcgatgctttcgtaaggtttctggatacaacggcccgaaggggtgtagtaacgggcgatggtcagacggatcatggaaccgtcgggcaaatcgatggggcgctgtacgagtccttttccgaaggtacgccggcctactacgatacctctgtcccaatcctgaatggctccggtgacaatctcactggcggaagccgagaattcatcgacgagcaccaccagacggcctttctggaaatcgccgtcgcccttggcttcaaattctgaacgggggttgcggcggccttcggtatagacaatgagttctttcttacccaaaatctggtcgcacaggatgatggcggcattcaggtaaccgcctccgttgccttgcaaatcgagaatcaggtctttcatgccttgcttctgcaacttgtggagggcatcggtaaattcttgtccggtggtagcggcaaagcggttcacacggatataaccgatttttccttctaccatgtacgaagcatccagactgtatacgggaatcttgtcgcgcttgatggtgaagggcagcaactctttcacaccggcacgcaacacttttaccgtcaccgtggagccttttggtccgcgcaagcggcgcatcacttcgtcagtgttcatcttcacaccggcaatgaccgtgtcgttcacttcgatgatgcggtcgccggccaggatgccgactttctcggaaggtcctcccgatacgggctggatgacaaagagggtgtcggtagccatattaaactggataccgatgccatcgaagtttccctgaaggggttcgttgagccgcttcacttcttccgggtcggaataggtggagtgcgggtcgagctcttccagcatgctgacaatggcggtttccaccagtttgtcttcgtctaccttatctacatagagattggagatggcgaactcggccagctgcagtttgcgcgaaggcgaatcgagcagcttgttctgggcaggcagggcagtccatgccgcacatcctgccaataaagcgaataggtattttctgattttcatgtgcattctttcattttattccacttccatgccttcgggcagaaagtcggatacatccttgccatactgcaggagttcacggacgatggtggaactgatggaggtcagttcgggctccgtaaagagtaggatggtttctacgccggccagcttgcggttgatgtcggcaatggtttcttcgtattcaaagtcgtgtacggtacggatgccgcggataatgaatccggcctcgcgctcgcgggcaaaatcaacggtaaggttgtcgtatgcctcgaccttgatgcgcggctcgtcggcataaagtttgcgaatcatctctacgcgcttctcggtggggaaccaggttttctttttgtcgttcaccccaatgccgatgatgatttcgtccataaaggtcagggcacgcttcaccacggaatagtgcccgatagtaaacgggtcgaatgtgcccggaaatatcgctcttttcatcactgatgactggcagtttttaattattaattcttcattcctcattcttaatcaggtcttcctctaccaccagattgtcgatgatgaagttctggcgttccatggtgttctttcccatgtagaactccagcagttccttcacggcgtcggtcttgcgaagggtgacctgctccagacgcatgtccttaccgatgaaatggcggaactcgtcgggcgagatttctcccaatcctttgaatcgggtgatttcgggattgggactcaacttctcgatggcagccacacgctcttcttccgaatagcagtagatggtttcgtacacccctttcttgcggttacgcacgcggaacaggggggtctgcaggatgtacacatgacctttctttatcaggtcggggaagaactgcaggaagaaggtaatcatcagcaggcggatgtgcataccgtccacatcggcatcggtggccacgattaccttattatatcggagtccgtcgagcccttcttcaatgttcagggcagcctgcaggaggttgaactcttcgttttcgtagaccaccttcttggtgagtccgaaagaattcagcggcttaccgcgcaagctgaacacggcctgcgtattgacatcgcggcttttcgtgatggaaccgctggcggagtctccctcggtgatgaagatggagctttccagacgggggtcgtcttcttctttctttccgcctttctggtcgttcaggtggatgcggcagtcgcgcaacttacggttgtgcaggttggctttcttggcacgctcacgggctatcttcgtgacgccggcaatggccttgcgttctttttcggattcctggattttctgcagcaggacttcggccacatcgggatgcttgtggaggtagttgtctacctgctcttttacgaaatcgcccacaaacttgttgacgctgacgcccgacaagggataggggttgccttcggaatctttctccggtgccatagacagtgagcccaacttgattttggtctggctttcgaacgtaggttcaatcacgttgatggcaatggcagccaccagtccgttacggatgtcctgaaactccaggttctttccgtagaactccttgatggcacgggctatgtgttccttgaacgcgctctggtgggttcctccctgcgtggtgtgctgaccgttgacaaaggaatagtattcctcgccatactgcgcactgtgggtaaaggctatctcaatgtcttcgcccgtcaggtgcacaatgggatacagtcccggcgcagtcatgttgtcgttcagcaagtcttccagtccgttacggctcacaatgcggtgtccgttataatagatggaaaggcccgtatttaaataggtataattgcggagcatggtctcaatgaactccggacggaagtggtagttctggaacagggtatcgtcgggctcaaagaagatgtaggttccgttttcttcgtccgtggcgcaggtctcgtcgctgaccagttctccacgttcgaacacggccttgcgcatctgtccgtcgcgggcactccaggccacgaaacggctgctcaatgcattgaccgccttggctcccactccgttcagaccgacacttttcttgaaggccttggtatcgtactttcctccggtgttcagcatggaaacggcatcgaccagacttcccaaaggaatgcctcgtccatagtcgcgcacggacacccgcaggttgtcttccatctggatttcaatgcgctttccggctcccatcttgaactcgtcgatactgttgtcgacgacttctttcaacagcacataaattccgtcttccacctgcgaaccgtcgcccaggcgaccgatgtacataccgggacgggtacgtacgtgctccatgtcgctcaggtggcgaatgttctcttcggtataagctacagaggaaacggtttgttcattgagttcttccatatctattccccctctgttttttaaatcattttcttataagcacggcggcgtttgtgttgcacggattcgaatgcgctccactgtgcctgtactttcttgttgagctcaagctccggattactttccccatactcaaatcccatctgctggaaaataggcacaaggtcgtagaacaagagagcgttgactcccttgctctggtattcgggcttcacgcctaccagcagcaaatcgagcacacgcggacgcttgatgaacagggcctttaacaggtggtaccagccgaaaggaagcatctttcccttggctttctgcaaggctttcgacaaggacggcatggcgattcccactgccaccaggttgccttccgcatcttctaccaacgacaccatgcgcaggtcgatgagcggcagatacatctttatatattggttaatctgtccctgcgtcatctgcgaatatccgtaaagaggcgcataggcttcgttaatcaaatcgaagattttctgcccgtagttctgcttcttgatttcgctccgcttgagcttcttaattttcaggttgtacttctgaagaatgatttcggagatgcgcacaaacttgtccggaagctggtggggcacgctcagtttgtattccacccagtcggcttctttctcaaagcctaactgctccatgtgttccggataataggaataattatagatggtggccatcgtactcaactggtcgaatccttcaaccagcattccttcggcatccatatccgtaaatcccaacggaccgacaatggcttccatacctttttcttttccccattgctctacggctttcagcaaggctgaagacacttcttcttcgtcaatgaagtccagccagccaaaacggacttctttcttgttccaggtgtcatttgcacggtggttgatgatggcagccacacgccccactatctcctcgcctttgtatgccaggaaatattctgcctcgcagaattcaaatgccggattcttcttgggattgaaggtattcagcatgtcatcgtacaaatcgggaacggaatagggattatctttataaagttcgtaattaaaacgaatgaacttcttcagttcttttttcgtagtgacttttttaatcgtgatagtcattgtggtataattttctttcgttcgctttgagtttagaaaaattaaggctgtaaagatagtgttttttctcctaaaaagctggctattcactgattttcacactttaaggattttttacgcaagaagcaaacggcatacgaaaattagaaatttgatgggattttaaggtatcttttcatttcatttccagaatgaagaaagcagtaattccggtaatccactgtttgacagtaaaataagtcatctttcccccttgagaattgaaaaatcagcttctctccgacggatggacgggattttcagattctcgcggcgtttatttccaccagccgccgggcaaggcaagaatcatggctaccacttcggcatagtttttctgtccggaaggaatctggttgcctttgaggtaatactcatacatcagttcctgcactcgtcctacccacggattgtagcgtgcctgccagtaggcttgcttttcacgaagggtctgcaaaatctcgggacgaatggaagcaagcagttgccggtagtcttcttcttccaacaatgtagcggcattggagagcacatagggtagcagaccgaaatagccggagtagcggacggctggtgaaacggagcggatgcaaatctgataggcccagaagttggcttcggcctcgctgcttattcccaacagatgggaatattcatgggcataggtgaacggccattgcaagggaggcagctcgcggttgagctgtgactcggcaaaaaaagggcccatgtagcccaacacgccgacaccggaatagagtgcgttgaacatgacttgcttgggatgctggtagcttctcggtgaagaaagaccgaaacgggagggcacctgggcaaagagttgcttcacctctttttcgatgatctcgtgcgaagggaaaggcgactgcgtgtaggcttgattcaagcggcgggtatagtcggccagaaaatgctgaaaggtggaatcctgataggccacatattctacagaggaacgcgtaaagaagtctttccggaaatagttgattccccagcctacatagaaccagaggtacactcctaccagcagctcggcttctgcacgcaaggtccacttccaccctttctttttcttccagccccacagcggtagtccggcaaggagtacacacgcggctacaaaaaaccattcttccatggagaagggtatctaggaaaccagggccgacaacagtgcggacaaagcgggataaaagtgacgggcatacatctcgccccaatcgggcaagaggcggcaaaggaagatgaagcacacccccaaggcctctgcggtccaacgtacgtaacgtaagggaaaacttttcatatacacaaagttatatgttttcagacaaggtgaaggaagtgacaaagaaattatatatttttgtaacacagattaatcatgaattatacttagatagaaatggctttaaactacatctggattgcatttttccttctggccttcgtggtggcactggtcaagctcgtatttttaggcgacacggccgtatttccggagattatcaattctactttcgcttcttccaaaacggcgttcgaaatctcattgggactgacgggggtgttgtcgctctggctgggcatcatgaagattggagaaagaggaggcgttatccagcttttcgcccgtctgctgagtccgctgttttcaaaactgtttccggagattccgaaagggcatccggtgacgggaagtattttcatgaacctggcagcgaatatgctggggctggacaatgcggccacaccgctcggcctgaaagccatggagggactgcaggagctgaacccacgaaaggatacagccagcaacccgatgatcatgtttttagtgctgaacacgtcgggactgacactgattcccatcagcatcatggtataccgggcacagatgggagccgcacagcctacggacgtgtttgttccgattctgctggcgactttcttttcgacgatggccggtatcattgcggtcagcctgtaccagcgcatcaacctgctgaaccggactattctgctgtttctcggaggagccagtctgctcattgcaggcatcatctggcttttccttcagcttagccgggaacagattgacctctactctaccacctttgccaatgtgtttctctttctcgtcatcatcggctttatcgtgtcgggcatgcggaaaagaatcaatgtgtacgatgccttcgtggaaggagccaaagaaggattttctactgccgtgcgcatcattccttacttggtggccatcctggtttccatcggtgtgttccgtgcttcgggcgccatggattttctgattcagggcatcgccggggtggtacggagttgcggaatagacgaccagtttgtcggcgcactgcccacggcactgatgaagccgctgagcggtagcggggcccgcggactgatggtggacgccatgagcacctacggagccgattcgtttgtcggccgtctggcctgcatcttccaggggtcaacggatactacattttatattctggcggtgtatttcggaagcgtcagcgtgacgcgtacaaggcatgcgttaagctgcggactgatagccgactttaccggaatactagctgccattttcatcggatatttatttttcaattaacataagctatgattagttatcagacagagggcatagacatgcccgccatcaagaagcgcgaaacgactgcatggatcaaagccgtggccgatacctacggcaagaaggtgggcgaaatagcgtacatcttctgttcggacgagaagatcttagaggtgaaccgccagtacttgcagcatgattattacacggacatcattacgttcgactactgcgaaggcaagaaactgtcgggcgatttgttcatcagcctggacacggtacgcaccaacgccgaacagttcaatgcgccgtatgagacggaactctaccgcgtaatcatacacggcatactgcatctttgcggcatcaatgacaaggggccgggagaacgcgaaatcatggaagccgcagaaaacaaagcactggaaatgcggaaagatttcatgtaattcgtatttttgcaaaggattaaaaacataaaagctaatggatttcaagtatgatgtaatcgtaatcggagccggtcatgccggatgtgaagcagcggctgcggcagccaatctgggctcaaagacctgcctgattacaatggacatgaacaaaatcgggcagatgagctgtaacccggccgtagggggtattgccaagggacaaatcgtcagagagattgacgccttgggaggatacatgggactggtgacagacaagaccgccatccagttccgtatgctgaaccgttccaaaggaccggccatgtggagtccgcgcgcccagtgcgaccgaggaaaatttatctgggcctggagagaaattctggagaacctgcccaacctgcatatctggcaagatacggtggaagagttgttggtggagaatggcgaagtgaccggcgtggtgacttgctggggagtgacgtttcatgccaaatgtgtggtgctgactgccggtactttcctgaacggtctgatgcacatcggacacaagatgctggcaggaggacgctgtgcggaaccggcatcgtatcacctgactgaatccatcacccgccacggcattacggccggacgcatgaagacgggtaccccggtgcgcatcgacggaaagagcgtgcactttgacctgatggacacacaggacggcgagaatgatttccaccgcttctcgtttatcagcgaaccgcgccacctgaaacagctgcaatgctggacctgctttaccaacgaagaggtgcacgacacactccggaaaggactggccgactctccccttttcaacggacaaatccagagcatcggaccgcgttactgtccgagtatcgaaaccaaaatcgtgacctttcctgataagccgcaacaccagttgttcctagaaccggaaggtgaaaccacacaggaactttacctgaacggcttctcttcttcactcccgatggacatccagctggaggcactgaagaagattccttgcttcaaagacctggtggtgtaccgcccgggatatgccatcgaatacgactacttcgacccgacacagttgaagcatacattggaatcgaagatggtgaaaaacctcttctttgccggacaggtgaacgggacaaccggatacgaagaagccggcggacagggtatcattgcaggtatcaacgcgcacctgaactgccacggcggcgagccattcgtgctgggacgcgacgaagcttacatcggtgtactgattgacgacctcgtgaccaaaggtgtggatgagccgtaccgtatgtttacttcgagagcggaataccgcatcttgcttcgtcaggatgatgccgacatgcgactgaccgaacgggcttatcagctgggactggtgaaagccgaccgctacgaaatcctgcaaaagaaacgggccgaaatagaccgcatcgtaaacttcgtaagcaccttctccgtgaaggccgacaaaataaacgacgccctcgaaaagttaggaacagctccgcttactcacggatgcaagctggttgacttaatcagccgtccgcagattacgattgaaaatatcgctccttatatccccgccttccaggcagcactcgacaaaatcgaggaccgaaaagaagaggtaatcgaggcagccgaaatccgcatcaagtacaaaggctacatcgaccgggagcgtacgattgccgacaagatacaccggttggagtccatccgaatcaaaggaaagtttgactacgcgaacctgcaatccctgtcgaccgaagcccgccagaagctggtgaagatagacccggaaaccctggcacaagccagccgcatccccggcgtatcaccgagcgacatcaacgtgctgttagtgcttttgggacgataaagcaggtatgtttcacgtgaaacaatttgtttaaggaatacacataaaatactggatatgaataaagaaacattaaagaaaaaccttcgagaaatacccgatttccccaagcccggaattctgttctacgacgtcactaccctgttcaaaaatgcggaatgcttgcagggcatgatagacgaattgtatgagctgtacaaggacaaagggattaccaaagtggtaggtatcgagtccagaggattcatcttgggaggtgccttggcggcccgcttaggagccggattcatcatggcccgcaagcccggaaagttgccggctgaagtcattgaagaaacttacgccaaggagtatggaaccgacaccatacagcttcacaaggatgccatcagcaaagacgacgtagtattgctgcacgacgacttgctggctacgggcggaaccatggcggcagcttaccgactggtaaaacgctgcggcgtggagaaagcgtatgtcaacttcgtcatcgagctgaaaggactgaacggaagaaacgctttcgaaaaggacgtagaggtcactacccttttagaactataacacgagaagaatcccctacaaaaagggggaaattatatgcagccttctttgcaggaaacctctcctcaaagaaggctgtattcaccctgacaagaaccctacgacatggaagaaacagaaaagacaagcaacaccagtgaatacctgaaaggaatcgtattgaaccttccggaaggtccgggcatctaccaatacctgaacaaggaaggggtcatcatctacgtgggaaaagccaagaatctgaagcgccgtgtctattcttatttctccaaggaccaccagtcggccaagacacgcatgctggtttccaagattgccgacatccgctacatcgtggtgaactcggaagaggatgccctgctgctggagaataacctgatcaagaaatacaagccaagatacaacgtgctgctgaaggacgacaagacctacccttccatctgcatcagcaacgagtatttcccacgcatctacaagacccggaagattattcgcgacggttcgaattacttcggcccgtacagccacgtgccttccatgatggccttgctagagctgataaaaaaactgtatccgctccgtacctgccacctggcactgacgcccgaaaacattgcgcaggggaagttcaaggtctgcctggaataccacatcaagaactgtaaaggaccctgcatcgggaagcagtcgcacgaagaatacatgcaacagatagcgcaggcaagggagctgctgaaaggcaatacccaaaaggtaagcaatgcgctgatggaggaaatgaaacgcctggcagaagagatgaagtttgaggaagcacaaaaactcaaggagcaatacatgctcattgaaagctatcgcgctaagagtgaagtagtgagttcggtgcttcatcacattgacgtattctccatagaaacggacgagaatacggcgtacatcaactacctgcacattaccaacggatgcatcaaccaggccttcaccttcgaatacaaggtgcgcatgaacgagagcaaggaagagttgctgcagttgggtatcgtggaaatgcgcgaacgctataaaagcacgtcgaaggaaatcatcgtgccttttgaactggacatggaaatgaacggcgtgacgctcacgattcctaaaaagggcgagaaaaagcacttgctcgacctttcgctgatgaacgtgaagcagtataaagtggaccgtctgaatcaggccgagaaactgaatccggagcagcggagcgtgcggctgatgaaagagattcaggcacagctgcaactggagaaaatgccgaaccacattgagtgttttgataactccaacattcagggggcggatgcagtggctgcctgcgtggtgttcaagaaagccaaacccagcaaaaaagactaccggaaataccttatcaaaacggtggtgggaccagatgattacgcttccatgcaggaagtggtacgtcggcgctacagccgcattctggaagagcaaggtgaactgcccgacctgattctgacggatggaggaaaaggccaaatggaagtggtaaaacaggtgatagaagacgagctacacttgcagattcccattgtgggtcttgccaagaacaaccgtcaccgtacgtcggaagtgctgtttggatttccaccgcagacgctcggcatcaagcaaggcactccccttttccatctactggaaaatatccaggatgaggtgcaccgctttgccatcaccttccaccgggaaaaaagaagcaaaagccagattgcctctgcactcgaccatatcaaaggtgtcggcgacaagcggaaaacagccctgctgaaaacattcaagagtgtggcccgcatccggcaagccagcttggaagagattgcagaagtgattggagaaagtgcagcgaaaagcgtcaaggaatcactgtcggaatccaaataatttgattatttttgtagaaacaagacgaatcacatgagagtagttatacagcgcgtgacacacgcatccgtgaccattgacggaatttgtaaatcggccatcaaagaaggcttcatgattctgctcggcattgaagctgccgactcgcaggaagatgcagactggctctgcaagaagattgtcaacctccgtgtttttgacgatgagaatggcgtaatgaacaagtccattctggatgtgcagggagaaatcttggtggtaagccagttcacactgatggcttcgaccaagaagggaaaccgcccctcttacatccgggctgccggacatgaaattgccgttcctctatacgaatacttctgcaatgaattgagcattgccctgggaaaagaagtggaaaccggtgagttcggggccgacatgaaggtggaattattgaacaacggaccggtgaccatctgcatggacaccaaaaacaaggaataaccatgacactggaagaagcacagaagaccgtagacgaatggataaagacgtacggagtaaggtacttcagtgagctgaccaatatggctgtgctcacagaagaagtgggtgaactggcacgcatcatggcacgcacctacggcgaccagtcgttcaaggcaggcgaaaaaacggacttgggcgatgaaatggccgacgtgctctgggtgttactctgtctggccaaccagacgggtgtggacctgacggaagcgttcagaaagaacctggagaagaaaaccaaccgagataaggaaagacataaaaacaaccctaaactataaagtatatgaatcctaatcacgaacatgcgtgcggatgcgaacatacgcacgaagaagagagccagtacaacaagtacgaagatgcgttgagcaaatatcaaacgaatctgaaggacgatgaaatcgcggaaaaaacagcccgactcatcgaaaagcacctggaagaaaacaatacgaaggaagtaaagaaatttcttttcaattgtattgacttgactacgctgaaatgtacagacagcgacacaagcgtgatgaaattcacggaaaaggtcaatgagtttgtcgaccgctaccctgacctgaaaaacgtggcagctatctgtgtatatcccaacatggctgaaatcgtcaacgatacactggaagcagacgacgtgaagattgcctgcgtatcgggaggtttcccctcttcacagaccttcattgaagtaaaagttgccgagacggccatggctattcatagtggcgcagacgaaatagatatcgtaatttctgtgggcaaatttctgagcggtgactacgaaggtatgtgcgatgaaatcgaagaactgaaagaagtatgcggcgacaagcacttaaaagtaatcctggaaaccggcgcattgggaagtgcttcaaatatcaagaaagcttctatcctatctatgtattcaggtgctgactttatcaagacttctaccggaaaagaaagtccggctgctacaccggaagctgcttacgtaatgtgccaggccatcaaggaatacttcctggaaaccggacgtaaagtaggatttaagcccgctggaggcattaactccgtgcacgatgcattagtatactacaccatcgtaaaagagctgttaggagaagaatggctgaccaacgagctgttccgtctaggtacaagccgcatggccaacttattgctttctgacattgtaggaagtgaaaccaagttcttctaaaaaacctcatataaggacataaaaaaagcccttttcttcgataaagaaaggggctttttttatgaatcatttatttcgttcaatcacataatcgatataagccgtcaatgcttctttcagactggaatcggccgaagcgggaaccagggccagcgccttatcgcggaactcgtacatcatgcgggtggcgtattcaatacctcccttttctttcacggtttctacaaagttcgctatctcctctttcgaagcttccaaggaacgtatcttcaaggcggtctgcttcaagctgtcatcccccgtctggttcagtacatacaaggcaggaagcgtgagctttccttccagcatatcgtttcctgtaggcttgcccagctccgaactctcgaagtaatcaaagatatcgtcctttatctggaaggcaataccaatcatttcacctaacaatccagctttcattacctcttcctgcacggctcctactgatacagctccactctgcgaactggccttaaacagggcagctgtcttcttccggatgacatcgaaatatgcctcctctgagaaatcttccttaccaatattgcctaactgcagaatctcaccttccgacaattcctgtcctaaagtagccaccagttctaccagttccaccttaccagtcagagcggcatgcttcagacttgtggccagcatataatcgcctaccagtacggaaactttattattgtagattgcgtttacagaagactgcccccgacgcttatcactctcatctaccacatcatcgtgtaccagactggcggtatggagcagttccagcgacaatgccgcatgaaaggttgactgatttaatgtaccgaacaatttagccgtcagcatcaccagaataggacgcatcatctttccgctccgtttcttgatgtaagccaacacctctcccaaaagagggtctgtactcgtcaaagagttttcaaaaagccctctgaattcctctaattctttttctacaggctgctttattaagtcaattttgttcatgtacatttatttaggcccacaaaagtaataataaaagactgaataccgtatttttttgtacttttacatgaaaaaacttaatatttttacacgaatggagaagctatttctattagacgcttatgcactgatttaccgtgcttattacgcctttatcaagaatcctcgcatcaattcgaagggtttcaacacctctgccatcctaggatttgtcaacactttggaagaagtgctacggaaagagaatcctactcacatcggcattgccttcgacccgtcgggacctacgtttcgccacgaagcctatgaagcatacaaagcacagcgggaagagactccggaagctatccggcagtcggttcctgtcataaaggatattatacgtgcctatcatattcctattttagagattgccggatacgaagctgatgacgtaatcggcacacttgctacggaagccggcaaaagaggcatcaatacctacatgatgactcccgacaaggactacggacagttagtgagtgaacacgtgttcatgtatcgtcccaaatacggcgacaaagatttcgaagtgatgggggtggaagaggtaaaagccaagttcgacatccagtcgcccttacaggtcatcgatatgctcggacttatgggagatacggccgacaacattccaggatgcccgggtgtgggagagaaaacggcacagaaactgatagcccagttcggcagcatcgagaatctgttggctcacaccgacgaactgaaaggtgccatcaagaagaaggtggaagaaaacaaagagcaaatcacgttctcaaaatttctggctaccatcaaaacggatgtgcccatcgcactcgacatggaagtactgaaaagagaagagcccgatgaagaggaattgcgccgtctgttcgaaatgctggaattccgaagcctgattgaccgggtaatcaaaacagaaaaaaaagctccctcctctcctgccgctcaacccgatctctttggcttttttgcggaggaagatacagctgacgccaaaaattcaattctcacgaggttagaagacctgccatacgactatcaactcgttgataataaggagaaaatggcggttttggccgaaaaattacttgtccagaaatttttcagtctagacacggaaaccaccggaatcgatcccatcacggcagaactggtgggaatgagcttcagttttgccgaaaaccaggccttttatgtaccggtaccggctaatcgtgaagaagcccttacaattgtgaatatatttaaaccatccttcgaaaatccagattcgctcaaaattggacaaaatatcaaatacgacctgatcatgctggccaattacggagtgaccctgaagggaaagatgttcgataccatgattgcgcattatgtgctgcagcccgaacttcgtcacggcatggactacctggccgagatttacctgaaatacgaaaccatcaaaatcgaagagttgattggagcaaaagggaaaaagcaaggaaacatgcgcgacctggctcccgaggcagtttacaaatatgcttgtgaggatgccgatgtaaccctcaaactgaaacaggtactcgagaacgaactggagactaacggagtcaaaaaactgttcgaagagatagaaatgcctttggtgccggtattggcttacatggaaagaaacggagtacgtattgatacggaagcactgaaagaaacgtcacgacattttacggcccggatgaaccagatagaagaagaggtacaccagctggccggaatggaattcaacattgcctctcccaaacaagtgggtgaagtgttgttcgaccgcctgaaaatcgtggaaaaagccaagaagacgaagaccgggcagtatgtcacttcggaagaagtgctggaaagtctaagaggaaagcatgaaatcgtaggaaagattctggaacatcgcggactgaaaaaactgttaggtacctacattgatgccctaccccaacttatcaatccggctaccggacgcatccatacatctttcaaccagacggtcacagctaccggacgactgagttctagcaatccgaacctgcagaacattcctatccgcaacgaagacggaaaggaaatccgaaaggctttcatccccgacgaaggaagcgaattcttctcggctgactattcacaaattgagctgcgcatcatggcacatctgagcaatgacccgcacatgattgaagctttccaaaaagaccaggacattcatgcagctactgccgctaaaatatataaggtaaaactggaggaggtgacacgcgaacaaagaagcaaggccaagactgccaatttcggtatcatctacggaatttcagtgttcggactggcagaacgtctgaacgttgaccgcaaggaggccaaagcacttatcgacggatactttgaaaactatccgaatgtaaaggcctatatggaccagagcattcaggaagcacgcgaaaaaggatacattgaaaccatcttcaaacgcaaacgctatctgccggacatcaactccaaaaatgcagtcgtcagagggtatgccgaacgaaatgcaatcaatgcccccattcagggcagtgccgccgatattattaaggtagccatgatacgcatataccagcgcttccaggaagaaggtatccgctcgaaaatgattctccaggtacacgacgaattaaacttcagcgtcttgccggaagaaaaagaaaaagtgcagcaaattgtgataagcgaaatggaggctgcttacaaaatgaaagctccactgcgtgctgaccatggttggggacacaattggctggaagcacactaagtcatccaaattgttaacaaatgtttaattagtgacattttgctaatttgttgcattttttttgccggaatgcatacaacatatcaaagcttttactacatttgcaccgtcaaaaagaacaaaacgtaagtaaaaccttaaaattagaaagatatgaaaaagatgaatttagcaaagtgtgtagttgttttagttataacttttgttgcaagcttgtcaacttatgctgctaaaatgaataacaacctgatttacaatgcgcaagaagttaacggattgaaagttgcagaaactgtatacaagaaagacggtaacatgctgacaaactacatgaagtataactacaaatacaatgacaacaaccagatgactgaaaatatgtcacagaaatggaatgtaaacaagaactgctgggaaaacgatttgtgtatccgttatacatacgacaacaagagtgtaactacagaatactacaaatggaattccaagaagaatgatttcattctgattcctgaaatgactgttacaatggacaaatgattaaataagaaaattcataaactctcttttacaaaagaggcacttcgtgatgaagcgcctcttttttattttccaccgacgaagtctgccaaaattgccgctcattctgtagaagaataggcaggaacttaaaaaataactatctttgcagagaattagagtattatgcatctgaaaatagattaaaaacaaactataaattatggcattacaatgtggtatcgtcggtttgccaaacgtgggaaaatcgacacttttcaactgcttatcaaacgcaaaagcccaggcggccaacttcccgttctgcaccatcgagcccaatgtgggcgtgattacggtgcccgatgaccgtctgaacaaactggccgagctggtggaccccgaccgtatagtgcccactaccgtggaaattgtggacattgccggactggtgaaaggggccagcaagggcgaagggctgggcaacaagttcctggccaacattcgtgaaacggatgccattctgcacgtgctgcgctgcttcgacgatgagaacgtgacgcatgtggacggcagtgtggacccggtgcgcgacaaggaaatcattgatacggaacttcagctgaaggacctagaaaccattgaaagccgcattcagaaggtacagaaacaggcgcagaccgggggcgacaaggtggccaagcaaacgtatgaggtgctggttcgttaccgtgaggcgctgttgcaaggcaaatcggcacgtaccgtgcagtttgaaacgaaagacgaacagaaaatagcacacgaactgttcctgctcacctcgaagccggtgatgtatgtgtgcaacgtggacgaagccagtgccgtaagcggcaacaagtacgtggagcaggtgcgtgaggcagtgaaagaggaaggtgctgaaatcctgattgtagcggccaagacggaagccgacattgccgaactggagacgtacgaagaccgccagatgttcctgcaggaagtggggctggaagagtcgggcgtgagccggctgatacgtgcggcctacaagctgctgaacctggagacgtacttcacggccggaaagatggaggtgcgtgcctggacgttccacaagggatggaaggctccgcagtgtgccggtgtcatccacacggattttgaaaagggatttatccgcgcggaggtcatcaagtacgacgactttatccactatggctcggaagctgccgtacgtgaggccggaaagctcaacgtggaaggcaaggaatacgtggtggaagacggcgacatcatgcacttccgtttcaacgtataatcaacttatttatcaagcacgggcttacacgctccgtgcttgtttttctttataacttttttcaccatgaattatctcatcatcggaacgggcggtgtaggaggatgcatcgccggctttctggcactggcaggcaaggacgtgacctgcattgcccgcggaaagcacctggaagccatccgccggcaggggctgcacctgaaatcggacctgaagggggagcatttcctccccgtaaaggcatgcaccgcagaagaatatcagggaaaggcggatgtcatcctggtgtgcgtgaaaggctattccattgactccatccgccccgtgctggagcgtgcggctacccccgacaccctggtcatccctatcctgaatgtgtatggcacggggccccgcatcggccgcctggtgccttctgtcaaggtgctcgacgggtgtatctacatcgtgggcttcgtatcgggcgaaggggaaatcagtcagatgggcagcatcttccgcctggtgttcggtgcgcgtccgcagcagcaggtggcgcccgaacggctggagaagattgccggcgaactccgcgagtgcggcatcaaggtggacgtgtcggacgacatcaaccgggatacgttcatcaaatggtcgttcatctcggccatggcctgcacgggtgcctatcacgacgtgccgatgggcgaggtgcagcacgagggtgaggtgcgcgacacgtttgtcggcttgtcgcgtgagagtgcgcagattggggagaaactgggcatcgcctaccccggcgaccccgtggcctacaacctgatggtgattgacaagctcgacccgcacagcacggcttccatgcagaaggacattgcccgggggcatgagtcggaaattcagggcctgctgttcgatatgattgacctgggcgcacagttacacattgacatgcctacctaccggaaggtggcgcaaaaattccagcaagcatgaagcatcttatcgatattgacacctgggagcggaaggagaactatcttttcttccgcgatttccataattcctggattgccatgaccagcgaagtggactgcacggaggcgtatgcggaagcgaaggcacagggccgttccttctttctgtattacctgtacgccattcttcgtgcggcgaatgaaatcaaggagttccgttaccggtgggacaagcacgggcaggtggtttaccacgatacggtagacatcacgacgcccatcgccgtgccggaaaagacattctacacggttcgcattccctggaacagtgatttcaaggctttctacgaggaagcccggcgcatcatcacttctatcccggaggacggagacccgtacggcaccgacaaggagattgcggctcagggcgattttgacgtcatcctgctcagtgccacgcccaagctgtactttacttccatctcttacacgcagtatgccccgggccatccgctggactatccgctgatgaatgcgggcaaggcggtgacacgtgagggaagactggtcatgcccattgcgctgaccgtaagccacgcctttgtagacggggcgcacatctcactgttcttcgagaaggtagaaaagtacctgaaggaaagataaacctgcttcttaaagaatattgttatgacaaagaaaacaagctggttcctgtctgtagccgccactgtcatcgtactcatagggggcagttacgcggcgctgcggcatagccggacgcaggtgcatgcccttatcaatcaatccttgcaggaagccgaacgccttcactacaacgaccgtctgaatgcgttcagcaggaacccgcacatctacgtagacccggccctgaaggcttatcttttcgcgcccgtctccagccggaaaatcaaaagctatacgctccagactacagaagggaaaaccacttacctgttcaaggacagcatcccggaagagaaagcccggaaactgctgaacgaatacctgctggcagacatacagcctgtcagggtggaggaagtgaaccggttgtttcaggaacagctcgagaaaaaacatgtcagcggaacggcgggtgtgttttattccgacaagtcggcccgcacccgcacacgggcaggcatcttacccacgtcctcagcctataagactccggtctgctcgctcgacctgactcacagcctgcaactgcaagggtgggcggactacgactggctgaccttactccgccatatccacgcgggcttttacgggctgctgtgcctgctgcttgcggccacaggtatacaagtctacctttacctgaaaaagcggcaaaataagcctgaaaaagggctgtacatcgacctgaagcagcagatattgctgatcgacggcatgcagtgtgccatttccagcctcgacttgcagcttctttatctgctatgggaaaagaaaggagaatgtgtgaaccgtgaagacttgaaaacggcttgctggccgcacgacccgcaggcggatgagaaattagacgcgcatatacaaacaatccggaaagtcctgcaagacttcccggattatcggatttccactgccaaaggacggggatattatctgactgctgcctcctgttaaggattctgcaccagattaggattggcgtctatttcggtctgcggaatggggatggccagacgcgaatcattcggctggatggtataagcattggaagtctccagcgaagtcaggtgccagcttcccttacgcaccacgggcaatttattacgcgtataatcgtacactgccaggccctcgcccaccagttcctttcttctttctttcagaatgcgctccagagtgaaatcggcagcggcatttactttcatggcggtattcgtggtacggttggtaatcacgtcgttcaggtattccattcccttggtcgcctgctcgccccctattttcagacctgcctcggctgcattcagataaatctctgacagacgcacgatgcacaagttgttgtcgcgcggatcgccggtcttgccggggaacttcgccagatagactttcttgtcacgggcgccttcgggaagaccttcattatttgctatggcagatacttctgtcacacagtggcgcacatcctgcgggtcttcattcagcaagttcaggtagtcttccgacagtatcagattgttccagtccactttttcctcattggcatagaccataggagctccttctccacccgaaccaccggaaggttccgtcagcgagaagtagaattcgaaaagcgattcgctggtgtattcttttccccagacagtaggatactcgtcaagggtgtacaactgatacaggcttttactgttttcgatgacatctgtggctgccttgtaggcattcggataatccagcttgttcaaataaactcttgacagaataccctgcacggcccagtagttcagacagccgtccttcttctccttgctaaggccggccagcgagttggtcaagtcggtaataatctggtcatagcattcggccaccgtattgcgtgctggcttcgaagactgatcagtggctgttgtaacgataggcacccctaatgactggccgttatcatacgaataaggcatggcaaacacgcgtataagatcgtataaagcaagccctctcatggccaaggcctgagccttaatctcattcagagcagcctcatcagtagtttttatcaacccactttcagttgcagctatcagattgttggtttgtcgaatcactttatagacctgattccacggcaggcttgaattaaaactgtcagtagccttcacgttatactcataataaggtgaaaccctacgtccgtctcctttcgtcatacgagcctgcacatccgcagcccggcaatcgccaaaataaaagaaattgtcaccataataactatgtgctgacgccagcctataaatgccgtttaatgcgctttgggcatcttccaaagaagagaaagcctggtcggtgggtacggacgtggacggattcaggtccagccagctgtccgaacaagaggtacatgccagtgaggcggcaagaaaataaatatagagtggtttcataatcaaattcgtttttagaaagttaattgtacgccgaagttgaaggtacgcatggcaggtgcctcgcagaacacttctccgttgaccggagtttcggggtcatactgtttccatttagcccatgtcagcaggttgctgcctgagaaatagatgcgggctttgtctatcagggccttgcgggtccattcggaaggaagcgtgaatcccagcgtaaggttcttcagacgcagatgatcggtactgtgaatatagcgcgaagagttctgaggtccggcatcttccccatacacaaagcgcggtacattggtctggtcgcccggctcctgccaacggtccatggcatataccggaagattatatcttgaatcataaatgttcttggtaccattctctatataggtgccagttttatcataagaatatccgcccaaggaataggtcagcgtaaagctcaggtccagccatttgtagttcagcatgttcgtcagaccgccagacactttcgggttaaccgacttataaggaatggcctgcgcctcactggcactctccgtcaggctccggtctacaatcaccgaaccgtcttcctgaggtatttcctggttacggtaatacatggccttacctgtatccggatttaccccggcgtattcttttacgtagaaggtgtagtagggcaatcctactttgtggatgaaccatgtgccctcgattgactgctccagctgtccgttgagtgacacaatcttgttcttgttgtgactcagattgaagaccgtggtccagttaaagttgtcattggcgaagttgatggtacgcagttccagttccacaccccggttgttcaactgtcccacattgctcaggtagttcgtaaatccggtggtggcactgataggaaggctgtacagcaaatccttcgtatcgcggttatagtattccacgctcaggaaaatgcggttgatgaacgacacgtccagtcccacgttcaggttatagttcttttcccatcccaagttggggttggagatagaagattcataagaacccaaacctcccatatagctttgtcccaaagaatacaatcccatatagccatacagagagcctggctggttaccgttcacaccgtaagaggcacgaatcttcaaatcgctcagaatgtgcttcacaggctgcatgaacgcttcgttgctcacatgccacatacccgatacggaccagaaatttccccagcggttatcgggtgaaagacgggaactaccgtcgcggcggaagcttcctgccacataataacggtcgtcataatcgtagttcaaacgtgaaatatacgacagcatacgataatcctgcgttgatgaaacgaagctgttcaacactgctccgttatcaggttcagtaagccctacatacgacggcaatttggaacgttcgccggatgccttatccgtctggtagctttccacttcatacgcagccaagacatccaggtggtgcttctgcgcaaaggtcttcacgtaattcaccgaagtagaagaaatcagcttcccatattcgatgaatcctttggaggactgtgcatcggaaccgctcttcggtcctgcagaactcaacggattgtagtagcgcgagtccttctggatggtataatcatagcttaacgtttcctttattttcaggccctttatcggttctacagccgcatagccggtggagaacatacgcgtcatccgcgtgcggttatagtccgtcagaatatcacgcagcgggttcaactgtgtaccgtcgtacgctcccacataatttccggcttcatctctcaccagcatggaaggagtcatggtcattgccacacacaaatacgggttgatggcagagccacgctcttcgttcatctcctggttcatctgggtaaacatcatgttggcgcctacctcaccgtaccggcctaccttctgggtcatgttcagacgggcggagtagcgatccaggctggagttcttggccagtccttcctggctgttatagcccaaagaggcatagaaagtggtcttctcgtttcctccggatacagatgcctcgtaatcctgctggatggcggtacgaagcagttcctttctccagtcggtatagcccatggaaggcacagacgcatacttgtcaatctcaccgtctgcatagccggtagggtctgccatctgcttgtcagtagcgtagttcaccaggccctcgtacaacagttcacggcgctggtcgccgttcagtgtcggacggaaatcaaccgccgcattcgagaaacctcccgacatgttaaaggaaacctgtgccttgcccgcctttcctttcttggtcgtaatcaggattacgccattggctgcacgcgaaccatacagagaggctgccgccgcatccttgataatcgtaatgttttcaatatcggccggattcagcgtgctcatgatattggttttggagttgttcatataggccgcatcggctcctccggcactcaggctaccggaagtgaccggcaccccgtcgatcacgaacagcggttcctgagaggcattgaacgagcccataccacggatacgaatgctctgattagctcccggctgtccggaactgctggtaatagacacgcccatggtcattccctgcagcttctgctccacgctcatcacggggatgtctttcatcatgtctcccttcagggtattggcagaccccgtaaaagaagacttggtgaaattaccgtatcccgtcaccaccacctcttccaggttcatggtttcaggctggagcaccacgttcaggtgttctttcttaggaacctttatcaactgagttttcatacccaggtaagccacgaccagaatcttgtcatccggtcccacttccaatgtatactttccatcaatgtcggtcactaccccatgcgcctcgtttccctgtacggaaatcgtagcaccgataagcggctcgtgatcttcagctgagataaccaatccgctgatggtacgctgttgtgcaaaagtctgttgacacaccacacacagcagcaataaaactaaaagtctgattctttgcattttgacgatttttgtttgtaattccgtagaatacttcgcaaaacacacgccaaaaacagcctttttatactttaatttttaaaaaattgattacaagaaagttacacgcgattaagaaaaagaaaaggctgtggaatttctgcacatttgtagaaataatccacagccttttttctgctttatttactgttcagatagtcacacaacttctgtacggctcttgcccggtgactgatcctgttcttttcttcagcccccatctccgcaaaagtctcggcatagccttccggcacgaacaccgggtcgtagccgaagccggagcttccttttttctcccgaatgatttctcccttcacaatgccttcgaacaagtgcttttctcctccttctatcaggcagatggccgtgcggaactgcgccttccggttctccttgcctttcagttctgccagcagcttcttcatgttggcttccgagtcgtgaccttcaccgcccgcataacgcgccgaatacactccgggagccccgtccagcgcttccacctccagaccggtatcgtcggcaaagcaatccatgccataatgcgcatgaatatattccgccttcagcgcggcatttccctccagcgtatccgccgtttccggaatatcggcctcacaacggatatctttcaaactcagcacttccactttatctcccagaatggcacgtatttcctcctgtttatgggcattgttagtagcaaaaaccagtttctttttcatgttgaactttttcttgacaattatacatttctgcgcaaagatacacatcgcccgacagtatttcaactaacggccccaaaaagccgataaaaaaagcctgatcttccctcaggagaccaggcctttatcacgaaggctatgcgccatcagttcaatacgatttcatctacaaacaagaatccgggattgcccttaccgccgtgccatgccgggatattcttttcggacaaggccgttaccttcacgtaacgggtctttaccgggtcaaacgtcagggtatgggtataaatctggttggcatccgtttccttcatagccggataagcttccgaagccactttcttgaaagtcttgttgtcgtccgacacctctacggtaatacctctggcatcaaacgtccagtcgcccttttccacgcaagtgcgcagggtcatggaactaatttcggtagcctccttcaagtcaatcaccgcctccatgtcattcttgtagaaagcaatccagcgtccggtcttgtagttgcggtcgcccgtcataccgtctaccagcgtagtggcgcccttaaactcgtaaggcttattgataggctgcaacatagtgataggtttcgccgtagacttgctgaacgcaatgctgtcacgcgtaatgcgcgagttgccttccggacgcacggccatcatgcgcagcacacatgccgcatcaatggtcagtccgttttcatacttggacgaagcagtggtaggttccgtaccgtcgagggtatagtacacaggtgcatcgtcgatggtgcttgccgttacatccagcttgcccgtttccgtgttgggagcgatgttcacattcacatcgaagatatgcgtcgcgtagttccatcccttcagctgataaatctttgtcagacgagccgtacgtttcaggaatccctgataatcctgcttcttttcaggagcgctccactgcgtttcacaaagcgcagccatacgcggcaataccatgtactgtgcctgtgccatggtcgggatatattccgtccagagattcgcctgcacaccggtaatgaacttctgttcttccggagaaagggcagacggcatcggttcgtagctgtacacccgttccataggcagatagccgccgatggccagcggttcactgtccgtatcctttgcctgataatagtcgaaatacaggtacgtgttcggcgtcatgatgacattgtgctgctgacgggccgcttcaatgccaccggcttcccctctccacgacatcaccgtggcattcggagccagaccgccttccaggatttcatcccagccaatcatgctgcgtccgttctcggtgaggaacttctcggcctcgtgtatcacgtagctctgcaggtattcctccttcgagtgcttgctgtcgcccttgatgcccagcgccttgatacgtgcctgacacttcggacaagtctcccacttcaccttcggacattcgtcgccacccacatggatgtattccgacgggaagatgtcgatgatttccgccagcacatccttgatgaactggatggtcttgtcgttacccgcacaaagcacgttgtcggaaataccccacatgcgccatacttcatacggaccgcccgtacatcccagttccggataagccgccagcgccgcctgcatgtgacccggaaggtcgatttccggaatgaccgtgatatagcgttctgccgcgtaagccacgatttcccgggcctgttcctgcgtatagaaaccgccgtaaggcttgccgtcatactcacccgagttacgtccgatcaccgtctcgctgcgtttggagccgatttccgtcagcttgggatacttcttgatttcgatacgccatccctggtcttccgacagatgccagtggaagcggttgatgttgtgcaaggccagcatgtcgatgtacgtcttgatttcatccatgctgaacatgtgacggcccacatcgagcatcataccacggtagctgaagcgcggcgagtcgttgatttccactgccggcagttccactgctccggccccctcatgcaccgacaccgacttgcggagcgtctggatgccatagaacacacccgcttccgaaggagcggaaatctccaccttgcggtcgtccaccttcagccggtacgcttccggagaatcagcctccagccccaggcggagcacgatgccctcttccccatcaccttccgccaccttcagcgcgatgccggtctgttccttgataaaagccgccaggaactcggcgttcttcttcatcttttcattccctgccgtatagcagatagtttccccgctcttcagcaggaacgaaccctgcgatgccgccgtaatctccagcggcatgggcaccacctgatagtcggccaccgccgtcggactgtccgcacacgaggccatcagcattccggcaaatgccagccccatacaattcatttttgaaaatggtttcataatcaatacatataaaagattagtaatcagattttattccctcacatcggccagctggtgaatcaccacggaaacgtcctccagcggagaaccgtcggccgaagacaccgtgatgcgcttcgtctcgcccggcagcaggtcgaagaaattgtcggagaaacgcgccccctgcaagggcacctccacgaacacgtcgcgcgccagcacacgcgatttcagcgtcagttccaccaccccgcccttcttcaccttacggcaggcaatttcagccctaggcaggcgttgctccttgggatacaccggatagaacacctcgtccgaaagtaccttctttccgtccgcacccctgagcgtcatgcggatgaacgaagccgtagtgtcacagccctcaaacgccttctgccagtcttcttcaaagaacacctccgaagcatttaccggcagcatcccttccacccgatggcggcgcatcacccttccctgaaagtccgtcagcgccaggtgcagcgtcacgttctccgtctgcaggcagtcggacagcacataaaagcgcagcttgtcgccctggcggatggcatccaccagcacgggcgcaaaggcacggcgcgtgtgatactgcatggccttccagttgccgtaataatcgatggccgaccacgacaccacgggccagctgtcgttcagctgccagggcaagctgcccatgcagtacggacgattgcggcggtgcgccaccatgccccggcgcatgccgtggccctgcagcaccagccccacgtacaccaggtcttcaaacttctccggcaccggataatacaggctcatggttttcttaatcaaggcattccctatcgtgctcttctgatgcgcattcattacgggcgactccagctcataatcctcgggcgaagcaaaggtgcggatggtcttcatctccggaaaggcctgaaagccgtactcgctcatgaaacgcggtatctccttatctaaactctcgaaaggcttctgcccgtaccacgtgccccagttatggctgtcgcccaccttccagctctccggtctgccccagttggcctccagcggcgagccttccaggtagaagcgccccggatcaaattctttcaccttctgcggcaaaagctgacggaacagcacgtcgtatccctcctgcatctgctgatagacctcggacgaatatttctcctcccatccccagtagcgtataccctcgtatatctcgttattaccgcaccacatggccagcgacgcatggttgcgcagacgatgaatgttatattccgcttccgcttctacacgacgcagaaaggccgggtcatggggataagtggtgcaagcgaacatgaagtcctgccacaccagaatgccgcgcctatcggcttcctcaaagaacgcatcgtcctcatagataccgccaccccacacacgaatcatattcatattggatgactgcacatcctccaacaaacggctgtagcgctggcgcgtaacacgcggcagcagcgcatccgacggaatcaggttcgtacccttggcaaacatcggtaccccgttcacttcgaagtagaaactctggccgtccttgtcttcctcctgcactacacgtatcgaacgcaggccaatctggtgactcttctgtgacaccacctgcccgtctaccgacactgaaacctcaaacatatacaacgcaggctctccccaaccgttaggcatccacaaatgtggctgctccactgttacaggaagagaaatatgattaagtcccggctgcaattccaccgtctgctccacgttcttatctggttcacccgtataactgtacgtcacacgtaccacagcctgctgtgtatgattgctaatattgtttatttctaagcgattgtctacctctgcccgttcggcgctgactgactgctggtgcacgaaataatcttccactaccgcccgatccgcaaactgcagatacaccggccgccaaatgccacaagtcaccatacggataccccagtcccatccataggaataaggtgccttacgagtaaaaatacttagcttctgtggataatgatcattatcagccggataatcaaacccgttactctcccattgtggcatcgcttcccgaatgggcgaacggaaacgtactacaagcttgttttctccttttcttaaaacagacttgacaggaacccgataccccacaaacatattatctgctttcagcagcaaagaaccgtttaagaaaacatctgcataggtatcaagcccttcaaaaaccaaatacaccccttcatgatgcagctgctcttctgtcaatacaaatgaagtgcgatacaaccagtcttccttttctacccattgtattttctgctcattcatgccataaaaaggatcaggcaatttatcatgagctatcaggtcctgatgcaccgtgcccggcacctgtgcagacaaccattcattagtaccgtacattgaaaattcccatccagcatgcagctgatggatttgagataaactactgcccgacgcatgatttccataagtcagtaaaaaggccagtaacatcatcagagtgacttttgacatatttttcacgttatagattcaagtatcgtaatatcagatacaaaataaaataagtttttccgataagccaaattaatcgaaaaaacttattttattttagttttttaagggaaaagtttattttactttaagcttatcaaagccttcaccatatactccaactacattgctttgtgaaatgaaggcattcggatcaatatcctttactaaccggaagatatcgagtgattcccgttttttagccaaaaccactactacctttatttcctgtttgctgtaccatccttttccatcaagtaaagtcaccccacgatcaatctttgtcgcaatcccctcggctatttcctcatatttgcgtgagaatatcaagaactgcacagactgacgcgtactgttaatcacatagtcaatgacgatactcatcacaaacaagacacaaaagccgaacaacaccctacgccagtcgtgaaaaataaaataacaggatgaaatgattacgatgtcacaatacatcatcatccgccccagcgtaacatccttatatttattaataatccaggctataatatccgttccacccgtacttccattgttacagaatacgataccaattccaaaacccagcagaccagcacctatcacacaagccataaaatcctgaccaggacctagcaactgaggaaggtttccactctcatcttttaaaatcatctgaaagaaccagagcaggaaggtcagcataaaaatggcaaagatggtcttaatactaaatttaggccctaaaattttcaaggcaaaacccaggaatatagcattaatcacaaaataagagacctgaatctctatgcctgtggcataatagataattgccgcaatacccgttacccctccggtagtaatctgatagggaagcataaatgcagcccagccaatggaataacaaatcagcccgaaggttatggccaaatagtctctggactcccggcccaactttttctttaataaagcttccatagacaataaaaaacaatccggaatgaacaggaggtacctcctgttcattccggacgagcatttaataggttaaagtacaatgtttacaattttcttcggtacaataatcaccttcttcggagtcttgccctcaatccacttctgtgactgttcttcagccagtacagcagcctggatggtattattatctgcatcggcagggaactccattgtaaagcgagccttaccattgaaagaaatagtatattttacactgtcttctttcaaatattcctcattgaattccggccaatgtgcatcgcatacagaagaggtattgcccaaagcttcccacaattcttctgccaaatgcggagcaaacggagccagaagcacaaccagattgctcatcacagccttgttgcgacatttcaatgaagtcaattcattgacacaaatcataaaggcactgatagaagtgttgtaagagaaggtctcaatatctcctgtcaccttcttaatcagtttatgaatggctttcagttcttctttggtagcttctccttcaacaggcaagaaagcaccctgacggtcatagaacaaattccaaagtttcttcaggaagcggtgtactccgtcaataccattggtatcccatggcttagactgttctaacgggccaaggaacatttcatacatacgcaatgtatctgctccataacgttctacaatcatatccgggttcaccacgttatacatggacttactcatcttttcaaccgcccaaccacagatatacttgccatcttccaaaataaactctgcattatggtattccggacgccagttcttgaaggcttccacatccagtacatcattcgatacaatgtttacatctacgtgcaacggagttacttcatactggtctttcaatcccaatgacacaaaagtattggtatccttgatacgatatacaaagttgcttcgtccctgaatcattccctgattcaccagtttttggaacggttcttccttgatgctgatgcctaagtcgaataggaatttattccagaaacgagaataaatcaagtgaccggtagcatgttccgtacctcctacataaaggtctacattctgccagtaatggtctgccttctcagaaaccagcgcttcattgttatgcggatccatgtaacgcaaataatatgcgctggaaccggcaaatcccggcatggtattcaattccagagggaatacattcacgttatcaatcttcgtgttttctactacttcacctttggctacatcccacgcccaacggattgcgtgtcccaaaggaggttctccgctttctgtaggcaagaacttagcgacctcaggaagttccagcggaagcttgctttcgtcaatcatatacggcatgccgtccttgtaatataccgggaacggttcaccccaataacgctggcgagagaaaatcgcatcacgcaaacggaagttgactttcacacggcccagattatgctctttcacatatttcttggtagcagcaatggcttctttgatagtcaggccattcagcgtcaaatcgcaataaggagttccccccgctttcggagagttgcaaacgattccttccttcgcatcgaagctttcttcgcttacgtcacaaccttctaccaacggtacaatcggcaagttgaaatgtttggcaaatgcatagtcacgactatcgtgcgcaggtaccgccatgatggctcctgttccataaccagccaatacataatcactaatccatactggaacagattctcctgtaaacggatttactgcatacgaaccactgaacacacccgttacacgacggtcagcaatacgctcacgttctgtacgcttctttgtacggtccaaataagcctcaacttctgcacgctgtgcttcggttgtcagcatcggtaccaattcactttcaggtgcaagtaccatgaaagtcacaccgaacatcgtatcggcacgtgtagtaaagatggtaaattccaaatcgctgtcttttaccttgaaacgtacttcagtaccttctgaacggccaatccagttacgctgagtctctttcaaagaatctgtccagtctaccgtttccaatccgtcaagcaaacgctgtgcataagcagacacacgcaaacaccactgacgcatctttttctgcaccaccggatgtcctccacgttcagataccccgtctactacttcatcgtttgccaataccgtacccaatgccggacaccagtttaccatggtttctcctaagtaagcgatacggtaattcatcaggatttcctgctgttccttttctgtcttagctttccattcttctgcagtaaaattcagttcttcgctgcatgccacgtccagcccttttgttccttcagcctcaaaatgagcaatcagcttgctgataggctgtgctttctggcatgaattgcaatagaagctgttgaacattttctggaaagcccactgtgtccagtgataatatccaggttcgcacgtacgtacctcacgatcccagtcgaacgaaaagccaatcttgtccaactgctcacgataacgtgcaatgttagctgcggtagtaacggccggatgctgtccggtctgaatggcgtactgttcagccggcaaaccgtatgcatcatatcccatcggattcaacacattgaatccttgcaaacgtttgtagcgtgcataaatatcactggcaatgtatcccagtggatgacctacgtgaagtcctgctcccgacggataagggaacatgttcaacacgtagaactttttcttggattcatcttcgacaactttataggtcttgcgttccacccatctctgctgccacttcttctcaatttctctgaaattatattccatagcgaaatattatatgattgattattacgtatttctccaatttctccgcaaatatagtaagagttcaggaataaataaggatagtttcgaacgaaaagtttatctttgcttgataaatgagaacctaatcttagaaatctatgcacatccgtaaattctttctgctcgctactatcctctgtagtgtatgcagtctcaacgcacagcgacatgaacaactcttggaaaccggctggaaattccacaaaggagaagccaatggagctgaaactatttcatttaatgattctcaatgggaatctgtctgtattccacacgactgggccatttatggaccgtttgaccgtaataatgatttacaaaatgtagccattactcagaacttggagaaacaggcatctgtcaagaccggacgtaccggaggacttccttatgtgggagtgggatggtatcgcacccgtttcgatgcagaccctgataaaaagacaacactggtttttgatggagccatgagtgaagcccgtgtgtatgtcaatggaaaggaagcctgcttctggcctttcggttacaattccttccattgtgacattactgagcttctgcacaaagaaggaaaagataatgtattggctgtacgtctggaaaaccgtcctcaatcttcccgctggtatccgggagctggactttaccggaatgtccatctcattactgcagaaaaaatacatgtaccggtatggggtacacagattaccaccccacacgttgctaatgactatgcttcggtttgccttcgtacctctttacagaatgcaggaaaagaagaaattaccatagaaacagaaattctagacccgaacggaaaaagagtttctttcaagaaaaacagcggacgcatcaatcacagacagccgtttacacaaaatatcattgtggaaaacccacaattgtggtcgcccgaaacaccgttcctatatcaggctgtatctaaaatctatgccaacggagagcttacagatacttataccacccgctttggtatccgttccatcgaatttgtagccgacaaaggctttttcctgaacggccagcaccgtaaattccagggggtgtgcaaccaccacgatttaggtcctttgggagctgccatcaacgtatctgccctacgccaccagcttacactattgaaagacatgggttgcgatgccattcgtactgcacacaacatgccggcacccgaacttgtcagactctgcgatgaaatgggattcatgatgatgattgaacctttcgatgaatgggacattgccaaatgcgaaaacggataccaccgctatttcaacgaatgggccgaaaaggacatggtaaatatgctacggcaataccggaataacccctgtgtagtgatgtggagcatcggtaatgaagtgcccacccaatgcagcagtgaaggatacaaagtagccaagttcctgcaagacatttgccatcgggaagaccctacccgtccggttacctgcggcatggaccaggttagttgtgtactcgacaacggatttgcggctatgctcgacattcctggattcaattatcgcgcacaccgttatgaagaagcctaccaacgattgccccagaacctggtgttaggctcagaaacctcttctaccgtcagctcacgcggtgtatataaattcccggcagaacgtaaagccgatgccaaatacgaagaccatcagtcttcttcttacgacctagaatactgctcctggtctaatattcccgatatagactttgctctggctgatgactaccaatggactttggggcaatttgtctggacaggctttgattacttgggcgaacctagtccatacgatacagacgcatggcccaaccacagctccatgttcggtattattgacttagcttccttgcccaaagaccggtactatttataccgcagcgtatggaacaagcaagctgaaacacttcatattctccctcattggaactgggaaggcagagaaggaaaagaagtacccgtatttgtctataccaattatccgacagccgaacttttcatcaacggaaaaagttatggaaaacagacgaagaacaaccaaagcgtagaaaaccgttaccgcctgatgtggcacaacgctatttacgaaccaggagaagtaaaagttgtagcatacgatgagcatggcacagccaaagctgaaaaaatcatccgcacggctggaaaaccacatcatattgaattggtttcttcacgccagtcactcacagccgacggaaaagagttggcatacgtaaccgtacgtgttgtggacaaagacggaaatctctgccccacagacatgcgcttggtgaaatttaaagtaaaaggagccggaagctacaaggcctcagccaatggagacccaacttgtctggatttgttccacctgcctcagatgcacgccttcaacggcatgctgactacaattgtgcaatcaggaaaagaagcaggtacccttgagttacaagtcactgcaaaaggcctgaaatcaggaaagatacaaatcgaagtaaaataaccctcaagacaacagcggggaaaagcaggcacttcatacctgcttttccccgcttatatttttccacagcctgctatctgttcaagttttccttaaattcaacttctacaatacgaagttcatgattggttttatctccatctttcgccttaaacaaatctaattcattggctactggagcagccacttccacaatctgtccaaaggcatcatcctctttacttgaacccttcaaccggatagttatttcagaagcaggaatcggtttcactttcagatgaacgtaacccagacttttttcagtttctccgctccaaatcagttcatcgcccgcataaatttccaaaggataactgcgcatacgccatcctgtaagtttcatacatatctcatccacacgcgctaccctttcaagatgatacttaatccatgcagtagaagccttcccatcatttttccattcactcaattcattgtcatcaaaactcttacaagtttcctccgtatttattccagcctctgcagaaagtacagccacatccaccgcacgctctacataagaaggagataaaggtgtttctccacgatctaaacttccttccaaatcgtctccaggaatatatgtactcagtccattttgtacttctacaggagaagaaaccagttccaatgaagcggaagccaatccttctgcttcagctcgtacaactaccttccctgctgtaacagacgagcgcaataacgcacggttcaccccacattccacgggaagtttttccgacaagatataattatctgggccttgcgctatacctcctcgccattctgccggaccttctaccgtaaaatgaattaaattattcgccagcggacaacgatttccttctgcatcagcgacctccacttgcaacaacaccaaatcggctccatcggctttccatcctttcggattctgaatggcagataatttcaatttagcaggtttacctgcggttcttaactgcatgcgcgcaacttcttttccgtcattatatcccactgcttccaagactccaagagtgaatgcgattttatcaaaagtaaacaagaaatgatagtcacgctgagcctgccccattatttttccgtttaaaaataacgccacactatccgtattagaaactacatacacaggcttgaccactcccggttcataattccagtgtcctacgatatgcaaacgaggattttccgtatctacccatccgtcccacatcacctgatgagcgaaataagaatctttcggaatacgcataggatctgtatctccactacgcctataattttctactccacggaaatgagtatttgtatctgaaaaaataatcttagcgccgccagaacttacccttttacctgtacccggacgttcacgccagtaatcaaaccaacgaattacattctcgatggtgaaagagtcctgattacgattgtagacactggcatctgcctgttttttcgtttttccggtagctgcagaatgataagcactgtttccttcaccatctttatgatatggataagagtaattatcccaatacttgcgtaagccttcatcacggcaatactccatagcccacatagggtgatgcgcacttttattaatatacaacatctctcccccatactcggcatcacgaatatctagcatctcacgagaaccgattgcacgaccaccatgataatcaaactcatcacgtatcttcttcatctccagcatgtgttcacggctgattgattcattgccacattcataaaaaaggatactcggattgttgcggttatagataatcgcatctctcattacctgtttacgctgctcccactgacgtcctttgcagtctttttctgcatctcctgccggcatggcctgaatcaaaccgacacggtcgcatgactctacatcctgcttccagggagttacatgcatccaacgtaccaaattagcattggctttcaccatgagaccattgctgtaatcactcaaccaggcaggcaccgacattcccacagcaggccattcattacttgttcgctgggcaaatcccttcaactgaatcacccggtcgtttaaccatacttttccatcggcaaatcgtgtttttcggaaacctgtacgcgtaattacttcatccgttttctttccctctatgcacaaagctgtctttaccgtatacagatagccataaccccagctccagaaatgtaagccttccacttcactttcagccgaaagtactactttttctcctggattaattttcttctcctcaccacggaatgactttacaagcttcccgtcacggtcaaaaagctccaccaaataaccaaccgtctggcttttctttgtttcatttttcacttccgattcggcatgaattcgagctttacgagcacgtacctgaatatcttccgcgtaaatatagacacctgtcgtttgcaggttactatataaaggtaaggtctggtataacttatccgtcacatgtaaccacacattcttgggtaaacctccgtaatttgcattaaaattacggttactccactgatacttcacgccagtagccttctctgcatagtcccaattgttgtcaatacgtgcagcaataacattttctttactcggctttacaaatgcagtaaggtcgaaaccaaaagccatcactccattttcatgctgaccgaccaagtgaccgttcacatacagatcaattccttgtcgtgctccttcaaattcgatgaacacctttcgtcctttggcgtcagcaggtaaacgaaaatgtttccgataccacacaattgtatcagtaagatccttgatattcagtttgaaagcctcatcctcattgaatgcatgaggaagtgtaaccgacttccattccgtatcagaataactcacactctctgcctgagctatatcaccgacttttagcttccagccactgttgaaattatatttttcacgtcctgcggcatgaatgctgcttataaccatcagcagacataaacttatccataaaaatctcagtctcatactatctaaatattttgtgtaaaaatacattatctcttgtaagaatacatggaaaaataaagattataactggaattattggtacataaacaaataacttttatcagagtaagataaatacggacggtagtactggacagttctcttttttctagaaaattctgatattgatgaatatgagatggtctgatttgttcaagcggtatatcatgttctttttttaaaatcgattaaaatgtgaaattgccgttttatatagttttaatgataagatttaaatggatgaaaatttacataaagaaaaagattcttattgatagtttattttgttctaatcattttttcagaactactttacaaaaactctgtttcacagtgtgggatttgtatttcacactgtgaaatatgtatcccacactgtggtttttatatcccacagtgtgaaacagagaatttgcgcctaaatttaaaggaatacatcaaagggaaaagaagaattatatacaggatttgtatgtttgaatgttaatgaaataacttaaagtctctaatctgttaacaaatttacgatatgtgtgataagattgtttgatgagtataacataaagaagattttcatgtcaaagcaggcttaaaaaactcttgaaaggtatttgtacaaatttttccatgtatctacacaattttacattgtttgaaaccttgtacaatcgtacttttacaacgcatttgagacagcagatgcaaaacatagagatataatgaaactaacttttgtttaacttaaccaaattagaagtatgaaagacagaaattgttctagtctgatgcgttgcgcttccagcctgcaacgtttgttcttcttggccttgttgtctatcatcgcgattggcgcgtatgcacaaggcaagacagtgtcgggaactgtactcgacaaaagtggggaatctgtaattggtgcgagtgtagtagtaaaaggaactaccaacggtaccattactgactttgacggcaagtttaccttatctaatgtacctaatgatgcttcgcttgaaatcagttttgtaggtttcaagactcaggtgattccagtacagggaaaaactacattcaatgtgacgatggtggaagataccgaagtgttggatgaagttgttgtggtaggttacggtgtgcagaaaaaatcagacgttactggtgcgatggcacgtgtcggagaaaaagaattgaaagcgatgcctgttaaaaatgcactggaaggtatgcaaggtaaaaccgccggtgtggatattacttccagccaacgtccgggtgaagtaggaagtattaatatccgtggtgtacgttctatcactgccgatcaaggcccgttgtatgtagtagatggtatgattatccaaaacggcggtatcgaaaatatcaacccaagtgatattgaatctatcgacgtattgaaagatgcttctgctactgctatttatggttcacgcggtgccaatggtgtaatcttggttactacaaagaaaggaaaagaaggaaagatttcattgaattattcaggaaccgtaacctttgaaaccctgcatgatgtaacagaaatgatgtctgcttcagaatggttggattacgctcgtcttgccaaatataatatgggctcttatgcatctgcaactcctgattacgaagcagataaagctgcgtttggcagtgtagcagcttcttgggcaaatattgaaaaagcatgggaaggaggaacttatgatccttcaaaagtaggttcctatgattgggcttccaatggcaaacaaacgggtatcactcatgaacatacattaagcgcttctggcggtactgacaaattccagggttatgcttcattcggatatttaaatcagaaaggtacacagcctggacaggcctatgaacgctatacattaaaaacttctttcgacgcttctcctctgagtttctttaagatgggttcttcaatcaacgcatcttattcagatcaggattatggttacagcttcacaaaatctgttacaggttctggagacctttatggagcattgagaagcatgctgccatggactgtaccttatgatgaaaacggagaatatattcgtaacccgaatggtgatgtaaacatcatcaaccctattcgtgaactggattacaataccaaccagcgccgtacattccgagctaatgccagcaattatgcacaagtagacttcggaaaaatctgggaaccactggaaggactttcttatagaattcagtttggtcctgaattccagtattatactctgggaatagccaatgctgcagaaggtatcaacggagatgggaacaatggggctcaatacaaaaatgaacagaaacgttcatggacactggataacttgatttattacaacaagacatttgctgaaaaacataatttaggattgactttgatgcaatcagcttctgcttatcactatgaaatgggtgatatgcgtgccactaatgttgcttcatcagaagaattatggtacaatatgactacagcaggtacattgagttcattcggaactggactgacagagacccagatgacttcttacatgattcgtgcaaactacggattcatggataaatacttattgaccgcatctatgcgttgggatggtgcttcacagttagctccaggacataaatgggcaagcttcccttctatggcattggcatggcgtctggatcaggaaaacttcctgaaagatgttaactggttaagccaattgaaattgcgtcttggatttggtatcacaggtaatgccgctattgcagcttatgctactaaaggagctattaccggattgtactacaactggggacaaacagactcttcattaggatatgttccttcagatccgtctgcaaaagatccggctaagatggctaatcaggatttaggatgggaaaaaacaactcagtacaacgtaggtatcgattatggcttctttaataaccgcttaagtggtagcattgacgcctataaaactaagaccaatgacttgttgctcggtatgaccattccttcattaacaggttatacttctacatatgctaacgtaggaaaaacatccggttggggtattgacttacaagtaaatgccatcccagttcaaacaaaagatttctcttggaatactacattgacatggtctatggaccgtaacaagattgaacagttatctaatggaagaactgaagatgtaaacaacagatggtttgtaggtgaagaaatcggtgtatactatgattatgtatatgatggaatctggaaaacatctgaagctgaagaagctgcaaaatatggtcgtaaacccggacagattaaagtgaaagatttaaatcaggatggttctattgatgccacaaacgaccgtcagattgtaggtaaagtacgtcctgactggactgccggatggaataatacattcagctataagaattttgaactttcattctttatcctttcacgttggggctttaccgttccacaaggagctgccactcttgacggccgttacatgatgcgtaaattagattattgggtagctggcaccaacgaaaatgcacaatattactctccagggtcaaatggagaagctgcagatacatacagctcttctatgaactatcaggatggttcatacatcaaagtacgtaatatttctttgggatataactttacttctaaacaactgaaaaatgtaggattgaacaatcttaaagtatacgtacaggccatgaacccattcactatttataaagcttgtgactggttggatactgatttacttaactatgataataacactactacatttggttctgccacaactctgaagagctttgttatcggtgttaatattggattctaatcataaaattaaggaactatgaaactaaataaaatattatatactgcattaatgatcagttctatgggaagcagtctctcttcatgtaaagattctttcctggatgaagaactaattacccaatatagtaccgaccggtttgaaacccaagaaggtctcgatgaattggttaccggtgcatatcagaaattgaaatttaaatataactacatttgggcaattgaatgctacaacatgggagtagatgaatttaccgatgcaaacaatactatgcctgcatggaatcactacagccaagacttgaactctgcagaaacaggagctaaccaaccagtctgggacaatttctacggcttgatagaaccggcaaatatcatcattgccaatatgcctcaatattacgataaaaatagtgctacctataaaacccgtttgggagaaggctattttttaagagcgtttgcctattttgaactagttaaacaatttggcggtgtgccccttaagttaactccttcaactagtgtagagacttacttcacacgtgcatctgaagaagatgtttacaaacagattatcagcgacttccaagaagcttataacttgttgccagaaagcccagagcagacaggccgtattacaaaatatgccgctgcccattttttagctaaagcacatctgttccgtgcttctgagttatacagtggatggaactcaagctatgttgctgaagatttggacgcagtaattcagtatggttcggaagtggtaaacaaacacccgatatgcactaactacgtagaactttgggactaccaggaacccaatggagcaaatgaaaaagttagtgaagtggtattggctgcacagttctcaaacgatgaatctacatggggacgctacggtaatcagatgcatctgtattacccatctgtataccaagatatacagggaactaaacgtgacatctctggcggccgtgaattctcttatgtaagtgcaactgaatacaccatgcaggtattcgatcgggctaatgactccagattctggaaatcatttattacttgctatggagcaaacgacacagccggagcaccgacatggactgaagaagatataaataacggtgcacccgcaggtgttaatgtgggagataagcgttttatcgctggagaagtaggtatcaaatacatcgttaacgaaccgggagacgaccgttttgaaaactactcaacaggggcagctgatatcaaagtaaagaaaaatggagagatttgtgcaccgcacacatttgtacgctatttcaaaggtgaaaatcagctgaactggaacctctccacacacacaggaaactattataacatcattcctcacaaacgctctgttgcattgtctaagttccgtgacggttcgcgtaactctattgcttctcagtttggaactcgtgatgccattatcgcacgttcagctgatgatgtactaatgatagcagaagcttatatccgtaaaggagaaagccattatgcagatgctatcacctggattaacaaattgcgtgaccgcgctgcctataaagaaggggaagacagaagtgtaaacgtggatggtggtcaatcttacaaaaataacacatactgtgctggaaaaggaggaggttactctgctgacggagccatctattctgaacagaacacttattatgaatctaataacctggaaggacaggaaagtgtttacaatgcacagtcatctctttcaggcatgcacctgaacagcgtaaacgatgtatataattctcaaacagatgcacctatctatcaggctctgaattgcactagcaatgcagaaaaaatgatgtgcttcttgttgaacgaacgtacacgtgaactttgtggcgaaggatatagatgggaagacttggcacgcacaaaaactcttgatgcacgttggcatgcatttaacgatggtgtaagccgtggtatcggtgagtttaacccagacaaacattactatcgcccaattccacaatcattccttgatggtatcacaaatgagagtggagcagctttaaccaatgaggaaaaacaagcaatgcagaatcctggttattaaccaaagccttatttttccatacaattttaagagacgcttttcaaaagagagaagcgcctctttttttgtacaaatttacagcaacatgtacaatcttccatccctgaaaagagcagctttcccgtactttgtaaaataaatatttttccaataagactatgaagaaactgtggttaataggactcttgatatgtagtccttttacaatgaatgcacaatccggaacaacatccggactggacaaaagccatttcagcaaatactggaaggtagaatccgaatctcctgactataaagtttccttttcaggagatacctgtgaaattttatctcctaaaggactgactttatggagaaaagaaaaaatgtcgggcaacgtaaccattgaatacgatgcctgtgtggcagtagaagggaaaccaggtgacagactaagcgacttaaactgcttctggatggcttctgacccgaaagcttctgacatctggaaacgcatgaactggcgaaacggagttttcgtaaactgctacagccttcagctgtattatctgggatatggaggaaactataattcgaccactcgtttccgtcgttatgacggcaatgaagccggggttacagatgaaaaggtgcgtcctgccattttgaaagaatacaaagaccaaaataatctgttgacagcaaataaatggtatcacattaagattcaaaatacagacaacagaatacgctattacatcgacgggaaattacttgtcgacttttatgatccgtcaccgttgacttccggctggttcggtttccgtaccacattatctaggacacgtatcactaatttcaaatactccattgaaaaagaaaaagctaccgaagctcctttacactggattggaaaggttccagaacaagcacgccccatcagttttggagttccgttcaaacaaggtaaagtaaaatcaggtacccccttgtgcgtacaaactgaaaacggagaattagtggaagccgacacatggaccacagcatactggcccgatggctctataaaatgggccggtatggctgctgttattccgggtaatactcgttcggtaaaagtaataccttcttctaaaaagaaaaaaacgaccaatacagaagaaattcatgtcacagaatccgataaccaactgactatagccactggaaaaattactgcttttatccctaaatctggaacttgtattctcgacagtcttctgtatgggaatgtgaaagtaggtggaaaggcggatttgattgccagcacacaggattctccatcacgagaagatgccactgagactcattatcagtcattcaatagcctcatcaaaaaagccgtaattgaacagcaagggaaaatacgtactaccatcaaactggagggtgtgcagcagggaaaagacggacgtgaatggcttccgttcactctgcgaatgtatttttacgcaggaaacgaacaaatcaagatggtacactcttttatctacgatggagaccaaaacaaagattttatccgctcattaggagtacgattccaggttccaatgagagaggatttatataaccgtcatgtagccttcgcctgtgccgacggaggtgtatggagcgaaccggttaaaccgctggtgggaagaagaattctgacactcgacaaagaccaaagctggcaaaagcaacagatggaaggcaaacgcatccctgaataccagcgttttgatgcaaaaaacagaagtttaattgacaattgggctgcatgggataatttccgtctctctcaacttacagacaattctttcagcatccgcaaacgggctacagaagacagtccctggattggtacatttacaggcacacaagccggaggatatgcttttgccggtgatgtcagcggaggaatgggagttgccttacaggatttctggcaggcctatccttctaccctggaagtacaacatgcacgcagtcaggaggcttcactgattgtctggttatggagtccggagtcagaagctatggatttaagacactatgacaaggtagcacacgacctgatagccagctatgaagacgtacaggaaggaatgagtaccccctatggtattgctcgcacacacacgctgaccgttgttccacaagctgcttatccgggtaaagccggcattgcagaaacggcacagattctatcagaagcagctccgctgatgtgtacaccggaatatctccatgcctgccgggcttttggcatctggtcattgcctgatcgaagtaatccgcagcgcagcaaagtagaagaccgtctgaatgcttatatcgatttatatcaaaacgccattgcccaacataaatggtatggcttttggaactatggtgacttaatgcatgcttacgatccgatacgccactcttggagatacgatgtaggcggatatgcgtgggataacaccgaactagcatccaacatgtggctgtggtataatttcctgcgtacaggaaggcaggacatctggaaaatggcagaagccatcacacgtcatacggcagaagtggatgtatatcacatcggtcccaatgcaggtttaggaagccgtcacaacgtcagccactggggatgcggtgcaaaagaagctcgtatcagtcaggccgcctggaatcgtttttattattacctgactacagacgaaagagccggcgacttaatgaaagaagtaaccgatgcagaccagaagctgtatacactcgacccgatgcgtttggctgagccaaagagccagttcccatgcagcgcacctgcccgattacgcatcggccccgactggctggcctatgcaggcaactggatgactgaatgggaacgtacacagaacacgaagtaccgagacaagatcatcacaggcatgaagagtattgcagccctgaaaaatggattgttcactggaaatatggccttaggatatgacccggcaaccggagtaatcagttatgagggcgatcccaatagacagaataccaatcacctgatgactatcatgggaggctttgaaataatgaatgaaatgcaggaaatgattcaggtcccggaattcaacaaagtatggctggaacatgcacgcgattacaaacagaaatcactcgaaataacacgtaaccgtttccgggtttgcagactgatggcatacgcagcgtctcatctatatgacccgaaaacagccgcagaggcctggaaagatttatggagcaaactggaacatactccggcaccggaattcaagatagaaaaagtgcttcccccggaagtcccggcagctatggatgaatgtaagacaatcagcaccaacgatgctgcattatggagcctggatgcgatttatatgcaggaggtaattccgcagtaaaccacatcaatagataataaaaacggctttaaatgacaggagaacatcatttaaagccgttttttacatcctatattttctctcttctaaaacttgaagaccaatacaccggctgtagcaatattaggagtaccaatcaacacttttgctccttgaggaagtgcaaactgataaggctggtcactatagtttagcactatacctaatccgttacgatattccattgttacgccgtaaggtagattcattacttcgatttgcaaacgactatacaacttatccaaaacctgacgctccaaagccccgtctgaactgtctactccgatataagtcacagacccctttcctaatttacggaaagtaaccgcaggttttccttcataaaactcattcgtgtaagtagcccaaacctcattggaagcaccgggttgcagaatctctccccaagtattccaggtatagacttttccatccatctttacttgtcctggatcttgaggcaacaacaagtcataaaactccatgtgattcccagtcaactcatcaatcattgaaccaaaaggagcctctggcaaacgtccgaaacggtctttctgtgcggtacggcaagtcagtaccaagtttcctccttcttccacatattttttccaccttgctaccagttctttatcagccaactgatatgccggaactatcatcaccggatattgtgagaaatctttctcttcagaaataaaatctacaggagctgcatacgacttaagtgtacgataatatttatctacatgagcaaaggtattccatgttgcattctgtttctgacggtcaatactccaatagttttccggattccacaaaatagcagtcttccgtttcagataggtttccggtttatcttccttcggacgataatcttttctcaaagaacggatttctttcatgaactgttcatactctcgtccaccaggtgtcactgtcacaccatctgtacccacaataccataatgatactgctcagttccatacaaaggctgacgatagcgatacgtacagataaaatcagaacctccggcaaatacactccatagccacaaacggacagcacccggcaagggttgaggattgatacttccccagtttacctgtcccggctgcaactccattaccccgtaagtaccatttaccggacggaaaaagtcatttgccatggcaatacgtaaaggatttcccacacgataccctctacgaccgataccttcattgtcaccatataccatataacgggtatagctgacaaaatccaggtccttgctacctccaatatgtcctttgtcataatctggaatataattggtagtcacccactgattcttggcatatttcttgattaatctgcattgctcattcaaaaaatcattagtctgcttagctgcaaaccgacgataatccagaatctgatgatgattcataaacatttgggcagttttaggcaaggtgatttcctcaaactgagaatagacttcactccagaaagctgttccccaggctgcgtttagttcctgaatattgtgatgatatttctctttcaagaattcccggaaagcttcttctgctgcctgattatagtcaaattgtacagcaggctcattatccagctgccagccaatgatacgcgagtcatttccataatggcgggccagttcttcaatcatacgataggccaatttccggtaaacaggagacgcaaaagaagcatgctgacgtgccccgtgatcttgcacagtgccatcttcagacttcagcaaaatctccggatatttacggcttaaccacacaggaggagtagcggtggaagtacacatcacgaccttcaaatcatatttggccgccaacgcaaccgcccggtccagccaagaaaaatcatacactccttcctgaggctccagctgtgcccaggcaaactctgcaaaatgggtaaattcaaatcctagttcatgcatttgttttaaatcgcgttcccattgactttcctcccagtgctccggataataataagctcctgtcaatgtcaagtctttgtcattaaaccaggtatgctgggcaaaaatccccccacagaacagacagccgcataccattgcaagcaaacgttttttcattgtattcaagtattagttttgaaatgtattacccttgcaaaggtagaaggaaatcgcaatcaacttgtatgatagttcatttttttcaggaaagtgtatgataatcgaggaacatgtataataatccatgctcctttcaattcaagatgcgtaactttgctgaaacaaggacaacattttatcaagaactatgaattcactgaaatcatttgtgactggattttttttatggggcattttagaaggtatttctgcacaaaataaagtactttctttctctatgcccgatggagtaggcacactccgattaggcattattgaaaacgactcaagccgatggctggatgagaaacagacacagctgcatatcgattgccatccactcagtgatacaaaaggattcattctggaaatcgaaaataagagagaagatattacgttgggatgggctttcggaggatgcgacgcaatcgctcccgaatcaggtattcaacctcaatattgcaaagacaacgttttcaatatagaaggtacacaggttacaatctaccacgggaaagtcatgcaattaaaagtgaccaatctcatagttccttcagcttcttccattcgtttatctgacggacataaacaagatactccgctgacacttttcacatccgggaaaaaaacggatgcacccgtattagcagcaacctgcctgattcgtaaaggagagaaggtgtacttctgcgcatacaagcaaaatgcaaaggctgactatactgactacatgttacctgaattgttttaccaagaaaaacagcaaccatgaataagacaatcatcatctgcctgtggattttgttcctctgtacaaacatactgcaagcaaaaatatataacgtaaaagattttggagccgtaggcgacggacagcacattgattctgaggctatcaaccaggctatcgtgcaagctgcccgcgaaggaggtggaacaatatatattcccgctggagagtatgcctgttattctatccggcttgccaaccagattcatctgtatctggaacaaggcgctacagttgtggccgctttccctacagccgaaaagggatatgacaaggcagagcctaatcctcataacagcttccaggatttcggacacagccactggaaaaattcccttatctggggaattaacctgcaagatattacaatcagtggtccaggaaatattgacggaaaaggattgacacgcgaagaaagccgacgcgacggagtaggcaataaagccatcagtctgaaagaatgcaagaatgttacactgaaagatctgtccatgttccgctgcggtcacttcactctactggctactggagtagacaacttgaccctcaacaatctgaaagtagataccaaccgtgacggatttgacatagactgttgcaaaaatgtacgtatcagccgatgcagtgtcaacactccatgggatgatgctattgtactaaaatcatcttatgcattaggatactttaaagatacggaaaatgtaacgatttctgactgctttgtcagcggatacgaccgtggaagtatgctctgcggtacttgggaactggatgagcctcaggcaccggaccatggctaccgtacaggacgtatcaaactgggtacagaatctagtggaggatttaagaatatcaccgtaaccaactgcattttcgaacattgcaggggactggctttggaaacagtagacggaggacatctggaagacatcgaaatcagccatatcaccatgcgacacattgtcaatgccggcatctttctccgtctgggggcccgtatgcgaagccccgaaggaactccagccggaagtatgaagcgcatccgtatcagtcacattaatgcatacgatgtagattcccgttattcttccattatcagcggtatccctaatgggattatagaagatgttaccttcgaccatattcacttgtattataaaggaggatatacaaaagaggatggaaaaagagagcttccagaacaagaaaaggtatatcctgaaccatggatgttcggtactatcccagcaaaaggattctacatttcacatgctaagaatatttcgtttcatcatatcaatttctattatgagaaaccggatggacgtcctttattcgtaaccaaagatgtagaaaacattcgctttacagatattcgggagaatggagaagatgtttcaatcacaataaatcaataatcaaatatcacataaaatgaagacacaaaggaaatggctcatggcattagctgcctgcagcctaggagtactcagctccgcacaaacgaattatgatttcagtaaactacagcgagaaaaactcggaagaggagttgtcgccgtcagagagaacgcacaaaaagtagccgtttcatggagatatttttcttccgacccgatggaaaccgcattcaatgtttaccggaacggaaaaaagattgcacaagttccagctggaacaggaactttttatacagacaattattcaggaaaccagaaagtggtctatacggtaaaacctgtggtcaatggaaaagaaacttcaaatgaagggagctatacccttccgggaaatgctccttcaggatacattgacattccactggacagacctgcagacggtgtcacacctgctggagaaaaatacagctacagccccaacgatgcttccatcggtgatgtagatggagatggaaattatgaaattatcctgaaatgggacccatcaaacgcacacgacaatgcacacgatggctacacaggaaacgtatacttcgactgctaccgcctgaccggagaaaaactatggcgcatcgatatgggaaagaatatacgtgccggcgctcactacactcaattcatggtatatgacctggatggagacggaaaggctgaaattgtaatgaaaacttccgacggtaccatagatggaaaaggaaaagtaattggagatgccacagccgattatcgcgaaccgggagatccgaaccagcccaaaggaggagatttctctccgaacgacccacgaagcaaaggaaagcctaccgatcctcttcgcaaccagggacgtatattgacaggaaatgaatacctgactgtcttcaatggactgacaggcgaggccatgcaaaccattgactatattccattacgtggcgatttgaaaggctggggagacgagcgtgccaaccgtagtgaccgttttctggcatgcgttgcttacctggacggagttcatcctagcgtagtcatgtgccgtggatattatacacgtaccgtgctggctgcattcgactggaacggaaaagaactgaaaaatcgctgggtattcgatagcaacaacccgggatgtgagaaatatgccggacaaggcaaccataacctccgtgtaggagacgtcgatcaggacggatgcgatgaaatcgtatatggttcctgcacattcgaccacgacgggaaaggactttattccacaggaatgggacacggagacgccatgcacctcactcaatttgatccagcttcagccagtctgcaagtatgggcctgccatgaaaaccggaaagacggttcttcattccgcgatgcaaaaaccggaaaagtattacttcaatatcccgacaagaccgatgtaggacgttgtatggctgccgaaattgacccgacaagtcccggtgtagaaatgtggtcactagcctctggaggtattcgtaacatcaaaggagaagtagtagcagaaaaagttcccggactgtcttacaacatggcagtatggtgggatggcgacttgctccgtgaactgcttgacaaaggaaaagtaagcaaatacgactggaaaaacaaacgctgcgacactatcttcacattagaagggtgcgcatttaacaacggcacgaaatctaacccttcacttcagggcgatcttatcggtgattggagagaagaagtgctggttcgtacggacgacaataagtctctccgcttgtatgtaactacaattcctaccgaataccgcttccatactttcctggaagaccctgtatatagaatcagcattgctacacagaacgtggcttacaaccaacccacccagcctggtttctatatcgggccggaactgaaaggcactttcagaggatatacattcaaataacccattacgcttacatttaaaattagttatatgaataaactcgtcttaaacttcgcactgctggcggctctttctgccggtcttagtgcccatgcacaaaagaaaaaggaagtcatcaatgactccaatactccacttcatcttttgcagcctgattatcaggtaggatatggtattgtatcagcagaagacatcaaaaaagacatggaccgtgtcttgagatacctggaaagtaacacaccgaccagagtagtcgataaacgtaacggaaaagtcattaccgactatgcgaacatggataccaatgcacaattggaaagaggaactttccgtctggccagttatgaatggggggttacttattcggccatgctggctgccgcagaagctacgggtgacgaagcctacaaaaaatatgtatacgaccgtttcaaattcttatcggaagtagctccttactttaagaaagtatatgaaaaatacggtacaaccgatgcacagatgcttcagattctgactcctcacgccttggatgatgcaggagccgtatgtgcggcaatgatgaaagcacagatgaaagacaaaagcctgaaattgcaggacatgattgacaattacttccatttcatcatgtacaaagagcatcgtctggccgacggcacatttgcccgtaaccgtccttaccacaacacattgtggctggacgacatgttcatgggcatcccctctgttgctctgatgggacgctatgcatccgaccacaatgacaaatattatcaggaagccgtacgccaggtactgcagtttgcagagcgcatgttcgtgccggaaaaaggcttgttccgtcatggatgggtagaaggtatgaaagatcatccggctttccattggggacgtgccaacggatgggctattcttaccatgtgtgaagtgctggatgtacttccgaccgactatcccggacgcgataagattatcaacctgttgcaggcacacgttcgcggactggctgcctgtcaaagcaaagacggtttctggcaccagttactcgaccgcaatgattcttacctggaatcttctgccactgccctctacgtatactgtatggcacatgccatcaacaaaggatggattgacgccatggcatacggtccggtagtgcaattgggatggcatgccgtatcttctgccatcaacgcccagggacaggtagaaatgacctgcgtaggaaccggtatgggatatgacccggcattctattactaccgcccggtaaatgtatatgcagcccatggatatggtcctgtcatctgggccggagccgaaatgctcaatttactgaagcaccagcatccgcgaatgaacgacagcgccgtgcatttctatcctacagaacagcagacgaaagaacctattttcttctattctgagccgggaaatccacgtgaatttgtagcaggagtaagccgtatcaacgaaaagagtcctgtcgctttcctgattggagactctaccgtaaaatgtggagccggtaacggagaagataacaaatggggatggggaagctacttgcaaaattactttgacacaacccgcatcagcattgaaaactgtgcattaggcggaagaagcagccgtacttatttcacggaaggtctttggaaccgtgtactccctgccatcaaaccgggtgattatgtattgattgatttcggacacaatgacggtggcccgatgaataccggacgtgcacgcgcttctctgccaggcactggagatgactctaaaaaagtagtcatggaaaaagacggaagcacggaagaagtatacagcttcggccactacatccgtatgtatatccgccaggcaaaagctaaaggagcaaaagtcatcgtgatgtcacacactccgggtaatcgctggaccgacaaccgcatgaaccgctgcgacaagacttacggcaaatggtcaaaagaagtggcagagcaggaaggtgtaaactttatcgacttgaacgacctgactgccaagaaatttgaagccatgggaaaagaaaagactgccgcttactatgctgactctgtacacaacacgcaggaaggtgctgtattgaatgcagaatcagtagtagaaggtatccgttcgctccagaactgcgacctgaaagactatctgaaataagcatttacagataaaatcaatgccccgcgctgaattggtagtgcggggcatttttataagatactatttttacttctttacttctggaattcagcccagtctgtcagacgcatgtcacctttattgataaacacctgatgcatacccaatgcagcagataagctgtgacaagtctgtcctttcgtagaaatcttcagataatcccaaagcagttgcttgtaatcagggtgtgcacagttttcaataaccgcttccgcccgttccatcgggctctttccacgcaagtcggctataccctgttcggtgataatgacattgactgaatgctcgctgtggtccagatgagataccatcggtacgatagagctgatgcaacctcccttggcagtcgacggacaagagaaaatagaaatataggcactgcgggtaaagtcgccagaacctccgataccgttcatcatcttggttccgcaaatatgagtggaattgacattaccataaatatctgcttcaatagcggtattcattgaaatcactccaatacggcgaactacttccggacagttggaaatttcagaaggacgcagcaccagtttatgacggaaaaagtccatattgtcataaatatcttgcagacagtcattcgtcacactcaaagaacaggtactaccaaacttgattctgccttctttcaccagttttattaccgaattctgaattacttcagtatacatttcaaaaggaggaatgctggggtccttgcccaacgcactcagcacggcattggcaatatttcctactcccgactgcaagggaaggaaggtagaaggaataattcccctgcgcatgtccgaagccaagaactcagccacattctgaccgattttatctgtcacggggtcagattcatggaaaccacgcgcctcatccggcatattggtttctaccacgccagcaatcttggaagggtctacctgaatataaggaaggccaatgcggtcgctcggacgcacgataggaatcggacgacgataaggaggacgttccatttcatacaaatcgtgcatgcctatcaggcttttactgtgtgcggcattcaattccacaatgactttatcagccagtcgtgcaatggtcggcgtaatacccactcccgcagtcaggtaaatacgtccgtcttccgtaatttcacaagcttctatgatagccacacttacatgtcccaagaagccggaacgcaaacgctgagctacctgtgacagatgaatgtctgtataattgatttcgccgttattcacagccttccggaagtccgcattggtagtataaggagcacggaacttaatggcatgtgcacgtgtcagcatcccgtcacaagaatctcccgtcgaagctcctgtaatcaagccaatctgaaaagattctccccttgcgtgtttttcttctgctattttcgctaactctgcagtcacagccttcggacttccggcaggggtgaagccactcagtccaacaatgtctccatccttaatatagctggcagcttcggctgccgtaataaagttaaagctcatagtatcaagtgctttttatgttagtattaaaaaagttagtcaatcagtcatatttacggcgaaaaatctcggaatagataaaagccctccttgcatctgctgcattacgaaaagctatatcaggcttctgctcctcttttttcggtacattcaatgcttgttctttcggagtggaaggttgggcagaagtatatctccgtttcttccttgcttcgggtacaggagccagaatcacctcttcaggaacctcctcttccacagaaaaagatgctgccggaggtgcctgtcttacggtctttacacgcttcggcttcttctgtttctgggtcctggcctgaaaaagtccccagccaattatacctaaaaaaacaagaatttgaattacatccataaatattaagtgttaaggttttcttcaaagatacgaataaaatctatatctcccatcctttttatggaagttaaccaagaaacagatatctttgcaagcaaatttttaatatagaaaaccttatgacaaaagaagctacaggagcagactttaaatctgcaactgaaaacgaaagcaagaaattatttatcgagacctacggatgccagatgaatgtggcagacagtgaagtaattgcatctatcatgcaaatggccggatattctccttgtgacactttagaggaggccgatgccgtgttcatgaacacctgctccatccgcgacaatgcggaacagaaaattctgaaccgactggagtttttccattctttgcgcaaaaagcggaaacacctgattgtgggcgtattgggatgtatggccgaacgagtgaaaaacgaactgattgaaaaacatcatgtagacttagtagccggtccggatgcctacctgaccttacccgacctgattgcagccgtagaagcaggagaaaaagccatcaatgtggaactttctactacggaaacttaccgtgacgtaattccttcacgtatttgcggaaaccatatttcaggattcgtttccatcatgcgaggatgtaacaatttctgccattactgtattgtgccttatacacgcggacgtgaacgcagccgtgacgtggaaagtatcctgaacgaagtacgcgacctgcaacgaaaaggctataaggaagtaaccctgttgggacagaacgtcaactcataccgttttgaaaaagacggccaaacagtaacctttcctatgctgctccgtatcgtggccgaagcggtgcccgacatgcgcgtacgtttcaccacttcacaccccaaagacatgagtgacgaaacgcttcatgtcattgcagaagtgcccaatgtatgcaagcacatccacctgcccgtacagagcggaagctcacgcatcctgaaactgatgaaccgtaaatatacccgcgaatggtatctggaaagagtagccgctatccggagaatcatccccgactgcggactcagtaccgatattttctcgggcttccattctgaaacagaagaagaccatcagatgtctttgtcgctgatgcgcgaatgtgcgtacgactcggctttcatgttcaaatattctgaacgtccgggtacatacgcttccaaacaccttccagacgacgtgcccgaagaaatcaaaatccgccgactgaatgaaatgattgaactgcagaaccagctttctgccgaaagcaatgccaaagatgtaggaaaaactttcgaagtattggcagaaggcgtatccaaacgctctaaagaacagctgttcggtcgtacggaacaaaacaaagtagtagtctttgaccgtggcagccaccgcatcggtgattttgtaaaagtaaaaatcacggaatcaagctctgctactctgaaaggcatagaagtaactgaataactctcccagaaatagatctgagaaaacaaaataaaaacctgcagacatctttttcaggatgcttgcaggttttttacgtttcacaaggcggaaacctacgtttccggcatgcgaaacataggtttccgctccgcaaaacgtatgtttcgcgcgaggaaaatctaaatacttacagcccgtatgcctattgatacaagcctgttctttaattattctcttctagcttccggcatgatcagccaaagaatcagataaaccagtccaccggaaaaagctgtaaaaaatgtagccagtacgtaaataatacgcaccaaagtaatatcccattcaaaataatcggctatcccagcacaaaccccacctatcatacgattgtttgaccgtgtcaatctttttttctccataatctattggcaaatattcattattcggggctaagttacaaaaaacatacataaagcattctatactcttaaaaacttttaaagaaaatcatgccataggctttttatttgttattttgcagcaaattagggaataaagtgaatatactgaaaatagataaatgtccactttgtggaggaaaccactttgaagaggtaatgacatgtacagaccactatgcttccggtgagtcctttcagatttgtcgttgcaaagactgcggtttccagttcactcatcctgttccggttgaagcagaaataggacgctactacgaaactccagattatatttcacacagcgatacgcacaaagggttgatgaaccgtgtatatcactgggtgcgtcgcgtgatgcttgcccgtaaagcacgccttgtcaagcataactcccgattaagccagggcagcctgctggacatcggtaccggcacaggctactttccgcatttcatgcaggaaagaggatggcacgtttctgccatcgaaaaaagccctcaggcccgccagtttgccaaagagcattttgaactggacgtggcagctccggaagctctcaatgagtttgccgacaagtcgttcgatgtcatcacgttgtggcatgtcatggaacatctggaacatttgaatgaaacctgggagacactgaaacgtattctgaaagaccagggcatactcattatagctgtgcccaaccctacttcattcgatgccgaaaaatacaaagaaatgtggggtgcctacgatgttccccgacacttgtggcatttcagtccctccgtcatgcagcagtttggagccaaacacgactttattctctgcgaacggcatccgatgccttttgatgcgttttacgtatccatgctgagcgagaagtaccggaagagtgctttcccgttcataaaaggcctgattaccggatcggaagcatggattgtttcactggccaagaaagaccggagcagttccatgatttatgtattcagaaaaaaataagaaattatgagtcagaagtcgggtagccttttcgatatgcaattcattacctcctgcatcagtacaatgctggtactgctgttgttgggtatggtgatcttttttgtcatgaccgccaacaatctttctgtatacgtacgcgagaatatcaacttttccgttcttctcaacgacgacatgaaagaagcagaagccatccgcttccaaaagcagctgaaagaagagccttttgtgaagcaggccacctacatatcgaaagcacaggctctgaaagaacagacagaagccatgggaacagatccggctgaattcttaggctataatccgtttacggcttccatcgaaatcaagctcaatgcggcatacgccaattctgacagcctgagctggattcaggaaaaactgctggacaataaaaaagtcattgaagtaaattatccgcaggacctgattgataccatcaaccagaacatacgcaaaatcagcatgttcctgttagggctggctgctttgctcaccctcatttcatttgcattgatcaacaataccatacgactgaccatttactccaaacgttttctgattcacaccatgaagctggtaggtgcaagctggtcattcatccggcgaccgttcattgtcagaaatgtctggataggcattcttgcggcggccatggccaatgccctgctcatcagcctgtcttacatgcttgtcaactatgagccgggactgctggaactcattactcccgaagtaatgctttgtgtaatgggggctgttttcatctcgggcatcctcattgccaccttgtgtgcctacatctccatcaacaaatatttgaagatgaaagccggagatttatatcgcctttaatgttcaaactaaatagacaaaattcattatggacaaaaaaagttttgcttttgataaaaccaacttcatactgcttgccataggtatgatagtcattatcatcggattcctgttaatgagcggacccggctctactgaaacagcctttgaaccggatattttcagtgtacgccgcatcaaagtggctcccgttgtttgctttttgggattcattttcatgatttatggtatcctgagaaaaccgaaagataaagaaataactacaaaagaagaggaaagactgtaatggaaggagatttaagcttatttcaaacgattgtaattgccattgtagaaggacttaccgagtttcttcctgtgtcatctacaggccacatgattattacccagcatattttaggggtagaaagtacggattttgtcaaggcttttacatttattatccagtttggtgcaatcctgtcggtggtatgtttatactggaaaaactttttccatctcaaccatacccccatgccagaaaattgcactccagtgaagcgtttccttcacaaatatgacttttactggaaactattagttgcttttatccctgccgctgtattgggacttcttttcagtgacatgatagatgcgatgctggaaagcgtaactgtggtagctgtcatgttaatagcaggaggtatatttatgctattctgtgacaaaattttcggcaacggaagcgaaaaaactgttttgacggaaaaaagagccttttttataggattattccaatgtatttctatgataccgggagtatcacgctccatggctacaattgtaggaggtatggcacaaaaacttacccgaaagaaagcagcagaattctctttttttctggctgtgcccaccatgtttgcagctactgtgtataaaatggccaaattattcatggatggaggaacagaaatcatatcgactaatctgacaactttaattgtgggtaatgtcgtagccttcatcgtagcattgctggctatcaaatttttcatcagctttgtgacaaaatatggatttgtagcttttggctggtaccgtatcattgtaggaagcatcatactaatcatgtcttttttaggatataatttagaattggcttaatgaatttcaaagaaggagaagtattatattttgacaagccactgcgatggacctcttttgccgtagtgaataagatacgataccacatcagtcgcaaattaggagtaaagaaaataaaagtaggacatgctggcacgctcgatccgctggccactggagtgatgattatctgtaccggaaaggctacaaagcgtattgaggagttccagtatcatacgaaagagtacattgccactctccagctgggagcaaccactccctctttcgacctggaaaaggagattgacgcaacttaccctaccgaccatatcaccaaagaaatggtcgaggagacattaaaaaagtttgtcggcaccattgaacaggtaccaccggcattttccgcatgcaaagttgacggtaagcgtgcatacgacctggcaagaaaaggagatgaagtagaactgaaacccaagattctggtcatcgatgaaatcgagttgctggaatacaacctgccggaaattaagatacgggtagtctgcagcaagggtacttacatacgggcattggccagagacattggccaggcactgcaaagtggtgcccacctgaccggtctgatacgtacacgggtaggagaagtaaagttggaagactgcatgaaagtagaagattttgaagcctggctcgaccagcaagaaatagaagttataaacgattaaggaaagaaaggaagaagatgaaactgtcacaattcaaattcaagttgccggaagaaaaaatcgctctttatccggctaaatacagagatgaatcccgcctgatggtaattcacaagtcaaccggagaaattgaacatgtcaatttcaaggatatactgaactatttcgacgacaaagacgtgtttatctttaacgataccaaagtctttcctgctcgtttgtatggtaacaaggaaaaaacgggtgcccgcattgaagtattcctgctccgtgagttgaacgaagaactgcgcttgtgggatgtgctggtagaccctgcccgtaaaatccgtatcggtaacaagttgtatttcggcgacgatgactccatggtggccgaagtaattgacaatacgacttctcgcggacgtacactccgctttttgtacgacggtcctcatgatgaattcaagaaggctttgtatgccttgggagaacctccattgcctcctttcatccatcgtccggcagaaccggaagacgaagaacgtttccagactatctacgccaaaaatgaaggagccgttaccgtgccggcagccggtctccacttcagccgtgagcttatgaaacgtatggaaatcaaaggtattgatttctccttcattaccatgcacgccggattgggcaacttccgcgacatcgacgtggaagatttgaccaagcataaaatggattcggaacagatgttcgtcaacgcagaagcctgccgcatcgtcaacgaagccaaagacagaggcaacaaggtatgtgccattggtactaccgtgatgcgtgccattgaaacagctgtgggtacagacggccatttgaaagagttcgaaggatggaccaataaatttattttccctccttacgacttttcagtagccaacgctatggtaagcaatttccacatgccgctttctaccatgctgatgcttgtatgtgcttacggaggatatgaactgatcatggatgcttacaacatcgcactgaaagaagattaccgttttggtacttacggtgatgccatgctgattctggataaataaaccatcactctatggcaacagtttatctgggattaggtacaaaccttggcgataaagaagctaatttacgtaccgccatctataaactacaggaaaggatagggaagcaagtttccctatcctctttttatgaaacagccccttggggatttgaatcagaccacagtttcctcaatgcagcaataggactggaaaccaacctccctcctattgagatactgcacatcacgcaggaaatagagaaagagctgggaaggacaaagaaatcagtcaacgggagctacagcgaccgactcattgatattgatattcttttatacgacactctcgtgctccagacacctgagcttacaattcctcatccattgatgacggaaagagattttgtgatgaaccccctaatcgaaattgcaggaaacgtaatccaccccacccggcaaaaaacattgtccgaactatatcaggaataatttggcaacaggcaagtagcataaagctatgttaaaaagaaactgaaattgtaattattccaatttatatcactatctttgcagcgaaaataaaaagtggaaagatttgagtagcttgcaaccacggaaaaaaatgctaaaacacattgttatttccccgaagattacttctctactctgtccgtacacggataaaaacaaaccattaacaattttaatttaccacaacaatgggatacttattcacatccgaatcggtgtctgaaggacaccccgacaaagtggccgatcaaatttcggacgctgtgcttgacaaactgttggcttacgaccccagttcaaaagtagcttgcgaaactctggtaactaccggacaggtggtactggcaggagaagtgaaaaccaaagcgtatattgatttgcagcgcgtagcacgcgaggtaattaataagataggctataccaagagcgaatacatgttcgaaggtaattcatgcggtgtattctctgccattcacgaacagagtcctgacatcaaccgtggagtagaacgcgaagacccgatgaatcagggagcaggtgaccagggtatgatgttcggttatgctaccaacgaaacagaaaactacatgccgctgtcgctcgacctagcacacaagctgctgatggtattggctgacatccgtcgtgaaggaaaggtgatgacttaccttcgtccggactctaagagccaggtaactattgaatatgatgacaaccgtcgtccggtacgtattgataccatcgtagtatctacccagcacgatgaatttatccagccggaaaatgactcaaaagaagctcaattaaaggctgacgaggaaatgctggcacagattcgcaaggacgtaattgaaatcttgatgccgcgtgtcattgcagaaatccacaacccgcaggtactggctttgttcaacgaccagattaaataccacgtaaacccgacaggtaagttcgtgattggtggtcctcacggtgataccggactgactggccgtaagattattgtagacacttacggtggtgccggagctcacggaggaggtgctttctcaggaaaagaccccagcaaggtagaccgtagtgctgcatacgctgcacgccacattgccaagaacctggtagctgccggagtagcagacgaagtattggtacaggtttcatacgccatcggagtggcacgtccaatcaatatctacgtaaatacttacggacgtagcaatgtagctctgaccgacggaaaaatcgctaagaaagtggatgaaatcttcgatatgcgtccgcgtgccattgaagaacgcttgaaactgcgcaatccgatttatagtgaaactgctgcttacggacacatgggccgcgaaccgcaaatcgttaccaaacatttcgaatcggcttacgaaggcaacaaagacgtggaagtagaactcttcacctgggagaaactggattatgtagacaaagtgaaagaagctttcggactgaaataagccgaaaccttccactaaccatacagagggcttgatacatcagaagatggtcaggccctttttgttggcataacgttttggctatgcacttacctttacctatctttgaatcctcgaagataggatgcggttcggcaatacttacgctcaaaagcaagcttttggcttgacattgcactcacctttacctatctttgcaaaaactaaaaaagaccatgaacgatatcaaaaatatatgcgtatacagtgcttccagcaccaaaatagatcctatttatttcgaagcagccgaagaacttggaaaaattcttgcacaaaaacatatcaaccttattaacggagccggatgcctgggactgatgtgccgcatcagtgacgcagctcttgctgccggaggaaccgtaaccggtgtcattccccggttcatggtggaacaaggctggcaccacaaaggactgacccgactgatagagacggaaagcatgcacgaacgcaaacaacttatggccgatttgtccgacggagtgattgccctgcccgggggatgcggtacactggaagagctactggaaatcattacctggaaacagcttggactatacctgaaacccatcgtcatactgaataccaacggattttataacccgctgttagaaatgcttcaacaagctatttcccagaacttcatgcgaaaagaacacggaaatatctggcacgtggcacaaactcccgaagaagctgtaaatttattatataccatccctcactggagcaaagaaattcgtaaatttgccgcaatatgaacaagttttgccataccggtttctcacagattcaagaactctacaaccagcacgtagagcagatagacagtgcactgcagcattgtaaggaaacaccgtgtacaaacggtatggcaggagaacccattccttatcagttacgaaatgactttgcggttaccggaattgtatttctttgctttttcctggccgtatacgccctgaaaaacgggaaaaaatacctctatcaacatatcaaaagttttttccgccacaaagaaagagcggggctttttgacgacacttctaatttcaacatccgctacaccctgagcttaggaagtataagctgcatatccgccggattatttgtatatgattttttctctaaaaccgacccatttctgttccaaatagtttcgcactatgccattctatttatctacatattctgcgtactattgacagtgacaggaaaagcccttttatatcaatttatcaactggattttctttgacaaagaaaaaaataaagcctggatttctgcctattttgatctgctctccggtatttcccttgtcttatttcctttgtcactgctcgtcgtttatttcaatttagactttcacttttctaaaaccttcgtactcacagcagtaatatctttcaaaatattgttattttataagtgtattaggaacttttttaatcattttcatggcattttacatttaattctgtacttttgcaccctcgaaatcatacccttacttttcctctggaaaggattgatatatataaataacatttttattttaaaattctagtaacgttgaaaataaagaaagtcctcgtttctcagcctaaaccaacgactgaaaagtccccttattttgacattgctgagaagtacggagtgaagatagattttcgcccgtttattaaagtagaaagtttgtcagctaaagaattcagacagcagaaggtttctatcttagatcatacagccgttgtgtttacttcacgccatgctatcgatcacttctttagcctgtgtgcagagttgcgcgtaacaattccggaaacaatgaaatatttctgtacttcggaaactatcgctctgtatattcagaaatacgttcaataccgtaagcgtaaagtattcttcggtgctactggaaagtttgctgacctgcttccgcaaattatcaagcataatacggaaaaatactttattccgatgtcggatgtacacaatgacgaagtaaaagacttgctcgacaagaaccacatccagcacacggaagctgtaatgtaccgtactgtcagcaacgatttcactccagaagaagaattcaactacgacatgctgatattcttcagtccggcaggtattcagtcgctgatgaagaacttcccgaatttcgaacagaaagacattgctatcggaagcttcggaccgactactgctaaagccgtaaaagatgcaggcttgcgtcttgatttggaagctccttcaagtgcagctccttccatgccggcagcgttggatatgtttatccgcgaacacaacaaataaaaaataattctgacaaacaaagcgaagcaatccattttctcattacttcgctttgtttcattatatacccctctatgaccgattctctaaaattaaccctaccgaaagtagaacgactgaacagccggattctgattgaaagactgtttacaggaggcagcaaatcactacctgcttttccgttgcgtatcgtatacatgccggtagagggagagaatctacctgcagccactatcctgattagcgtacccaaaaaaagattcaagcgggccgtcaaacgcaatcgtgtaaaacgtcaggtacgtgaggcctaccgtaaaaacaaacacatcctgctggatgcgttaaaagactcaggacggaaaattgccattgcctttatctggctcgacaatgagttgcatgaatcggccgatgtggaagctaaggtggttaaactgttgcaacttaccgcagaacgtctggcatgaaaaagctactttcttttctgctcctgcttcccatttatttttaccggaactgcatttcaccctttacgcctccctcctgtcgattcactccgacttgctctcaatatgccatagaagcgatacaaaagcacggacctttcaaagggctttacttagccatacgacgcattcttcgttgccacccttggggaggttcgggatatgatccggttccttaaaagcctgttttcacatgattgacactctctttttcgacgcacacacacatcatttgccccaaccacagaccactgccatcgtgagctgccgcatggacgagaaaacggcttcttcttacctgcaagctccatttatctccgtcagcctgcatccgtggtatctcacggaagaaaacattcagtcacaaatagattggctggtacagactatccaaagtgattcgcgaatagtcgcactgggagaagccgggctggacaaagtatgcgatacccctttcgacttgcaaatacaagctttcaggaaagcgatagagttatcagagacatatcatctccccttagtgatacattccgtaaaagccactgaagagctgtttgccttgcacaagaaatatcaccccgcacaagcctggattatccatggtttccgaggtaaaaaagaacttgccaccgacctgatacgacacggattttatctctctttcggaaaaaaataccaggaaaaagcattgtccatcgtccctgcagacagattattattggaaagcgatgaagcagacacagactttccgagcttctatcgtcaagtagcctcactacgcggaacctcttttgacagcttggttgaaaatatcaaagaaaatgctaaccgtctcttttttaatcgctaaaaattggttattcagataaagtgtcgtacttttgcttctgtattattaaataaatatgttaaactaagaatttcattcgatgaattttgtagatgaactaagatggcgtggaatggtacataccatgatgccgggcacagaagaattgctggagaaggaaatggtgacagcttacctgggtattgaccctacagctgactcgttgcatatcggccacttgtgtggcgtgatgatgttgcgtcatttccagcgttgcggccacaaaccgctggctctggtaggaggtgcaaccggtatgattggagacccttcaggtaagtcacaggaacgtaacttgctggatgaggaaacactgcgccacaatcaggagtgtatcaagaagcagttgggcaaattcctcgatttcgaatcggatgcccctaaccgtgcagaactggtaaacaactacgactggatgaaagacttctctttcctggattttgcccgcaccgtaggaaaacacatcaccgtgaactacatgatggcaaaggaatcagttcagaaacgtctgaacggagaagcacgcgacggtctttcattcactgaatttacttatcagctgttacaaggatacgatttcctgcatctgtatgaaaccaaaaactgtaagcttcagctgggtggttctgaccagtggggaaacatcaccacgggagcagaattaatccgccgtaccaacggaggtgaagtatttgccctgacttgtccgctgattacaaaggccgacggtggtaaatttggtaagacagaatcaggaaatatctggctggacgcacgatatacctctccttacaagttctatcaattctggctgaatgtaagcgacgaagacgctaagcgttatatcaagatattcacttcactgagcaaagaagaaatagaaggcctgattgcagaacacgaacaggctcctcacttgcgtgtactccagaaacgtctggctaaggaagtaactatcatggttcactctgaagctgactacaacgctgctgtagaagcttctggcatcctgtttggaaacgctacttctgaagcattgaagaaactggatgaagataccctgctttctgtattcgaaggcgttcctcagtttgaagtagccaaatcggatattgaagccggtatcaaagcggtagatttattcactgaaaaggctgctatcttcccatcaaaaggtgagatgcgtaagctggttcagggcggcggcgtttctttgaacaaagaaaaactggctgcatttgaccaggaaattaccacagccgacttgctggatgaaaaatacctgctcgtacagcgcggaaagaaaaactattatctggtaattgccaagtaaattcttttagaaaaaataccggaaggctgtctcaattcaatttggggcagcctttcttatgtcttacagttccgtccataaccctttatccaacagcaagggtcaagttgccagtactttcaggccagtactgcagtactccctaagcagtactttagtactttcaaggaagtactggagtactgccaaagaagtactggcaggagatggaaatcacctcagaaaataaagcctgagagcaaaaaaataccggctgactccttgtgaatcaaccggtactttaggatatgtccggaaagcaatccttccggatatttcagcacttatttctttgcatccagctctttaagcagttcatctaccgcagccttcaactgtgtatcctctcctttcactactgtttcaggcgcgttcaacacatatacatccggctccagctctttgttttccaggtagcttccgtccggcagacgataaccaatcacaggaataccgtaaatcaaatccgggtcttgcatccgtacccagtttacgctggtcatggttccaggtaccggagcacctaccagcttacccatctggcgatgtttatacacccacggtgtgccgtgtgcattggaataattggcttcgcactgtaccatgatagaaggcttgttccagcgacggctcggcatgtcgcatgcttcacgaccacgaatcacctgtgtcaaatacttctgaccactgaacagcacttcaatatcttcatgcaaacgacctcctccgttgaaacgggtatcaatcacaataccttcgcggttgttgtatttacccaaaatatcggaatataccgtacggaagctgccgtcgtccattgattcgatatgtacatagcccaaacggccatttgaccatttatccacatctgccgcacgctgttttacccaacgttcatacagcagactgctcagcgttcccccgctgataggcttcaccacctcatcccagcgttcttttgattgtgcatcgtagaatgaaaccaatatcttcttgcctgcctttccgttcagcaaagcagagaaatcggcatctaccggctgaccgtcaatcttttcaatcaccacacccggttttacccgtgtcgttttccggtcgaacggacctttttccaccacttcgtccactttcatgccttttccggtataattccagtcataaagcaatcccaagctggcagttgcttcttttgctcccggacgataacggccacctgtatgcgatacattcagttcgcccaacagttcactcaacatttccgcgtaatcatacttattattgatatgcggcaggaaacgacgataattagcggtcatagccttccagtctaccccgtgcatattcacctcataaaaacgtttctgttcctcacggcacatattatcatacatataagcacgttcggcagccaaatccatcttcatttctgcacgataagaaataggcttcaacttctcaccgcccaaatccattttctgcatggagcctgaacctaatacgaaaagattttttccttccttatccatttccatatcggcccagccggaacccatcttgtgcaacaacttggtttcccgcttgcgcaaatccatcttccacatatcgaatccgcgctcaaaagctgacaggtaatacaaactttctccatcctttgaaagaatggccgaagcgatgctcgatgaattcggagtcagacgtacgatgcggtcctgaatgccctccagttccaccacgatgtctttcactttgtcggcttcctctttcttatctttatcttcttttttatcttctttctttccgtctttcttgtccgcagctttttcctgttctttttccagctccttctggagttcataatcctccttgctcatgcggaacttatcgtaggcatcctgattgacaaataccatcatcacatcgtccagtgaaccccatgaagcgtgatttcgcataccgtaacgctctgtagtaaacaaaatggcattaccgtccattgtccacttcggagaactgcttgtataaccactgttcgtcaggttgactaactctccctttccatctgcactgaccaaagcaatgtccgtgtaaggatcatgcttgtttccgataaattccagtgtaaaccatttgccatcgggcgaccaggcataattaaatcctccactcaattcataccatgtgcttccatcggtaatctgacgtaccttattcgtttccaaattcagcactttcaggcggatacggtcctcaatgaaagccacttccttgccatcgggtgagaacttaggatacattcgttccacagtcttcgaaggcaacagcacttcttcttttatcaatgtcgcattcgggaaattcaaatcctctttccgttcaattttcgccttataaagctgccagtttccatcgcgttcgctggcatataccagtgtacggttgtctgccccgaaagaaagtccttcttctgcttcaggtgtgtgcgtaatctgcttggtagtaccatattccacagaagtcacaaatacttctccacgcacaatgaaagccacctgcttgccgtcgggcgaagctaccgcttccgatgctccccgagtatagctcaatgtaaccggaatttcctggtcatcccgtgtcagtgacacattcaccttactcggctttccaccttgtttctgcgtataaatttctccattataggtatagcacagcgtaccgtcacctcccaaagaaagaaaacgtaccggatgtgtagagaatgaagtcagcggtttcacctgttccggattatccagcgggaaagaatagacgttaaacgagcctttgttgcgctcactcaagaagaaaacctccttaccatccgacgaaagcaccggattacggtcctctcctgcccgcttggtcagattggtatgcttgcccgatgccatgtcgtacatccatacatcccgtgtgatagaagaagtatgatgtttacgccattcatcttcaaatcctttccggtcctgatacaggaatttgtcgcctgccgcattaaaacaaaccatttcggcaggagtacccagaatttgttccgtttttccaccttctgcagaaaccttatacagttctgtcatggcagaagtcgggaacagtgcactgctggcagggtcctgaatgcttgcagaaaatacaacatactttccatccggtgtaaacgcagaaggaatttccgaagcagaattcgtagtcagtctgcgggcagaaccgccgttagccggcataacaaacacatccgtatttccaaaacgatcgctggcaaaagcaatctgtttaccgtccggcgaccacaccggagacgactcatacgaatcttgtgtagtcagctgtaccgcttctccacccttggcagacactttgtaaatgtcgcccttataacaaaatacaatttcttttccgtctggagagatacgtacatcacgcatccatagcggagtaaccgccatagcatgtgcaaaagtagtccccagcaacaatgtgcacaatatttttttcctcataagctaagttgttttgcaaacaaaggtaaggattcccgtcagaaacagaaaaaaagtcagaaattatttggaaggtattcataaaaacgcttatctttgcagcgttttctgaggaaaacaccaagaagtttggactatggtgtaatggtagcacaacaggttttggttctgtttgtccaggttcgaatcctggtagtccaacgtttttcaagacatttatagtcaaaagcccgctaaaacgacattttagcgggcttttttgttatcctgacaaatataaaaaatattaaaaatttactctcaatagattttattaattggcatatcattttttttataaaataataaatatatttgcatcgaaaaaacatctgaagcagaataataaaaacttcggatatattacaaaccaaattaacccaaaatcatagtagtatgaaaaaaggcatttttttcagagaggactccgtatggagaaaaagattattgcaatcaatacctgtcataacagggttattcgttgtcgctaacggtcatgcagaccccatcacaactattgattcgaaactaatcgtacaacaaacatctacgattacaggtaaagttctggacagcaatggagaggctctaattggtgtaaacgtgctagaaaaaggaacgacgaatggtaccatcactgattttaatggaaacttcacattaaatctatcatcgtctaacgcgacattagttttctcttatattggctatgtaagtcaagaaattccggcaaaaggaaagaaaaatcttacaatcactttaaaggaagattctgaaacattagatgaagtcgtagtagttggatatggaacacaaaaaaaggtaaatctgacaggttctgtatcctctgtttcagccaaagatatacaagatgtaccaacctcaaatacagcatctttactacaaggtcgtatgcctggtttggtgataagccagaacggaggtcaggcaggtaaagaagacatggaaatcagagtacgtggtgtaggaacattcggtaacaataatccgatggttttaattgacggggttgaaggaacactgtcacagatgagtgatattccagcagctgacatcgaaaacatttctgttttaaaagatgcagcgtccgccgctatttatggtgtacgcgcagcaaacggtgttatcctaatcacaaccaaaaaaggacaagctggaaaagtttcagtcaactattctggcaactatacactgcaaaagcctatgttgccgacttacattgacagttatcaatgggcattaatgaaaaatgatgtagctccaggcacttacgatgcaacagcgctacggaaacttcaagatggttcagaccctgatcattatgccaatacaaactggcttgacgaggtattcagaaatgcaagtatgcaccaacaccatctttctgtttctggaggaaacgaacatacccattatatgacttctatttcttattctaaccaagaaggtataatgaagaaaacaggagccgagaaattttcattccgctctaatgtagatagcaatatcggccgtttcaattttggcttaaacgtttcaggaaacaaaaacaatgttgaccagccagcctctatcgctccaagcggtgaaacaagtgtcatgcgttatttatcatggttctcacgtcccacagttcctgtaaaatattccaacggttactatggctatgtagacggatctttaaaaaatgcagaattagtcaaaaacccgctacaattcatggaacaaggatatcgtcttgacgaagcctggcgttttaatggaaaagcatatgcaggtatcgatattattgacggactaaaattcaaaacaagcctggcatatgcattctacatgaatgccactaaaaaatatacgcccaaagaactggcacgatatgatgcagaaggcaatatattaaaagcagccggacaaaacaacagattagaagattattattggagagaagctacgtggacaaatgaaaacattcttacatacgacaaaaaattcgggcttcacaatttaaatgtattattagggcattctcttatcagctacactcgctacacaactacagccggcatagaaggctttccaacagagaatatttatgaaatggatggaggatcaaaaaatccatcagcagtaggtaatagtgatgaatacagattgcaatcattcttcggacgtatcaattatagttacgctgataaataccttcttgaagtaaatgtacgacatgacggttcttcacgtatgcctaaaaataacagatatgcaaccttcccttctgtatctgcaggatgggtatttaccaatgaatcattcatggagaattatcaatggctattcggtaaactccgtttttcttggggtaagttaggaaaccaagaaattggcagctacgcttatttggcaagtttaggtgcatcgggaaattattattttgaccaaagtaaagacccacaaactggaatggtatccacctcaattccaaatgaaaacataaaatgggaaactacacgtactttaaatgttgctattgatttaggttttctgaacaacaaaattcaaacaacttttgaatggttcgataagaaaacctctgacatcctgatgcaattagcaatgcctaatatcttcttaggctcattgagtgctccctaccagaatgtaggtacagtaagaaatagaggttgggaatggaatgtgaattacaatgacagcaaaggagactggagctggtatgccggattcaacttgtcgcatgtgaaaaatgagattctctatatgggtggattggatgaacgtatcagcggacaaacaatcaaccgggtaggtgagcctatcggagcatattacgcataccaggctcttggtttatacagaacagaagaagatttgaacagaactaactcaaagggtgaagtaatcaagcaaaatggtgttgctcctaaattaggtgacatcatgtatgcagacttaaatgacgatggaaatatcactcctgaagacagaactattatcggtaacccattccctaaatattcctatggtatcaatttaggagccagctggaaaggattcgacctttctacattctggcaaggtgtagcaggtatttaccgttacaattgggaaacgacaacagatatccgcggtaattttacagatagatggttagatcgctggtctactgataatcctaatggtaaaatgccggcattaggcaacacaatgaatgaacaattctcatctttctggctggaaaatgcaagctatttaagattgaagaatttcgaattcggctacacattcggcaatctccccaaaattggtgtttcaaaactacgtatctacttcgcaggaacaaacctgcttacattcaccaaacttgacaactgggatccggaaaaaggtgctggtgatacaagaaatgacaactatccgaatgccaaatcattctcattcggtgtaaacgtaaccttctaactataaaaactacaattatgaaactaaaatttaatcacttatacagaggattattattctccggcttaatgttagccaatatttcttgctccgatagctttctggaattggataatcccaatcaagtatcagacaatacgttctggcaatctgaaagtgatgccttaatggctcttgcagcatgttatgatgctttacaatccgatcatttatacgatgacaatgtagatggaggaggattcggtttccttatgcgtgaaacaagtaccgataacggacagcatacttggggtgactggatgcagggaagcaccgtttctaaaggaacttccgcaacgactgacggatgtttttcaaactattggaatgcaaactatgaactaatcaaacgttgcaatctactattatctaaaatagatgctattccgatggaagacaaggctaaaggtaccatcaaagcagaagctatcgcattaagagccttgggttattgcaacttgacttctttgtatagagatgtaccatacatcacagcccctttaactcttgaaaatccggaggctcccaaagagcttaaaagtaccattgcagacaaagttttagccgatttgaaagctaataatccgaatttgccaccaaagggaacagaacaaaaaggaagaatgtcacaagaagcaggatatgctatcatgggacgtatggcattattcaatcaaagatgggatgacgccatcgaagcatataacaatgtaattggtaaagtttctttatttaaatctggagatggtactgattatgaagccaatttcagagatttgttcaaagaagataatgagacttgtgatgaggttcttttaagtgtacactacacaggccctggactaaaagagggcagcacttttggagtctgttggaatgctcctttgaatgccattgaagcttcaatgaatttatgtgatgatttttattgtacagacgggttacctattgatatatcacctctctttaataaaggcagccttgaaaaaggtaagcacacacaagagaatcctgattatgcgagatacgaaaaccgtgatccacggttaaaagcaacattaatgctgcccggaatgacttggaacggaaaagaatatacaaataatttacctgccaaatctacagcttgtattcttaaatggtttaccccagaaaatacagctaatgaatatgacggcagcctggattattacattattcgttacgctgaagtattgctttccatggcagaagctaagattgaaaaaaatgctccacagacagaagtaacaccatacatcaacgaagtgcgtgcacgcgtaggtatgcctgctgtagaagctgtagaaggaaccagcctttcccaggatgaattaagaaaaatagtccgccatgaacgccgtgtagaattagcttttgaagatttacgtctggcagatttatacagatggggagagtgggaaaatgccgtaaaacgtatgcaaaatgataaagaattctatggtgataaattctgtgtatatgattttaattatcgtggagcacaagatacagtctggcctattccacaaggagaaatagatacaaacaagcaacttgttcaacacgatgaatggaaataacatgctgaataaaaaatagggttgtcaatagacaactctatttttatctttatcaaagtatagaatcttaataataacagtatgaaaaaaacattgcatattttatattataccattatttcaatactcattccattaccatgtttatcagtttcgcctcaaaaaggaaatatcttatttatagatgagttcaacgaaaattctattataccagattcttcaatatggaaattatgtacttatggtaatcacacatggggacaacatttcaagaatgtagaaggctatgaaaatgtgaaagtagaaaatggagtattaaagctaaaagtttctaaggataaaaattcttataaaaatggagggattcgcacaacgtcaggatttccctgtaatacccggttggaagtcaaagctaaattaactaaattagtaaaagggggatttcctgccatctggcaaatgccaatggatgcaccacaatggccacgtggtggcgaaatcgacctaatggaatgggtacaaggtactccaaatgatatataccaaactgtacacacttattttataaatggagataatggttccgcaggagccactaatccaaatcgacctaccaattttgatataacccaatatcatgtttatgcagcagacagaacggaagaagctataatattctacatagatggaaaagaaacatggagatatcctaatcagcatctaccagaagaaaaaatgcaatatccattttgccaatacaaatacgatattattttaaatttctcactcggtggagacttaaacgggaatccgacttggccagggaaaatcaatgacgatgacttaccaggagaaatgtggattgattgggtaaaagtttcttcattatagctattcaaaataaagtttcttaattctttacgcctaaacatgacataaagcaactgatataaagtaagtagaatgcctgtcacttctcattccaaatttttacagatacataatttcacgcaaacgtaactgcgtagcaatctttctgtaataaaaaacacggacctttgggcagactttaaaaaaggaaattattatggaaacaattgctgacaaatatacagtggagtgtactcccgacgggggatattatgcttatctgtgcaatcatgaacaatgttttgcatacggtgaaacagaagaagaggtcctggaaaatctggagattgccgcagaagagttctacaatgaattcagttccatattctacatggaagacatagcttgatagtgttccaaaaaacacacattgtaaataaattgccaatatttagtcattatcaaaagccatttctgtgggacgcaggaatggctttcttcttgcttcgtctcctcgcctgttgaaacaagttattcatttaacagtcatacccttgtaatatacattcccttcttttgtacagcgttaagaaaaacatgaagcatgaaagaaagaccttattaccggaccattgtggtgtcggacattcatttgggaactacccattcgaaagtaaaccaaatcagtgattttcttagtagagtagactgcggacgactgattctgaacggtgacatcatagacggatggcatctgcagaaatccggcatcagcaaatggaaagcggaacacacgcacttttttaaaatcatcatgaaaatgatggaaaaacacggtacggaaatcatttatgtacgtggcaatcatgacgattttcttgacaatcttgctccccttcaattcgccaacctgaccattacaaaagattacatactggaaagcaatggaaagcattatttcgtaacacatggcgacgtgttcgataaggtaactaccagcatgaaatggctggccaaactgggagatataggctatacgctcctgctatggctcaacagccagtacaaccgctatcgcgtaagaaaaggaaaaccttattattcactttcacaggccatcaagcagaaagtaaaatctgccgtatcctatatttctgattttgaaaacgtactggtagacttcgcgaagaaccgtcagtgtgaaggggttatctgcggccatatccaccatccggaaaaccgcatgattgaccagatacactacctgaactcaggcgactgggtagaaaccatgtcggcacttactgaagatgaaaacggggaatggaaaataatctattacaccgaattggaacagcaggctacgaaacctgaagaaaataatgtcataccgctaatacctatcgcatcatgaaaatcttatttatcgttcagggagaaggaagaggacacctcacgcaagccatttcgatggagaaactgcttagaagcaacggacacgaggtggtagaagtactcgtcggaaaaagtgaatccagacgacttccgggattttttatccggaacatccaggctcctgtcaaacagtttatcagccccaatttcctgcctacccacgccaacaaacgggtaaacctgacacgaagcatcttatataacttgttgaaagtgccggaatatgtagaaagtatatgctacattaaccggcatatcaaagaaaccggtgccgaactggtcatcaatttctatgaattattaacaggattgacttatttctttttccgtccggcagttcctcaaatctgtatcggtcatcagtacctgttccttcacaaccaattcaaattacccaaaaagaacaaatgcagcctgtttttcctgaatttctttacacgactgactgcattgggagcttcacaaaaactggccctctccttccgctccatgccagaagacaatcatcagcacatcagcgtggttcctcctttgttgcgacaagacgtattgcagcaggaaagcaaaccaggtgactacatccatggatatatgctgaatgcgggattctctgaaaatattctgaactggcataaaaaacatccagatactcctctccgctttttctgggaccattgggaagaagaacctgtgaaaaaaatagactccacgctttctttctatcagcttgacgatatagagtttcttcgccagatggcaggttgcaaagcatacgccagcacggcaggattcgaatcggtatgcgaagccatgtatttaggaaaacccatcctaatggtaccagcccatattgaacaagagtgtaatgctttcgatgctatgcagaacggagcaggcatcatcgaccacaattttaacttgagcaacttgctgcgtttttctcaaaactacaagcccaaccgcctgtttgtagaatgggtgaaatcggcagaatacatcatattgaatgaaatagagcgatttgctccgcaaaataccctgcaaggaatgtatctggtagaggagtttgtgtaaaaaaatctaaataatcgttctgaaatcatattgtaacataaaatcattttctttgcaaaaaaagtgattttatggtaacaagaaatagaaaaaaagaaaagccttatttggaaagagacatcagttggatgtactttaaccgcagaatcctgcaggaagcaacccgaagtcatgtgccattgctggaacgaatggcctttcttggcatctattccaacaacctggatgaatttttccgtgtcagagtagcttctcaaagccgtattgcggaatgcatggataaatcggctgccaaggaaagagaaaaagcaaaaaaactgcttaagcaaatcggaaaactgaacgcacgttacgtaaaggattacgaagaagctgtaagcagtgtgacagaggatctgaaaaaagaaaatatctatctggtatccaattcggaagttactcccgaacaactacagttcatccagtctttctataaagaaaagctgaatggacttattgtgcccgtatggttctcagccgttaagttattggattacgaaaacgatgaaaatatctacctggccgtaaaggtaagcaagaacggcaacaagccaatggcggactatgcttttctggaactcccggtaaatatttgcggacgttttgtgcaactaccggatcatgaaaataaaagttatctgatgtatctggacgacgtcatccgctgctgtcttccgctggtgttcgaaggactgggatacgacaaatacgaagcctatgcctttaagtttacccgcgacgcggaaatggaaattgacaacgacctgcgcaccggtacacttcaaaagatttcaaaaggggtaaagagccgtaaaaaaggagaacctcttcgcgtaatctatgataacaacatgccgaaagacctgttgaaaagggtgttgaaaaagcttgaacttgacagtctggacacagtaattgaaagcggacgttatcagaaccacaaggatttaatgaaattcccggattgtggacacagcaacttgaaatacccgaaatggcctcccatcctgaaaaaagaactcgacgggccagagagtctgttgaaaaaaattcaggagaaagaccgctttatccacgtgccttatcataatttcgactccttcatccgtgtgcttcaggaagcagctgtcagcaaacaggtaaccagcattaaaattacgctctaccgtctggccaaggagtcaaaggtagtaaaggcccttatcggagctgcccgtaacggaaagaaggtaaccgtagtcattgaattgctggctcgttttgatgaagcatccaacatcaactggtcaaagaaaatgcaggatgccggcatcaaggtgattttcggtgtagaaggcttgaaagttcactccaagattacacacattgagatgaaaagtggaccggatattgcttgtatcagtaccggaaacttccacgaaggaaacgccaagatgtacacagactgcatgttgatgacagcttatcccaaaatcgtgaaggatgtaaatcaggtgttcgaattcattgagcgtccttacactcagatacgattcaaagaactgcttgtttcacctaatgagatgaaaaacaagtttgtgacactaatcaacaacgaaataaagaacaagaaagccggaaaacctgcttacatcaagataaagatcaatcacatcaccgacccgattatggtggaaaaactgtatgaagcttcggaagcaggcgtagatattgacctggtagtacgtggcaactgttcgctgattaccaatgtacccgatgtcagcacacacatccggattcatggcatcatcgaccgctatctggaacattcacgcattttcatcttcgccaacggaggagaagaaaagatatacttaggttctgccgactggatgcctcgcaacctggatcaccgcattgaagtgattactccggtctacgattcagccatcaagggagaaatgaaacgcattgtagaatacggcctgaaggataccctgcagggacgtatagtagacggtgcaggcgacaatctgttctggagtgaagaaacggaagaagctcctttccgctcgcaggaagcactctacaattattacctggccgaaaatgaacaataacttaaatgtgatattatggacaatatgctaaaagactgcaagacgtactatggagccattgatattggttcgaatgcagtgagattgctcatcaaatgtgtagaagaagacgaacaaggaaaggttttcttttcaaaagtgcttcttttgcgtgtccctctgcgtctgggatttgacgtatttgcgataggaaaaatttccgaaaccaaggaaaagaacatgctccgtctgatgaaagtgttccatcacctgatgaaaatctacgatgtggaagactaccgtgcatgtgccacctctgccatgcgtgatgcaaagaacggaaaagatattatcaaacgcatcaaaaagaaaacgggaatccgcattgaaatcattgacggacaggaagaagccaagatgatatacaacaaccacattgaatgcatggaagaccgtaacggaaactatatgtatgtggatgtaggtggaggtagtaccgaaatcaacttgctttcacaaggagaactcgtatgcagccgttcgtacaacatcggtacagtacgtattctgaacaatgccgtaaaggaaactgaatgggaacggttgaaaaaggatatgcaggaactggctatttcttaccccggtacgaacatcatcggttcgggtggaaacatcaacaaactttatcgtctggccgaaaagaaagacaagaaaaagcagcgaattacggtggaagtgctgcacaaactgcatgaaagcctgaacaagctatctgtagaagaacgaatggaaaaataccagctcaaacccgaccgggctgacgtaatcgttccggctggcaatatattcctgaccattgcagacattattcatgctacgcatatttatgtacctgtaatcggacttgccgacggtatcatcgacggactgtacgccagtcacctggaagagaaacagaagattttaggcattcttccaagtaaaaaagatgcttcggacacacctgaagatacggaagagtaagtcttatttttctaataataaaaaccgctttatgagtaaatttctcataaagcggttttttattattcacaacctgtttataaactattatttcacataaacatgttgtatttcaagaatatacatcttatgtaaattaccatgcccttcaccataccaacggtttattaacagcttatccacaaacttatcctcctgaatcatgtctgcatataatttcttgcacaccaaaaccagacgtgcctgttcgtacgaaatggttccatcttccattacataaggtttcaagcctgaagcagctactttatccatatcccggcctgatttggaaccacagattttatgtacctctttatgctcttctcctaaaaaagacaaggtcagcttatctccttcttcaataaactcgtatgtataacgttccggacgaataaagatgaaagcaactggttttccccataaaataccggttcctccccagctggcggtcatcatgttaaacttttcctgcgtaccggccgtcaccagcatccactctttgccaatggcatcaaacatattgtcctgcaattcagacacactaatttccttcatattccattcatatttagtttctgcaaagctaaatatttttcctcttcccacctttcccctttttttattttttaaaccgaattaaaatcctatcctctcaaaatatcttttcctatctcggccttttaaagtatctttgcaaggaatatcattaactaaaaaagaaaggactgaaccgtggcaaaagacaatgaggttgtactgaccccgatgatgaagcaatatttcgacttgaaagcaaaacacccggatgccatcatgctattcaggtgtggcgacttttatgaaacttactcggaagatgctgtagcagctgctgagattttaggaatcaccttgacaaaacgtgccaacggtcaaagcaaaacggtggagatggcggggttcccccatcatgcactcgatacttacctgcctaaactgattcgtgcaggacgaagagtcgctatctgcgaccagctggaagatccgaagacaactaaaaagcttgtcaaacgcggaattacggaactggtcacaccgggagtagctatcaacgacaatgtgctttcttacaaggaaaacaacttcctggctgccgtgtatttcggaaaaacagcttgtggtatatctttcctggatatttctaccggtgaatttcttaccgccgaaggacctactgactatatcgacaaactattgaataattttgcgcccaaagaagtgctttttgaacgcggaaagaaacccatgttcgaaggaaacttcggcagcaaattctttacgttcgaactggaagactgggtattcaatgaaacgtctgcaaaggaaaagttactgaagcatttcgaaaccaaaaacctcaaaggtttcggagtggaaaatcttcataacggcatcattgcttccggagccatcctgcagtatcttgacatgacccagcactaccagattggacacatcacttctttgtcacgcattgaagaggaccgcttcgtacgcctggataaatttacggtacgcagtctggaacttgtaggcagcatgaatgaaggcggtacctgcctgctggatattatcgaccacaccatcagcccgatgggagccagaatgctgaaacgctggattgtattcccgttgaaagaaatcaaacctatcaacgaacgtctggatgtggtggaattctttttccgggagccggaattcaaggaattcgtcgaagagaaacttcatctgattggcgatttggagcgtatttgttccaaagctgccgtgggacgtatttctcctcgagaagtcgtacagctgaaaacggccttacaagctattgagcccatcaaaaatgcctgcctgaatgcagataacgagagcttgcgccgtatcggtgagcaactcaatctttgcgcatccattcgtgataaaatagccaaagaaattcagaatgaccctcctctgctggtcaacaaaggaggtgtgattgccgacggagtaaatgccgaactggatgagcttcgtaaaattgcgtattccggaaaagattacctgttgcaaatacagcagagagaaagcgaactgaccggcattcccagcctgaagattgcctataacaacgtattcggatattatatcgaagtacgtaacacccacaaggataaagttcctgcagaatggattcgtaagcagacactggtcaatgcggaacgttatattacccaggaactgaaagaatacgaagaaaagattctgggagcagaagacaagattctgattctggaaaccaagttatacaacgaactggtttgtgaactggccgaatttatacctgccatccagatcaatgccacacagatagcacgtctggactgcctgctgtcgtttgccaacgtggctcgcgccaataaatacatccgtccgaatgtggtggatgatgatgtgcttgacattcgtcagggacgtcatccggttattgagaaacaattgccgccaggagaaaagtacatcgccaacgatgtgtatctcgacacggaagagcagcaaatcattattatcaccggaccgaacatggccggtaagtcggctttgctccgacagactgccctcatcaccctgatggcgcagattgggtgctttgtccctgccgaaagtgcacacattggccttgtagataaaatctttacccgtgtaggtgccagcgacaacatttcagtaggagaatctacgttcatggtcgaaatgaacgaggcagccaatatcctcaacaacatttctccgagaagcctggtactttttgatgaattgggaagaggaacttccacctacgacggtatttccattgcatgggctatcgtggaacatattcatgaacataagaaagcccgcgcacgtaccctttttgcaacgcactaccatgaactgaacgacatggaagctcagttcaaacgcataaaaaattacaacgtatcagtcaaagaagtggacaacaaagtcattttccttcgcaagctggaaagaggcggaagtgcacactcctttggtatccacgtagccaagatggccggtatgccgaagtctattgtcaaacgtgccgacgaaatattgcaccagctggaagcggaaaaccgacaggaaggtatttcagccaaaggacagcccagcaaacaggctgcatccgacggaatacagctcagtttcttccagttggatgaccccgtactctgccagataagggatgagattctaaacttggatgtaaacaacctgacaccgctggaagccctgaacaaactgaatgacatcaaaaaaattgtaagaggaagataatttgtaacgcttatgtcaaccattatttatccggcccctatattcggccccgtccatagccgccgacttggcgtatccctcggaatcaacctgcttccgggagacggtaaattctgtacattcgactgcatctattgcgagtgtggatacaacaaagatttccgccccaaacaaaaggtacagacacatgaagccgtacgtgaagcactcgaaaagcgtctggctgagatgaaagaaaacggtccttttccagacgtactgacttttgccggcaacggagagccgaccgccaacccttattttccagagattattgaggatacactggccctgcgcgacaaatatttccccaatgccaaagtcagcgtactaagcaacgctacccttatccacaacccgaaagtatttgccgcactcaacaaagtggacaacaatattctgaaactggataccgtggacatggactacatccggacagtagaccgccctaccggacactatgaggtggaaaacatcattgaaggcctgaaagcattcaaagggaacctgattattcagactattttcatgaaaggtaccacggaagacggaaaagatgtggataacacctccgataaatacgtacttccctggctggaagtagtcaagcaaataaatccccgccaggtaatgatttataccatcgaccgggaaactcccgaccaaaagcttaaaaaagcgacaaaggaagaattagaccgcatagcaagactcgtagaagaagcaggtatcaaagccagtgcttcgtattaaaaaacaacagcgtgtacgaatttcctggtgagttcgtacacgctgtaatttttttaatatgacttattcaggacttttcttctatcttggaatgatagctctcataagagtcccatttcgctttataggcctccgatttacctgaaggaaccattattttcagtatactctccttaaatggaaatggattacctgtaagttccggagcttcttctccctcaaaagtaattgtttctacagtagagtttgttcttaacgcctggtctcccactttcttcaccgatttaggaagggttatttctttcaactttctgcaacctacaaaagtccatccttgaacttcagaaagactttgaggaaatgcaaaggaagtcaaagacgtacaattctgaaacgctcctatttctaccatacaatcagctgttttcatttcccccacataggcaactttagttaattgttcacagtcactgaaggcctgataacctattcgctacatattattcgaaagagttacagacgttaattccactactcctctgaaagcttcgtcatctatctcctgcaattctgctgaaaatacaacctcttccaaatgtgtacctaaaaaggcctgcaaacctatttttttcaatgaagcaggcagagtaacttttttcaatcctgtttcacgaaaagcatcggaactgatttcctgcagagccgttttggacaggtcaacttctgtcaaagccacacaatcttcaaacgcatgtccacctatctcctttaaagaagcgggaaacgcgacagaagccaatttctggcttcctgagaaagcttgaagctctataacaatccctcattaagcactaaagattcgatatgagagtctctgaaagccccagaagcgatggttttcacttctgccgggagtacaacctgagttaaagaaggatcttttataccggttaatattccattttctatcacaaaaggagattctacattctcaccggcatcttcaccgggtttttcttccattgtttcatctccctctgcaccatcttgatgaacgacttctattttaaaggaatgcgctttcccaagcgtaactgttcctcctctactccaccatctataatttgaggcatcctgcaattcctgcaccacaaacatcagctcagcagatgttcctttcacaaaccatggacgactttccaacacaaaatgagctattcctttttgattggtaatgacctcggccaatggctttacggtatgatctttctgaaaatctttataacgattctcatcgtataaaccaactgttttattttccaaaggcttcccttttgaattgcatacgaaaatttctacagttgcgggagtttcattcaaagatggattctccttcttgcagcttagaaaaagcatacacatgctccacaaagctacggacacaaatttgattatgttcatagattattaattaaaaaagatagtgatttttttctgtatatttataacaaataaaagagaaaaaagttttcaggcaatatcttatttaactaaaataatctgattgattttatatatacctctttttatatagaaatcataaacatttatttatcaaccatttacgtttgttttaactttgtagaattgtacaaaatctccacattacgatgaggattaattacccatttagcagattacggaatttcagctattttttatcctcgtctgattaccaggtcattaagccttacactgtattttggcattctatttgatttactgttagcgtagaaacttacttaactaactattaaaattgaagcaatatgaaaaagttatttgtagcagtagcattggtaatgggattaggaacttcagttgcgtttgcagaaaacttccacgcaagtgtagacagtgtgaacattgtaaatgagttcaaacccatcgaagtaaaagatcttccacaggcagttctggatgcagtgacaaaagattatgctgaatttaccatcaaagaagcatacgtagaagaagtggaaggaacaaaaacctacaaagtagttctgacggacgcagaagacaacacaaccgccgtgttatacactgaaaagggtgaagtattggaataagcattcacacgattgacgggaatgtgccaagtacggcatgttcccgttttttttatttttccacttatatgaaataaaaaatcctgattcaaaatgaaccaggattttttcgcggtgcgtacgggactcgaacccgtgaccccatgcgtgacaggcatgtattctaaccaactgaactaacgcaccattaagtttttctttcgttgctttctctctcgattgcggttgcaaaggtaggcgttttttttaaacctacaaactttttggatgttttttttctaacttttttcgataaaaatcataacatactgattttcaacacagattaaaatcattttttttcgcttaaaagaagagtcataaagctacatcaagccgtttcctccaaaatatttacagaacgtatctacgaaaataagtaaattatcccggtttctttatgtttcacttatgagaaacgtatgttttcggatgcagaaacatacgtttttcttaccggaaacgtaaggttcagctccggaaaacataaaaaacgatgattcatttttgatttatcgcatttgcatcagcacatttatcacacgatatggaagaaaagaagaaacgtatgggcataaaaaaaggagttccgctgaactccaacctttgttaaccttaaatctaatactatgaaaaacacgatgcaaaggtacggactttctggaattatgcaagttttgtgtgcgtttacatgtgttttataacatacattaagaagtagtattcttgctttaaaggccattaacaagcaagctgagactttttaaagtcccagcttggcagatatttccagcattttctgaataggcttaatggcttcctgtgcgatggcttcatccacattgacttccggccattcgtatttcagcgtattgtacaacttttcaagcgtattcaggcgcataaagttgcactcgttgcaagcgcaggtgctgtcttcaggaggcgcaggaataaagttcttttccgaacattttttccgcatctcatacagaataccgctttctgtagctacgatgaagtctttcttgtcgctggccatagcatatttcagcaatccggctgtagacccaatcttgtcagccagtttagctacggcacccttgcattccggatgaaccaatacctgtgcatcgggatactgctttttcaactcgataatcttttccacagagaatttctcgtgcacatggcaagcaccgtcccataacaacatctgacgtccggtgatagagttgatataatttcccaggttcttatcaggaccgaaaatcagtttttcatcttccgggaaactttccacaatctggcgggcattggtcgatgtcactaccacgtcagtcaccgccttgacggcagcgcttgtattgacatacgagataaccttgtaaccgggatggtcttttacgaaagcagcaaacttatcagccggacagctgtcggccaaagagcatccggcattcaagtcgggaatcaacacttttttgtccggacaaagtatttttgcagtttcacccataaagtgtaccccgcacatcacaatgatctttgcatccgttttggcagcccactgagccagtgccagactgtctccaatgaagtctgctatttcctgtatttcgtctgcctgatagtagtggcccaggattacggcatctttttcacgacacagtcttttgatctccgctttcaggtcaagcgctttttctacgggttcatccacataaccctttttcaaccattcttctttcttcattattagattatattttttcttctttttaaaagaaacaatgatactgataatatcccgttaataatgttagtaaaaataacacccttttttttgtttttccgttatcagcatctgggtggaggatatgaataactgataaacaagcttacgtattgataattttgattttatctatactattaacaatttgttgatacgttgcaaagttaaaaacttttcgtgtattcattcctgaaaattcgggaagaatgtgtttaaactgtcagtgaaaattatctctaacttttttggattgttggttttgagcgtgctataatctatttgtggaataatgcaagaaataattttcattttctatgcgcgcgttttttacaccttttccaccgttttcaacaaggttatgaatatagtttttatctttgcaggcaaacgcataccaaatatacgaaaaatgtctgaattaagaaaactgaagatcacggagatgaaccgcctgacggtggaggagtttaaggaagtagataagttgccgttggttgtggtgctggatgaagttcgcagcttgcataacataggtgcggtgtttcgtacctctgatgcatttctggtgaactgcatttatctttgtggtattacggctacgcctcctcatccggaaatgcacaaaacggccttgggagcggagtatacagtggactggaagtatttcaaacgtacgcaagatgctgtaaatgaacttcataatgacggatatacagtgctggctatcgaacagtgtgccggaagtacactactggatgaactggtattggagaaaggccggaaatatgccattgtattgggaaatgaagtgaaaggtgtgcagcaggaagtggtagacatgtgcgacggttgtattgagatacctcagttcggtacaaagcattcactgaatgtgtctgtaacggcaggcattatgatatgggaatttgcacataaactgttcaaattgcgttgaacactacctgtgaatatcttattaatatgttgttaatttattgatttacatagttataattgtccgttctcaacaagtgtaactactctttctaccatcttgtcgtcatcttcaggatggtattctttttttaggctggccccgaataaggctgcaaatgcctgataaaatcccgctttaaaaggtcccatgaaagctttcaccagctgataagacgattggttgcattcgcggttcaccagtttgataagcagctttccttgtgaaaaagtcagtttcttcatgcgggcggtgtattgttccttcaatcctttttctaccattttcatgtgttgctccttggctttctggttagggagcgtttccatgtattcgtatgtctcgatgactgcccgcttgatttctttggccaaaggaagtgtttttttcacatcccgtactaatttgtagtaatatctttcttgtcttttgtttttaaacttgagtttggggtaaacgtaaatgtttttcagcgttatacaaggtatagtgtctccttcataaacgcatacgggaactctgtatcctttaccggatgtaacaggagatacttgttgggcatgaatttctgaaaggaagcttagcccaaagaagatgagtatgtaaaaacatgtcttcatgcccgcaaaaatagaaataatattcagattacgtgatataattaacgtatttatagtatgtgtataacctggtgaataacatgtggaaaaagtatatttctctttgtgtatcagtattttttacctgtttaaatgtatgtgcccagtcttcctggatggaatgggaggaacagattggagaaaaggcaaatttgtcttcctgggaagaactatatgaaaacttgagtgaactggctgaacatccgtttaatattaatacggtaacgaaggaagagttggaacagttgccttttttatctgataaaatggtggaaaatattctttactatgtgtataaatacggaccgttggtcagtttgaatgaattatggggagtggaaggaatggataagcagactcaaactttcttgaaggattttgtatatgtgggtaactcagtggaaaaacgggcgttttcctggaaaaacttgtggaaatacaataagcaggaagtatggatgcggacagatattcctttaaatgaaaaggcgggctatgcgaatattcccttgggtgaagaggagaaatttgcttcgaaacggtattatggagatccgtattatttgaacctgagatataaatttcagtttcagcagaaagtttatgtaagtttggccgcagaaaaggatgcgggagaaccgttcttcagtctttataaccggaaaggattcgatttttacaatgcctctgttcagttaaatgatttcggtaagttgcatacgctggtattaggaaactacaaagccagttttggatatggactggtaatgaacatggggtttagtatgggaaaatacacctccttttccacattaaatcgtgcagggaaagggttgagcaaatatacttctatgaatgaaacgaattatctgcagggagcaggtgcttcctggaaatggaagaatcgctggttattgacaggttttgtttctttccgtaatcaggatgctacggtggataatgagtgtataactacgttgaaaaccgatggctatcatcgtttgaagaaagacatggaaaagaagaatacggtatttaataccttagttggtagtaatttaacttatgatggtaaatactttgaaggtggatttacggctgtttataatgttttcaacaaggtgttaaatccgacggagcggttgtacaatcgttattatcctcgtggaagatatttctataacgtaggagtgaattataaatggtataaagggaaatttgtattctctggtgaaacggcagtagataagcagggaaagattgccacgttgaatcagctgacttattcaccggttgtgaatacttctttgatagttatcaacaggtactatgacaagaaataccagagtttatatgcaaatggatttggagagaattccagattgcaaaatgaaactggactttttattggtttggaaacaagcctgttaagtaagattaaattgttatgttacggtgatttcttttattttccatggtatcgttacttggtagataagaaaaagaccataggaatggaaggcgtgtttcaagcatcttattcaccgttaaattcactggatatgttaataaagtatagttataaaaacaaggctaaaaattatcaggatacggaagaaagtaaactagtattacccaatatccgacaaagattacattatcagctgacttattcaccattgagctttttgcggtggaaaacggttgtggaatatgtgcgttcggatgtgtggaaacgggaggcttctaacggttgggcattgggtagtagtatgaaggtggatattcctcgtctttcgttgcggacttctctaagcggtatctggtttcatacgcaggattatgcatcgcgggtatatatgtacgagcaagggctgttgtatgcgttttctatgatgtccttgtatggaagaggagagcgatgggcttggactatggattataactggaaaaagcgtctgacttttcaggttaaatggggatggacgcactatagagatcggtcaactatcagttcgggagcagaagaaatacagggaaacaataatatgatttacagtttcaagttcgactgaagtggtgattttctgaagtaaggatataaaaaaaggagtaccgctgtactccaacctttgttaaccttaaatctaatactatgaaaaacacagtgcaaaggtacggaattctgggaataatccaagtaactaacctaaaatatactgttttataacatgatttaaagaaaactcctgttttgttaaaccctatttggattttaacagaacaggagtttttcttttaaccttttatttcgcgtttatttctgcgatttctcgagtggctacttccagagcttcgttgatattgctacagatattttcttctcccagcaattcgtagaatcctgatttttccagtaccttatgtactttttcgttgactcccgacaaaatgatgtggatgttttccttttgtgacatttcacacagggtggtaaggttgtgtatacctgtagagtcaataaaaggaacttttcgcatacggatgatacggattttcggacgatcgcccaaacgagacatgatttcttcaaatttggtggcaataccgaagaaatacggaccgttgatttcatacacttctacaccttgtggaatcattaggtgttcttcgtgtacttccaagtcagattcgttgtttggatcgatttcgtcggtaattacagaaatcttggtggtttccattacacgtttcatgaacaatacgcaggcaattaccaatcctacttcaatggctacagtcaagtcgaagataacggtcaggaagaaagtaataagcaggacagccacatccgatttgggatttttcaacaatcctttgaacactctccatccactcatgttataagaaacgataaccagtacaccagccagacaagccatcggaatatattgtgccaacggcatcaggaaaagtaagataagcaataacaccactgcatgtacaataccggctacgggcgattttccaccgttgttaatatttgtcatagtacgggcgatagctccggtagcaggaatacctccgaatataggtgatacgaagttggcaataccttgtgcgataagttccatatttgagtcatggcggtcacctataacaccgtcggctactgcagcagagagcaaagattcaatggctcccaatacggcaatagtaatggctacagggaacagatttttgatagcttcccagtcaagtgccggaacggctgcttccggaagttgtgctttgatgctgaaacgatcgcctatggtatcgatacaagtaattcctccatacattttcaggcagtaaactcctacagttaccagaatgatggcaactaaagagcctggaacttttttagagaacttgggagtaatggcaatgatgaatacactgactacactgacaatgacattccaccagtttaccgtatcgaagtgatggaagtaaagaatccattttccgataaaatcgcccggtactttttcacctttaaaatcaagtccgaaaatatcggcaatctgggtagtaaaaatggtgacggcaataccactggtaaaaccaatgataataggataaggaataaatttgataacggttcccagtttgaatatacctaataatataagaagtacaccggccatcatggtagcaaccatcagtccgtcgataccatattcctgaataataccgtagataattacgataaacgctccggtcggcccacctatctgtactttacttccacctaaaaaagaaatgataaagccggctacaatggcggtaatgatacctttttccggacttactccagaggctataccaaaggcaatggccagaggcaaagctacaattcccacaatgatacctgccatcaggtcggtcataaagtcggccttggtgtaagttttcatcattgtgaaaagttttggtctaaattctaatcctttcatctatcttaaaaatgttactaatttaaaaagaagcacaaaagtatatattttctcgaattcagacgatttttctattgattatattttaaaatattttctgaaatagaaatttgaattattatttgtttcttattcagtgtatatgagattggatgagggatgttttaggacttgttttcaagaactttttctccttcaaatttgttttattagtgaattcatgttttattaaagcgttaataaaatagaaaataaaattgtaatcatttcaaatttgaataaaattactatctttgcaatgtgaacttaaaaacgtaattcattcatcaacttaataactaatagatatgggaaaaagcattaaaggaacaagaactgagaaaaatttggcaatctcttttgctggtgaatcacaggcaagaatgcgttacacttattttgccagtgtagcaaagaaagaaggcttcgagcagatttctgctatttttatggaaactgctgatcaggaaaaggaacatgccaagagaatgttcaagtggttggaaggcggaatggtagaaattactgccagctatcctgccggcgtaatcggtactacattggaaaacctgaaagcagctgcagcaggtgaaaatgaagaatggagcttggattatccgaaatttgctgacattgcagatgaagaaggtttcccggctatcgctaagatgtatcgtgaaattgccgttgctgaaaaaggacatgaagaaagatacctggctttcgtgaagaatatagaagatgataaagtattcaagaaagatgtagaagtggtatggcagtgccgtaactgtggatacatttatgtaggtacagaagcacctgaaacatgtccggcttgcttgcatccacaagcttatttcgaagtaaagaaaaataattactaatccattttgattgcataaatgacagaagagggctgtggctgtttttcagttacagtccttttttgtttcagagagtcaggtttacaaaatacctatttcaaggtattgtatgccttgcaggaacttctcatttttgtatatcagaattttaaaatgataggaatatgaaaattaaatcaattacaggtcgtgaaatactcgattcaagaggcaatcctactgtagaagtagaagtgagactggagtctggaatcatggggcgtgcgtctgtaccctcaggggcttctactggtgaacatgaagcactcgagcttcgtgataaagatgccaagcgttacggaggtaaaggtgtgttgaaagctgtatataatgtaaataatgtaattgctccggccctggaaggatggtctgtgctgaatcagcgtggaattgacaagaaaatgtgtgaactcgatggcacgtctactaaatccaatctcggagccaatgccattttgggagtttctttggcagtggcaaaagcggcagctgcttacttgaacattcctttatatcgttacattggaggagtaaatacttttgtgatgccggtaccgatgatgaatattatcaatggaggttcacatagtgatgcacctattgctttccaggaattcatgattcgtccggtaggtgcaccttctttccgtgaaggtctgcgtatgggagcggaagttttccatgccttgaagaaggtgttgcacgaccgtggattaagtacggccgtaggagatgaaggtggttttgctccggcattgaacggaacagaagatgcgttggagtctattttgtcggccattcaactggcaggatatgtaccaggaaaggacgtgatgattggaatggactgtgcttcttctgagttttataaggatggagtgtacgattatacgatttttgaaggagccagtggtcagaaacgtacttcagatgaacaggtggcttatttggaagaactgattaataagtatccgattgactctatcgaagacggtatgagtgaaaacgactggcagggatggaagaaactgacggagcggattggagatcgttgtcagcttgtaggagatgacttgtttgtgaccaatgtggaattcttatcgaaaggtatagagctgggatgtgccaattccattcttatcaaagtaaatcagattggttctttgagtgagacactcgacgccattgaaatggcccatcgtcatgggtatactacggttacttctcatcgttccggtgaaacagaagatgctaccattgcggatattgcagtagctaccaatagtggccagataaagacaggttcgttaagtcgttccgatcgtatggcgaaatacaaccagttgcttcgtatcgaagaggaattgggtgaattagccgtatatggatataagcgtataaagtgaattaggtgtaatattaggtgaatgtaaaatgcagaagcggaatcgcttctgcattttttttgtatttaatatgtaatttgttaaccacattgaatatttcgccctggtggttaatgtatgttgtaaagcattcttttttagccttgtattttgccattccggataaaataaatatttttgtactgtgt

SEQ ID NO: 3781 - DNA, 35090 bp, Unknown
  gut microbiota DNA sequence
agacattctgcctttgaatactttcgatttttacgcatgttactaaataaattgtgtcaacttatttagtacactacagttttaagtaaaacgcctttgcgtttcaaatcaaacgtaaaggcgtttttaaaaagcgttcaaagctccttcaaaatgtcataaaaacaagattagaatcccatattcttgcattttccgctgactttctgaatatccaggcggataatctccgtgcggtggaaagacttgttggcatactcgatgccctgcatcttatgctctgggcaatatttggaaatcaacagcgagagggcagacatccgctctgcttcgtgcaaactgtgatgtgccgtacattgcagcacaatgctttcataccccgtagtaaacttgtcgggaatgaccttactgcgaccggtgacacagaaagacacgttagggcaggcgtcaatgcaacgcaatttacgccccaccggtgcacaatgaatgtaaatggagttgccacggtcccacacatagttgattggaataccgtatgcaccgtctccctcttcagtccgcatggacaggataccgaattcgccttcctttaatatctcaaatgcacgtgcttcatcgagcaggcggtcctgtcggcgtacgtcttggttcgtatattccataataacaattctttattggttggccagttcatagatttcacgggtagcctgtgcattcagacggacataattccctacgtattcacccttgttttcatgcagtttctttaccaataaatcgatatcaggatgttcgatgcccagttccttgaaggtgacaggcataccgatggcatggaagaaggatttcagacgggttacaccttccagcgccatggctttcttgtcgtccgattcgggcacgtcccacacctgatgagcatactgtgctaccttacccacgttatggctggccatgtaggttaaccaggcagggaaaataacggctaatccggctccgtgcgtcacatcgtacacggcactcacttcgtgttccataaagtgagaagcccagtcctctacggctcccacgccgcaggtaccgttgtgtgcgatggtaccggcccacatcaggttggcacgggctccgtaattttccggctccttcattacccgaagggcttccgtgataatggccttgagtgttccctcacacatacggtcgggcacctcctgatcttctgtattggtgaaatagcgttccatgatgtgtgccatcatgtcggtcaccccgcaagctgtttgccaggcggggagggtataggtcagttccgggttcatcacagcaaacgtaggacgcaacaacccgtgcgtgcggacactcagtttcttcagtccgtccagtttcgtgatgaccgtattaccagagccttcacttccagccgcaggaatagtcaggacaacacccagtggaatggctttttcaggcactaccttattcatatagaaatcccagaaatcgccttcgtaagggatacccattgcaatggctttggctgtatcgataaccgaaccgcctcccaccggaagcagaaagtcgattccttcgcgacgtcccagctcgataccttcgtacactttcgggtcggtgggattgggctgaatgcctcccagttccacatgagcaatgcctgcttcgtcgaggtatttttttactttatcgagtagtccgctgcgcactacggaacctcctccatatacaatcatcactttcgtacctttatatttcttcaccagctcggcagtctggctctctgttccttttccgaatacgaattcggtaggactgtaaaaagcgaagttattcatatctattataaattatagggtttacatgtagtacgacaaagttacggaatttctttgtatctttgcgtcacaataaaaaaattgaacctatgaaatcagatattgaaatagctcgcagtatcgagctgacaaaaatcaagcagattgcccgcgagtatggtattcccgtagaagaaatctctaactacggacgctacattgctaaagttcccgaaacattgatcgatgaagaaaaggtgaaaaagagtaacctgattctggtaacggccatcacaccgactaaagccggtatcggaaagactaccgtatctatcggtctggcgctgggactgaacaaaattggaaagaaagccttctgtgccttgcgcgaaccatcacttggtccttgcttcggtatgaagggtggagctgccggaggtggctatgcacaggtgcttccgatggacaaaatcaacctgcactttacaggtgacttccacgccatcacttcggcccacaacatgattacggccttgctcgataactatatgtaccagaacaaggacaatggttttgccatgaaagaggtactttggaaccgtgtgctcgacgtgaacgaccgtggcttgcgctacatcgttaccggactgggaggaaagaccaacggtattacccgtgaatcgggattcgacatcacaccggcatcggaaatcatggctatcctctgtctggcaagagatgaagacgatttgcgtcgccgcatcgaaaacattctgttaggattcaccatcgacaacaagcctttcacagtgaaagacttaggagtagctggagcgattacggtattgctgaaagatgccttgtcgcctaacctggtacagactacggaacatacaccggccttcgtacacggtggtccgtttgccaacatcgcacacggatgtaactcagtactggctaccaaactggcgatgactttcggtgactatgtcgtaacagaagccggattcggtgccgacttgggtgcagagaagttctacaacatcaaatgccgcaaagccggacttcagccgaaattgaccatcatcgtggctacagctcagggattgaagatgcacggcggggtagatgtagacaaaatcaaggaaccgaacatggacggtttgaaggaaggtgtaaagaacctcgataagcacatcgaaaacctccagtcatttggacagaccgtggtagttgctttcaaccgttatgctaacgataccgatgaggaacttgacttcgtacgtcagcactgtgaagaaatgggcgtaggctttgccatcaacaacgcgtttatggaaggcggagacggtgccatcgaactggctaacctagtagtaaacaccatcgaaaacaatccgtcacagccgttgaccttcacttacgacgaaactgactcagtggaagagaaagtcaccaagattgcctgcgaattgtatggtgccaaacaagttttgttcggtccggctgcccgcaagaagattcagatgataaaagacctgggatacaccaacttccctgtctgcatagccaagacacagtattcattctctaccgacccgaaactttatggggtggcttccggcttcaactttgccgtgcgcgacatcgtcatcaatgcaggtgcagaaatgctggtagtagtggctggtgaaatgatgcgtatgccgggattgccgaaagaaccgcaggcattgcacattgacattgtaaacggagaaatagaaggattgtcataagcagatgaagccacagtttcttgtcggagccatgatgcctggaagcgggcagaccctcgttgctttgggactgatgcgtgcgttgcgtcaacgtaacctgcgtgtacagtctttcaaatgcggacctgaactggcagaccttcgctatcatgcgctggctgccgaccgtgaaccggtaagtctggacacctggctgagctcacgcagccacctgcaaaccgtctacaatcgttatggagagaagtccgacgtgtgcgtggtagaaggacgggcaggtttgttcgacggattccggaaaacgcagggaagcagcgccgaaatggcccgactgatgaaaattcctgtggtaatggtggtgagtgcacgcaatgcgggctattccaccgctgccatgctgtatggcttcaaacacttcaatacagaactgaaaatagccggagtaattttcaatcaggtcacttcggctgcgcaatacggtttcctgcgcgaaacctgtgccgaggccggggtggaatgcttaggctatctcccttatctggaggaaacaggccttccacctcgtcatcaggcactgacacttcctgcaaggaagagtcttgaccaacttctcaatcaagtggcggaacaactggcacagcatgtagacattgacaaattgctgaacctttccacccgtattttcccttgtacctattcacttccttacatttccgagacagaaacggatatatggaccgacaagcgtaaacagcgaatcgccttggcttctgacccagcttttccttttgcatatcgccagagcatagacaagacaaagggagacatcacacgttttagtccggtatatggcagtgaacttcccgaagcggacatcgtatatctgcctggaggctatccggaattgtttgcccgtcagctgcatcgtcggaaacgcttaatggagcagttgcgcgaatacgtagagaaaggaggaaaactgctggcagaaggagggggaatggccttgctaggacagacgctgaccgcgcgccccggaggtacagcctacgaaatggcgggaattctgccttattcagtcattgtgaaagataaccgtccgtgcagcggataccgtcagacacattatcgcgacttatgtctgaaaggatatgagtaccgttactttgacattgttcctacggaagaagcagcttcactgcaaacgccagtctgtaatttaaaaggtggagaagtatcgggatcatttttcttccgctataaaaactgtatagccacctccgtacatcactattggggagaaaccggattatataagctttgggaatagctggagaaaggaatttttctattttctgcacgaaaaaaatcagagaaaacggacgattctaaaaaataaattctatatttgcatcaccaaagtcgcggcagtagctcagttggtagagcatcagcttcccaagctgagggtcacgggttcgagtcccgcttgccgctcctaagtatttaaaggttaatattctgataatgaagagtattagcctttattttttataaagttctctataaattcatagataaaaaaaggatataaacctcacttttgaggttttgtgcgtatcttttgcgtatcctaaaatttttaatctacatggatatattaaaaaccggtaaagatgaatcatatattatccgattttctatcagacacatgcaacagtctggaaaacctgcgcagaaataacgtctataaagaattctattatcatatcaagtgtgagaatttggaagactttctgagtaaagacatcacccaatccgtccaatatcaaaatttatttcaggatttgatgcaaataaagggacctgtactatattggtatgaaattacatcttcccactctaacaatgacataatcagggccttaaaagagtataagcagaaaagacaaagagttactcccgtcatctacaaaaactataacagacgcacaaacattttatacgtaggaaaatgcaaagaaaatttctggggacgagtaatgcagcacttaggatactataaaacacctactacacaggggctccagctctttcactgggcaaaggagctacgactggaagtcagattaaatgccctggaatttgcgtctgacatgaaagacattatgcctgtgatagaattattctttgccaaacaattgcaaccgttagtcggcagacatacttgagattgccagtcgcggataatctttaaagtgagttattttctttcactcagagatataaatcataagaaaagcaggaagaaaccccactcatggattttctccctgcttttctttatgtaaatgcgatattcttttaagagttcatactcatcaggaactcttcgttgtcttttgtcttctccaaacggtctttcacgaaatccattgcttcgataggattcatgtccgacaagtatttgcggaggatccacatacggtcgagcgtagtcttgtcaagcaacaagtcgtcgcgacgagtacttgaagccacgatgtttacggccgggaagatacgcttgttgctcaggttgcgatccagctgcaactccatgttacctgttcccttgaattcttcgaagatgacttcgtccatcttagaacccgtatcaatcaatgcagtagccacaattgtcagtgaacctccaccttcaatgttacgtgccgcaccgaagaagcgtttaggtttatgcaacgcattggcatccacaccaccggaaagtaccttacctgatgccggagaaaccgtattgtaggcacgagccagacgagtgatagagtccaagaagataactacatcgtgtccgcattctaccatacgtttggctttttccagcacgatgccggctatcttcacgtgacgttccgccggttcgtcaaaagtagaagcgatgacttcagcttttacgctgcgagccatgtcggttacttcttccggacgttcatcgatgagcaacataatcatatacacttccggatgattggctgcaatggcattggcaatatccttcatcaagatagtcttaccagtcttaggctgcgccacaatcagtgcacgctgtccttttccgataggagcaaacaaatcaactacacgagccgacaggttgtcgttatatcctttgcacaatttgaatttttcatcggggaagagcggagtaaggtgatcaaacggaatacggtcgcgtaccaaagccggatcgagtccgttaattttagaaacctttaccagcggaaaatatttttcgccttctttaggcggacggatagtaccttctaccacgtcaccggttttcaagccgagcagcttaatctgcgactgtgacacataaatgtcatcgggtgaagaaagatagttgtaatctgaagagcggaggaagccatatccgtcgggcatgatttccagtacgccggtaccttgaagaatatcatcaaaatcgtagactttttctaccggtttgggagctggtgccggagcattattagcaggagtttcggtagaaggagaagagggttgctctggcgcgttctggttggcagcaggctgcggattgttgtcctttccctgattattgttattgttgttattaggacgattgttgcgattattctgacgagcctgacgctgctgatttttctgtttcgattctttagccggcattacaggcgcctccattttggtagcctcaaatttacccagcagctcagaaggtatttcaaatttctctgacggaagatcttcgataggaatgaaatcgttattattcaagtcgagcggtggaagttccatgtcgtcatcatcgatgggaagcggagccggtttagcagcaatctcagcgggtttattttcagcggcttcctgtgcttcttttgccagagtagatttatttttcgaacccggcttacgtccacgcttggctttaggcttttcttcagtggcaggagcagcagcaacttccggctgagctgttttttctgcaaccggtgccacgatttcctctttttctgtcggtgcaggaatttccttgaacaaaggagtcggtgctggaagggtaggagtattggcctccagcttctgtgctttgtctttggtagccgtgtatactttgtccccttctttctttatactgatgcgcgagcgcttacgtggctgtccttccttgcgttcttcgttgttttgctgtgcggccactttttttgtcgcaccgacaattgcctgctcatccaggatacgatacaccagctcttcttttttcagtgaatcgacctttttcagacccaactctttggcaatctgctgcaattcagacaaatttttgtcgtttaattgaatgatattgtacataaataggttaaatgaattattaatattgggtgtgtgaagcatgacaaaccgttcagaggtctctttcctctttcacacatttgaattatcaatgatttttgattgttttttattgaattcggattggatacgaagacgtttccaaatacctttttgcattattgcgagtacaaaagtaagtgttttttgttataaacacgaataaatgcggactttttttacagtttctgtccacggattaaaagaattgtgctaatttagcgttgaaaatacaatttaattgacacattaacgcttatgaaaaaagtaatttttacagaaaaggctcctgctgccatcggtccttacaaccaggcagtagaagtaaacggcatggtattcttgtcaggccagattccggtaaatccggctacaggcgaagtggtagaaggtggaatcactgaacagactactcaggtattcgaaaatatcaagaatgtacttgctgaagccggactgacaactgccaacgtggtaaaaaccactgtgttcctggcagatatggcgctgttcggtgaaatgaatgccgtatatgccaagtatttcgaaggcgattaccctgctcgctctgcggtagctgtcaaagctttgccgaaaggagtgctggtagaaattgaaagtattgcggtaagataaccgtaacaaggagcagaccgtaaggaaaatgtctttatggtctgctcccaatttgtttaacaggaattttgtgacaatgcaactgaacatgcgtacaatttggggagagaataaatggaagctggccactttcatactggccattctgacagtaacggcttcggttttatatatttacagatacgaacctttctcgtccggactggaaattaccgacgaactaggaggaaatatctttccggtcaccatcctgtctactgctacgactgatgcccaactgattgtaccggccgacagtacctatctgggaaaccccaaatcgtgtattggcattaagatacgcagtccgcatgccaacagtaaacttcacatagaattagctgagactcctttctttgcccattcggtttctgaattcattctgccggaatcaggaaaggaatacctggttttcccagatgtaatatggaattatcaggccctgctggaaaatactcaggccatgcctgttaccgtatccatacaggcaaaggtgaataacaaccggacatattcggcagtgcacacgtattccgtacgtagtatcaacgaatgtctgttgggctacatcgacagcaaaatgaaatttcacgacacaagcgatttctttgcggcctacgtcaacgaagacaatcccaacatcagccaggtgctgcgcgaggcactggattcacgcattgtcaaccgtttctggggataccaaagcaaggacccgaaagtagtagataagcaggtgtatgccttgtggtatgttttgcagaaaagagggttcaaatacagctccatcagcaacagcagcctgtcgtccaacgtggtctttactcagcgcgtacgtaccttcgacgatgcccttcagtcggcacagattaactgtgtggacggaagcgtactatttgcttcattgctgaaagccatcaatatcaatccgattctggtacgcgtgccgggtcacatgtttgtgggttattacaccgaccgtttgcaccaggagattcatttcctggaaacgtccatgattggcgacgtaaacctggatgacttcttcccggaagagaaactcgactccacaatggcgggaaaatcgcaggaaagcgtatcaaagttcatgtttgagaaatccaaggaatatgctacccgcatttacaacgaacacaaggatctgattcattcgggcaaagtgaactacatgttcctggagatagacaaggccacccgcgcgtatgtgcagcccattgcggccaaataagacctcaatctcatgaaactgatttatctttatcatagcggcttcgccctgctgggggaaggttacacgcttattttcgactatttcgaagactccgtgtcggccgacaaaggcatcgtgcacgaacagcttctttcacgtgaaggacggttgtatgtgttttccagtcatgcgcatgccgaccactttaaccggcagatactctcctggaaagcgcttcggcctgacatcgtctatctgctttcgactgacattcctctttctgacaaggacaaagaaaacggaaatctccacacactggcgaaaggagacacctatcgtgacgaatatctcaccgtgcgggctttcggctcgacggacataggcatctcttttttagtccagaccccggaaggagctaccgtattccatgctggcgacctgaacaactggcactggatggatgaaagtccggaggaggagtggaaacgtgacgaagctttcttccttcgtgagctggaagacattgccgtctgcaaggaaaaaatggatatcgtgctgtttccggtcgaccctcgtttgggaaaggaatacatgcgagggcctttacaatttgtgaaacggataaaaacgactatatttgtaccgatgcacttcgacgaagcttttgagaaggcttcggcttttgcacttttggccgcatcggaagggactcaggttcttactcctgtccgtcgcggcgaaacattgaacttagaccactatatcaacttaaaataaaaagacaatggaaataaaaggaagatttgaccacttcaatatcaacgtaactaatcttgaaaaaagtatccaattctacgaaaaggcgctcggactgcatgagtctcaccgcaaggaagcggccgacggctctttcatcctggtgtaccttaccgacggatgcacgggtttctcactggaactgacctggctgcgcgaccatacggaagcctacgaactgggagaaaacgaaagccatctttgtctccgtgtggcaggcgactacgatgaagtacgcaagttccacaaggaaatgggctgtgtttgcttcgagaatgaacagatgggactgtatttcatcaatgacccggatgattattggattgagattcttccgctgaaataaacctttatctctaatactaaaaacaaaaaacgttatgaaaaagtacatttctccgggttcctgtttttcactggaatatcccgacaactggtgcgagtttgaagattcggaagactgctttctgttttacaaccctgacaaatggaccgggaacttccgtatttctgcctaccggggcaattcgtcagcctatgccaacgaatgtctggaagacgaactgcatcaggtacgcggggccaagaaggtgaaagtcggttcatgggactgcgtctattcttccgaaagctttcaggagaatggtgtgtggtacaccacccacatctgggtaaccggtcgaggagagatttccgtagagtgctcgttcaccgtagccaagggcgagatccccaaggctggcgaagctattgtagcttccctgaaggtgcgcaatgtatccgacaaaccggtgaaggaagtgattccggtccgtattctggaaattaatcagataaacgagaattatgactgggccgtttctacagtgaaaaaacaactgaccaaggattttaccggaacggcggccgacttggaaaacttgcagaaagtaatcgatagcggacgtttcaaccccaaacagcgtcaggcgtgggaaagcttcggcacggcattcggcgtgattctggtcaacgagatggacggcatggaatgggtgacggtcatcgacggacagaaagaatctccggcactgcgtttccgcgattcaaaagtaatggtcaacccaatttccctgatatgggacaaggcgaagagcggacagccatgcgacctgaaagcggaattcgaacggataaagaacgaagtggaagcgacgatggactaatcctgtctgcatcctatttttagaagctacgaattagattatgactccatatttacaagtagaaaacctgaccaagtcgttcggcgacttggtcctttttaacggcatatctttcggtattgcagaaggacagcgcatcggactgatagccaagaacggttcgggaaaaaccaccttactgaatatcctggccggtaaggaaggctacgacgaaggaaaaatcaccttccgccgcgatttacgcgtgggctatctggaacagagcccgaaatatcccgaagagctgacggtgctggaggcctgcttttatcacggcaactctaccgtagagctgattaaggaatatgaacggtgcatggaaacacccggcaaccccggcatggacgagctgctggtgcggatggaacacgaaaaggcgtgggattatgaacgacgtgccaagcggattctttcgcaactgaaaatccgcgatttttcccagaaaatcggacatctgtccggcgggcagttgaagcgcgtggcactggccaacatcctgattaccgaaccggatttgctgattctggacgagccgactaaccacctcgacctggacatgacggaatggctggaagagtacctgaaccgtggcagcctgagcttgctcatggtgacacacgaccgctattttctggaccgtgtgtgctcggaaatcattgaaatagacaaccgtcagctgtattcctacaaaggaaactacagctactacttggagaaacggcaggaacgtatcgaagcgaccaatgcggagattgcccgtgccaacaacctatatcgcacggaactggaatggatgcgccgtatgccgcaggcacgcggccacaaagcccgttaccgcgaagaagccttctatgaactggagaaggtggccaaacagcgcacgtacgacgcaaacgtgaaactggatgtcaaggcttcgtacatcggttccaagatttttgagtccgaccacttgtgcaagcacttcggcgacctgaagattctggatgatttctcctacatctttgcccgctacgagaagatgggtatcgtgggcaacaacggtacgggtaaatccaccttcatcaagattctgatgggactggaaaaacccgacagcggtacgctggacatcggcgaaacggtacgctttggctactactcgcaggaggggcttcagtttaacgagcagatgaaggtgattgacgtaattacggacatcgccgaggtaattgaactgggcaacggcaaacggctgacggcttcacaattcctgcaacatttcctcttcacgcccgaaacacagcacagctatgtgtacaagttgagcgggggagaacgacgccgattgtacctctgtacggtactgatgcggaacccgaacttcctggtgctggacgagccgaccaacgacctggacatcgtgacactgcaggtgctggaagaatacctacagaacttcaagggatgcgtcatcgtggtgagccacgaccgctacttcatggacaaagtggtagaccatctgctggtattcaaagggcagggcgacatccgcgatttccccggcaactattctgactaccgcgactggaagctggccaaggcagaacacgaaaaggaagcagccaaacctaaggaagaaaagacgcagcgtgtccgcctgaacgacaagcgccgcatgacgttcaaggaacggaaggaattcgaacagctggaaaaagagattgccgcactggaggaagaaaagaaacagatagaagaagccttgtgcagcggtacactcagcgtagacgaactgaccgagaaatccaagcgtctgcctctgctcaatgacgagctggacgagaagaccatgcgttggctggaactgagtgaaattgagggataaaaaagacgcctttgcatttgaaagaaaacgcaaaggcgtttacatttaaacgcaagtacattttaatcaaaacgctttgacgttttaaataaaacgcaagtacgttcatggacaaacgtacttgcgtttttttatgggttttaaggaaaataataaacaattgtttatcaaagggttacaccattcttgaaaattgcgatttcgcggtagtttttcttttcgttgttcacgggttctccgctggccacctgaatcacataatcgatgaaacgacggcaagtggtttccatcggctcattttctacgatgacaccggcattgaagtcaatccagccgggcttatgcgccgccaggttggagttggtagaaatcttcatagtaggcacgaaggtaccgaacggcgtaccgcgtcctgtagtgaacagcacgatgtggcagccggaagaggcgagggcagtagctgctaccagatcattgccaggagccgacagcaggttcaatcctttcgtctgcaagcgttccccgtaggccatcacgcccgatacgtaactctttccgcatttctgtgtgcaacccagtgctttttcttccagtgtagagatacctccggccttgttacccggcgaaggattctcgcccacgggctctccatgtgaaaggaagtattccttgaaatcattaatcagactcaccgtctggttgaacaattctgtagtacggcaacggttcatcaggatggtttctgccccgaacatttcaggcacctccgtcagcactgaagtacctccctgcgcaatcaggtagtcggagaacatacccagcagcggattggccgtaatacctgaaaaaccgtcggaaccaccgcatttcagtcccacacgcaactcggagaggggcacatccgtacgctcatcctgacagcatttggcatacagttcacgcaagatgcgcataccttcttcatattcatcgtccaccttctgtgccaccatgaagcggatacggtctttatcatacgaaccgataaattcacggaacacatcgggctggttgttctcgcatcctaatcccactaccagcacggctccggcattgggatgcagcaccatgtcgcgcagaatcttctttgtattctcatggtcttcgcccaactgcgagcaaccataattatgcggaaaagccacgatggcatccactccttttcctccgtccgtttcgcggcgaagtccctcggccagctggttcacgatgccgttcacacagcccacagtcgggataatccagatctcgttacgcacgcctacgtctccgttccgacggcgataacctttgaacgtgcggtgttccataggaatatccgtatgcacctccacaggctggtaagtataatccagcagccctgccagattagtcttgatttctttctcgctcacccatgtaccttcgggtacatcaacggtaacatgaccgatggggtagccgtatttaatgatattctctccagcctggaaattcttcagcgtcaccttgtggccggcaggcacatccgtgcgcagggtaatcacccgtccgtctgcctcaatggtttctcctgcatgaaggggagaaatagccaccgccacgttatcggccgggttgattctcaaataagttgttttcatattaatagcaatgtaatcaggttattcgttgacatgtgcatcgaagtagaaatcgatgttttccgtcgtaatcaggttgataggcatgtagttgcagtccttcaccttcttgcgcagaatcaggtggttgcacagacattcaatgctgttgtatccctgcacggtaggctgctgggctatgatgaagtcaatcactccttccttcaggcaagccacgttgcgacgcagcaggtcgtaacccataaggtggaagtccgtacgtccgtgacgctgcatatactcgccgatgatgtacgccttcgagttgaaggtgataccgcacttcacgttcggatgcgccgcaaaaaaatcgtccagcaacgaagcatcttcacccggctgtttggcatagaggttcagttcccacatcttcagttcaggacagtgctccttcatgtattcatagaagccctcttcacgatggagctgctggttcgaacccagacgtccttcgtttatctgacggaagataacaatttccggttcgccactagccagcagacgcaacatgcgggcggcaaagtatccgctccgctgggcatgctgtccgtagaaagccagcggctccagccgagcaatattcgaatcaataaatacatacggaatgccggcttcgcgcagcaggctgacaaaccgttcagtttcttcttctacagtaggcgaaaggatgactccgtcgggctgtgcttctaaaatgcgcataccactttctataaaggcacctgactcgtactggtcataataatagtcggacagagaaacattgaaatcggaaaaacgggtgatggcctgttgcatgccacgttccacatccttccagtaatcaccttcattgtgcgaagggagcagataggcaaatctgtatttcttgttcgaagccagcgcactggcatacatgttgggctgatagttcagcttcttcaatatttcttccactttaatgcggctagactcagacacaccgctccgggagtgaagtacacggtctactgttcccaccgatactccggccatctgggcgatgtccttgattcggattctatcttgctgtttctccatgcgttcttaccttattatattgtaaaatctgtgcattcagtaaaaattcatttttttcgatacaaatatataacttattttggtttttaaaaaataaaccgtacctttgtgtgcgtacacaaaatggatatttcaaaagtaaccgctaaaagaaccgtttttgtgatacaagctaagaactacattattaatcatataagtataaaaatatctagcaatgggaaaaattgttactttaggcgaaatcatgttgagattgtctacaccgggcaatactcgttttgttcaatcagacagctttgacgtagtttacggtggaggtgaagcaaacgtagctgtaagctgtgccaactatggtcatgaagcatacttcgtaaccaaattgccgaaacacgaaatcggacagtcagctgtaaacgcattgcgcaaatacggtgtgaagactgactacatcgcccgtggtggtgaccgcgtaggtatctactacctggaaacaggtgcttctatgcgtcctagcaaggttatctacgaccgcgctcactctgccatcgctgaagctgattcttgcgacttcgactttgatgctatcatggaaggtgctgactggttccactggtctggtattactccggctatctctgacaaggctgctgaactgactaaattggcttgtgaagctgcaaaacgtcacggagtaacagtttctgttgacttgaacttccgcaaaaaactgtggacaaaagaaaaagcacagtctatcatgcgcccgttgatgcaatatgtagacgtttgtatcggtaacgaagaagatgctgaactttgcttaggcttcaaaccggatgctgacgtagaaggcggtaagaccgatgcagaaggctacaagggaatcttcacagccatggctaaggaattcggattcaagtatgtaatttctactttgcgtgaatctttctctgctactcacaacggctggaaggcgatgatttacaacggtgaagaattctatacttctaagcgttacgacatcgacccgattattgaccgtgtaggtggtggtgactcattctcaggtggtattatccacggcttgctgaccaaagctactcagggcgaagcattggaattcgcagtggcagcctcagcattgaagcacactatcaacggtgacttcaacctggtatctgtagaagaagtagaagcactggctggtggtgacgctagcggtcgcgtacagagataatcactcaaacaaacaacatttcatttaaggttagaaaaaatggctaaattcgataaaattgcagtgttgaacaagattggttcaacaggtatggttcctgtattctatcacaaggatgcagaagtagcaaaaaaagtggtaaaggcttgctatgacggtggtgtacgtgcattcgaattcactaaccgtggtgactttgcgcacgaagtatttgctgaagtagtgaaattcgcagcaaaggaatgtccggaaatggcaatgggtgtaggttctatcgtagatcctgctactgcttctctgtacatccagctgggcgctaacttcgtagtaggtccgttgttcaaccctgaaatcgcaaaagtctgcaaccgtcgtctggtggcttacactccgggatgcggtagcgtatctgaagtaggtttcgcacaggaactgggctgcgacctttgcaagattttcccgggcgacgtactgggtccgaaactggtaaaaggtttgctggctccgatgccatggtctaagctgatggtaaccggtggagtagaaccgactcaggagaacctgacttcatggattaaggcaggtgtattctgcgtaggtatgggttctaagttgttcccgaaagacaaggtagctgctgaagactggacttacgtcacagaaaaatgtaaggaagcattggcttacattgcagaagctcgcaaataatacagaaattcattttgtttaaaggtgtataagtgagaagcctcgctacgtccggaagggtgtagcggggctttctcatgcccgtaagtgaaggaatattcatgaaaaaatacaaaaacgaatacttcctgcatggatatgtgcgcgaaaaaccctatctttgcatgaaatttttcgcgaaatatgaaaattaaggaaattgtgaatgcccttgagatattcgcgcctctgcctttacaggacggattcgacaatgccggactgcaaatcggattgacagacgcggaagctacaggggctttgttgtgtctggacgtaaccgaagccgtggtagatgaagccatcgcactgggatataacctgattgtatctcaccatccgctcatcttcaaaggctacaagtcgattaccggacgcgactacgtggaacgctgcatcctgaaggctatcaagaacgacatcgtgattttctcgatgcacaccaacctggacaacgcaccgcagggcgtcaacttcaagattgccgaggaaatcggactgaagaacgtaagaatcctggaaccgaaagaaaaccagctgctgaaactggtcaccttcgtaccgcaggcacaggccgacgaggtacgtaatgccttgttcgaagccggatgcggctgcatcggcaactacgattcctgcagctataacctggaagggaagggtactttccgcgcacagccgggcacacatcctttctgtggagaaatcggccagttgcacgaagagcatgaggtacggattgaaaccgtgctgccagcattcctgaaagggaaggtgcaaaaagctctcgtcgaagtacatccttacgaggaaccggcctacgacttctatcccttgcagaatgaatggacacaggcaggagcgggcatcataggtgagctggaagaaccggaaaccgaaaccgatttcctgcgccggatcaagaagctgttcgaggtgggctgtgtaaaacattcgcgcatgacgggacgcctcatccagaccgtcgccctctgtggaggagcaggagccttcctgctgcccaaggccgtaagagcccatgccgacgtgttcctgacaggcgaagtgaaataccacgactatttcagctacgagaacgatattctcattgcagagatagggcactacgaaagcgaacaatatacaaaagatttattatattcaatcatacgggaaaagtttccgacactcgacgcacagctgacgcgtgtcaataccaatcccataaaatacttgtagaaaactatggctaaagaagcaaagaaagatccgaatgaattgagtgtggaagaaaagctgaaagcactctaccagttgcaaaccatgttgtcggagattgacaaaatcaagacactgagaggagagcttccgctggaagtgcaggacttggaagacgaagtaacgggtctgagcacacgtatcgagaaaatcaaggctgaaatcgaagaactgaagtcaaacgtagccagcaagaaaatcgaaatcgaaactgccaaggcttctatcgaaaagtacaagagtcagcaggacaacgtacgtaacaaccgtgaatacgacgtactgactaaggaaatcgaattccagagcctggaagtggaactctgcgaaaagcgtatccgtgaatatacagccggcatcaagtcgaaagaagaggaaatcgtaaagagcgaacagttgctcgaagaaagaaagaaagacctggaagtaaagaagaacgaactggacgaaatcatctcagaaaccaagcaggaagaagaaaaactgagagaaaaagccaagaatctggaagctaccatcgaaccacgtctgcttcaggctttcaagcgtatccgtaagaactcacgcaacggtctgggtattacttacgtgcagcgtgacgcttgtggcggttgcttcaacaagattccgcctcagaaacagctcgacatccgtatgcgcaagaaaatcatcgtatgcgaatactgtggccgtatcatgattgacccggaactggctggtgtagaaacagaaaagcatctggaaacaaaaatgaaataagcgtcagacttccgtctgacagcagaagaagggattcccgctcaggggattccttcttttttatgcactataaatctgcataacggggaatgtccgggagaaaataatacgtattccgtgcatagtcgatgcggcagcagtagtgacgaagcccgttgctcaccaccaggtaatccaccttcagcaccatgttgtaacgggtaatctggtcaaagacagcctgcgtaatctccaccgaaggagccttgtattccacaatcatctgcggagtcaggtcgcgccggtagagcaccgtatcacagcgtttcttcgttccgttcaggttgatttgtatctcattggccaacagtccttgcggataccccttttccttcagcaggaaattcgtaaaatgctggcgtacccactcctccggagtcagcgctacataccggcggcgaagcacgtcaaatatcacgttctttccctctcgctgggcaatcttggcctcaaaagcaggcaggttcaatgcaaacataagcgttcttctattacgaagcaaagatactccattttctcaaaagtacataaaagctgaattattttccaaaaaccgaaggtctccggtaagagaaaatcccaaattcttttttctgtttgcattattattgtacatttgcgtttaaggaagataatatcatcttcccaatattttatttggcaacacaaattctgagagctaatgaaaacaaaagaagaaatcgtagcaaactggctcccgcgttataccaagcggaaactggaagactttggtgagtacatcttgttgacaaacttcaataaatacgtcgaaatctttgccgaacggttcaacgtgcccattttaggacgcgatgccaacatgatttcggcccatgcagaaggcatgaccattatcaacttcggcatgggaagtcccaatgcagccatcatcatggacctgcttagtgccgtacatccgaaagcctgcctgtttctgggcaagtgcggaggtatcgacaagaagaaccagataggcgacctgattctgcctatcgcggccatccgtggcgaaggaacatcgaacgattattatccgcctgaggtgccggctcttccggcctttatgctccagcgtgccgtatcttcggccatccgtgaccactcacgcgactactggaccggaacggtgtacaccaccaaccgccgcatctgggaacacgatgaggagttcaagaaatacctgctgaagacccgtgccatggcagtggatatggaaacggcgactttgttcaccaccggatttgccaaccacattcctacgggtgccctgctgctcgtgtccgaccagcccatgattccggaaggcgtgaaaacggagcagagtgacagcatggtgaccaagaatttcgtgcatgaacacgtagaaatcggtatcgatgccctgcgcatgatcatcgatgaaaagaagaccgtgaaacacctgaaatttgactggtaaaccgacgaaaatggcaaaggaagtcacttacgaagagattgtacgcaacctgaagaaccgcatctatgcgcccgtatatttcctcatgggcgaagaggattactacatcgaccggattgccgactacatcatcgataccgtgctcagtgaaacggaaaaggaattcaacctgaccgtcacatacggggccgataccgatgtggctaacgtcatcaacgccgccaagcgttacccgatgatgtcggaataccaggtggtagtggtaaaggaagcacagagcctgaaacgcatcgaggagctggctttctacctgcagaagccccagaaatcgaccatactggtggtatgctacaagcacggcagcattgatcgccggaagaaactggccgccgaaatcgagaaaaacggggtgctgttcgaatcgcggaagctcaaggacagtcagattcccggtttcatctcctcatacctgaagcggaagaaagtggaaatcgagcccaaggcatcggaaatgatggccgagtttgtaggagccgacctgaaccgtatggccggcgaactggagaagcttatcctgacactgccggaaggcgcacgccgcatcacaccggaacagattgagcggaacatcggtatcagcaaagattacaacaactttgagctgcggagcgcactggtggaaaaggacgtgctgaaggccaacaaaatcatcaaatacttcgaggagaatcccaagaacaatccgctacaaatgacactggccattctgttcaacttcttctcgaacctgatgctggcctattatgcacctgagaaatcagaccagggaatagcggctcagttaggcttgaaaagtccgtggcaggcgaaagaatacatggcagccatgcgacgctattcaggcgtaaaggtgatgcaaatcatccatgccattcgcgaatgcgacgcccggtcgaaaggtataggcaatccttccacgcccgatggagaattgctgcgcgacttgatttatttcattcttcattaaccgaaactgaatctctgaaaagaggaaagcaatacgctgtacaagcggcatacatctgaaaaagaccggatgtatgccgctttttcgtttttcacgagaattgaaaaatcaggaggagaatacaaatggacgtcaaattttcaattctcacgaagtttccctacaaacggtaaattacagatagaagtggaaggtacaaaatacaaatgtaatcacttatttgtgtagaattggatgatttacatttgtattctgcctatttatccgccacaaatgtaaattttagcaaacgggtaggggagatattacactgatacaatgcaatttacaagaataaagtgttacttatctaaatgtaaacgaataaatataacatgcagctttaagaatcataatacgctgaataccagcatattttagaataatatctataaatctgttcaataaaacgacctgaaagagcgaataaactcttatttttcccatatatacacatgtatacaattataatatactaatattcaaccaaataaccgactaaactaaagttaattacaaatgtatttacacttgtataaaagcgtaaatgtacaattggaatgatgtgatttacacttgtaacaatgtaaatttagatttataaatttgcatttctaaatttaaagaattacttttgtaatcaacaaacaaagccatttccatttgtatatgaaggaccggattctaaaagtcatgcaaaaagagggtttatcgaatgccgaattcgccgaaaagataggcatctctacctcatcactgtcgcacatcttcagcgggcgaaacaaacccagcctggaagtcgtcatgcgcatccataaggcatgtccgtacatcaacatcaactggctgctctacggtgaaggcgaaatggaagaaagcgctcccgccgtaacaggcatggacttgttctcacaaccgttcgagaatccgaaaaacacgaccgaagagccggctcactccgattttcgcaaggagaacgaggttcctaccgtggtttatccgcccaaagagattatcagagaggaagttaagtacatcgaaaagccgcatccgaagattaccgaaatacgtattttcttcgataacggcacctacgaggtgttcaaacccgaaaaataagtccccgaacgacaaaagcacccgccaaggtgttaggcatataaaaggtaaattcgtatctttgcgtgaaagaaacgaatttacctttttttatatgaagaaatacatcttagatttgacagtcaccgagaacactcgcctgcacgcgaactacgttctcatcaagctgacgcaagaggctcccttgcccgaaatgcttccgggacagtttgccgaaatccgggtggacggttcgccgactaccttcctgcgtcgccccatttccatcaactacgtagatagagagaaaaacgaagtatggttcctcgtccagctcgtgggcgacggtacccgtaaactggctaccgtacagaaaggcgatacagtaaacgtagtgctcccgctgggcaacggattcaccatgccagcttctgccgacaccaaggtgctgctcgtgggcggcggtgtaggtacggctcccatgctctacctgggcgaagtgctcctgaaacaaggatgcaaacccaccttcctgctgggtgcccgctcgaagaacgacctgctccagctggaacagtttgaagccctcggcgacgtgtacaccaccaccgaagacggcagcatgggcgaaaagggatacgtcaccatgcacagcgtactgaaagcacagaagtttgacatgatttacacctgcggcccgaaacccatgatgatggcagtggccaagtatgccaaggcagagggcatcgaatgcgaggtgtcactggaaaacaccatggcctgcggcgtcggagcctgcctctgctgcgtggaaaagacagacgagggacatgtgtgcgtatgtaaagaaggtccggtatttaatataaagaaactattatggcagatttaagcgtaaacatcggtaaattgaacttgtcgaacccggtcatgaccgcatcgggtacattcggatatggactggagtttcaggacttcgtggacctggaaaaaatcggaggtatcatcgtgaagggaaccacacttcaccaccgtgaaggaaacccttacccgcgtatggccgaaacacccatgggtatgctcaatgccgtgggattacagaacaaaggcgtgcattatttcgtggaccatatctatccgcaaattaaggacatccgtacgaacatgattgtaaacgtgtccggctcacaggtagaagactatgcggaaacggcttccatcatcaacgaactggaaaacatcccggccatcgagctgaacatttcctgcccgaacgtgaagcagggaggtatggctttcggtgtaacggctcacggagctgccgaagtggtgagtgccgtgcgtaaagtctacaagaagacactgattgtaaaactgtcgcccaacgtgactgacatcaccgagattgcccgtgccgtagaaggtgccggagccgacagcgtgtcgctcatcaacaccctgctgggtatggccatcgatgcagaaaagcgtcgtcccatcctgtcgaccgtgaccggaggtatgagtggtgctgccgtgaaacccatcgccctgcgcatggtatggcaggtagctaaagccgtaaacattccggtagtaggtctgggtggtatcatgaactggaaggatgccgtagaattcctgctagcaggtgccactgccatccagattggtacagccaacttcattgatccggccatcaccgtgaaagtggccgaaggcatcaacgactatctggaccgtcacggatacagttccgtacgcgacatcatcggtgcactggaaatctgaaaacaacacttttcaaggcccggaaacaagcataaaaaaacgtccttgcgttcgtcacaaaacgcaaggacgttttcttttaaacgcaagtgcgttttacctaaaacgtaaaggcgttttaaatgaaacgcacttgtgtttcgattgaaatgcacttatgattctgaaataccttcaaatgattaaattaaccacgctattctcgtcatcttttaacgagaataatttgcttacttcctttccaatagtgttttaaattccatcctctacattaacatctatccatttctttatacaagggaagtatatatgaaaattttccttatttaattttattttctcttcctctccattcatatacaagatttcaagcaaataaggaaaagctataacttctaatggataaataaaagtaccacttgcccaccgagaatatgttttattagtttcaaacggtccagtaaaaaaaatcatacgatgctttgtgtgctctacatttgcatttacagcacccacaatgtcacttgacactgcatctccaacctgatttacaccataataatatacacgtacatattttatagctttatccgatgtaattttaaattttacatcagtcattttccgtccagggcaacacccgaaaggagaatcttttttaaatttaaacttgctgaacgaaacctgagaataagataacatagaaatattcagcaaaaataaaatcgttaatagctttttcatattcctaagctctaaaactattttttgatgttatagatttttctttatttcccttccagcaaatccggacgcaaacgctgggtccgttcaagcgactgctggaactcccattcacgaatcttcgcttcatggccggacagcaaaatgtcgggcaccttccagccgttgtattctgccggacgcgtgtacaccggaggagccagcaggttgtcctggaacgaatcggacaaagccgactgctcatcggaaatcactcccggaatgatgcggacaatcgaatcggcaatcaccgctgccgccagctcgccgcccgtcagcacatagtcgccgatactgatttccttcgtgatgaaatgctcgcggatgcggtagtcgatgcccttgaagtgtccgcacagaataatcaggttctgcgacagcgacagcgtgttggccatcttctggttgaactgctcgccatcgggcgtcgtgaaaatcacctcgtcgtaatgacgttccgccttcagtgcggagatacaccggtcaatcggctcaatcttcatcaccataccggcacatcccccgaacggataatcgtccaccttacggtaacggtcgtacgcataatcgcgcaggttatgaatgtgaatctcggcaattcctttcttctgagcacggctcatgatggagtaattgaagaatccttcaatcatttccggcaatacggttataatgtctattctcatttgtctgcgattgttttttgcaaaagtacgaatatttttgctacttttgcatgaaacattacgctttaatgtcatgacagaaatagaaagaatcgaccagctgcgtgaagagttacacacgcataatcataactactacattctcaatgcaccaactatcagcgaccaggaattcgaccggctcatgcgcgagctgcaggatttggaggcgaaacaccccgaacactacgacgagaactcgccgagcgtgcgcgtgggcagcgaccttaacaaggagttccgtcaggtggaacacaggtatcccatgctctcactgggcaacacgtattccgagacagaggtacgggagttctacgaacgtgtgcggaaggcactgaacgaggacttcgaaatctgctgcgagctgaagtttgacggtacgtccatctcgctgacttacgaagacggacgactggtgcaggcggtgacgcgtggtgacggtgtacggggcgacgacgtgacggacaacgtgaagactatccgttccattccgctgcgcctgtcgggcgaaggctatccccgccggtttgaaatccggggtgagattctgatgccgtggacggtgttcgaggaactgaaccgcgaacgtgagcagcgtgaggaaccgctttttgccaacccacgcaatgcggcttcgggtacgctcaagtcgcagaactcggcagtagtagcttcgcgcaagctggatgcctacctatattatctgttgggcgaggaactgccgcacgacgggcattatgagaatttgcaggaagcggcacgctggggtttcaaggtgtcgtcgcacatgcgcaaggcccgtacgctggaagaggtattcgactttatcaactactgggacttggagcgcaaaaacctgccggtggctaccgacggcattgtgctgaaggtaaactcacagcgccagcagcgcaacctgggtttcacggccaagtcgccgcgctgggccatcgcttataaatttcaggcggaacaggcttgcaccaaactgctgaaggtgacgtatcaggtgggacgtacaggagcagtaacccccgtagccaatctggaaccggttcagctttcgggtacggtggtgaaacgtgcttctctccacaatgccgacatcatcgagtcgctcgacctgcatctgggcgatatggtgtacgtggaaaagggcggcgaaatcattccgaaaattacgggagtggacaaggacgcacgtccggaaggaagcgagaaggtgactttcatcacacactgtccggaatgcggcagccgactggtacgctacgaggacgaagctgcacattactgcacgaacgaagacgggtgccctacacagataaagggccgcatcgagcacttcatcagccgccgtgccatgaacatcgaagggttgggaccggaaaccgtcgaccagttctatcaggagggactgattcacgatgtggccgacctctacacgctgcaagcagcagacatctgccgcctgaaccgcatgggagaaaaatcggccgagaacatcatacagggagtagagaaatcgaagaccgttccctacgagcgtgtcatctttgcactgggcatccgctttgtgggcgaaaccgtggccaagaaagtggcacgtgcgttccgctccatcgacgacctgaaatcggctacgctggacgacctgattcacgtggacgaaatcggcgaaaagattgcacagagtatcctgcgttatttccacagcgagaagaatctccagctcatcgaacgcctgcgtgaagccggagtgcagatggccatcagtgaggaagagacagccggacagaccgacaagctgcaaggccagtccatcgtcatcagcggcgtatttgcccgccactcgcgcgacgaatacaaggcacttatcgaaaagcatggcggaaagaacgtgggcagcatctccaagaaaacaagcttcattctggccggagagaacatgggccccagcaagctggaaaaagcagaaaaactgggcatccgcatcgtaaatgaagaggagtttctcggaatgattggcgaataaagtgccagtcctttacaaattatttataaaaggcaaaaaaacgattaaatctataggttaaattgaaaatattcgtacttttgtacacttgttaaagtgattatatttcatttatgatagtaagaagactgaaaggaatgggggtggctctgattactcccttcaagagcgacggtagcgtggattataacgcgctggtacgactcgttgaatatcaggtacaaaatggggtggattttctctgtgtactgggtaccactgcggaaacaccgacactgactgaggaagaaaaaagacaaatcaagaaagtggtgatagaacgcgtcaacggtcgtgtgccaattttgctgggcatcagcagcaactgcacgcagacggtgctcaacacgctgaaaaatgaggacttcacaggagtggatgccgtactggtggccgttccttattataataaaccttcacaggaaggcatttaccagcactacaaggccattgccgaagctacagatcttccggtagtgctttacaatgtgccgggacgtaccggtgtgaacatgacggccgaaacaaccttgcgtctggcacgcgacttcaagaacatcgtggctatcaaggaagcatcgggcaacattacacagatggacgatatcatcaagaacaaaccggagaatttcgacgtaatctcgggcgacgacggtattaccttcccgctgattaccttgggagccgtgggcgttatctccgttatcggaaatgcctttccgcgtgagttcagccgcatgacacgtctggcactggccggcgactacaacaatgcgctgaccatccatcaccaatttacggagctgttcaagctgctgtttgtcgacggtaaccctgccggagtgaaagccatgctcagcatgatgggaatgattgagaaccgtctgcgcttgccgctggttcctacccgcatcactacttacgaacagatgcgccgcatactggatgagctgaaaataaaatgctaaaaaaatcacggcagagtcctgccgtgaccgcataaaaaaagagatttcaaatctgtacagaacctgtctgatttgaaatctctttgctttttgttgtatccaaagtcatcttcttcaaagggcgggcatcaattttctgcctgatgcagaagcgatgccagttcggagggagttacattctttgccacaatgactccacggtcgttcactaggtaattgatgaatccgtgcttcaggtcgtacgacttgaatatctccgaattttcaccttccatttcctgatagacgttatcgctgataccgtcctggcgaaccgcagcgttgaataccgactggtagcggtcgaatgaaatggaaatcatctcaacacgggcgtcgtccgaaaccacattgtgcagtctggcattgcgtgtacgcgatgcggcgtcgtaactggcccaaaagctcagcaggatgtaattgccttttgcggcttgcaggctgagcggctgcttttcttttccgagcactaactccggagcctgcgccccaagcggaagtttctcggtgggagtctttctcttgtcaaatgacagagaaatgaaggaactgaatactaatacaacaaaaaaccactttacatttttaagcatgtaatttgattttagttaatactatccggtactgtgtccttacagtgatttcctgcccggaacattacttctgtgaccggaacagcaggactgcccggccacgtgaatctgggaaatccgttgcaaatatacggtttatttccctaaaaagttcagaaaagtctaatattttatgtttttaagcataatttttaagtttcatctgaagcatctccccattttctgccacgtaaacgtacttgtcggccccacggtcttccacttctatacggtagtaatttccggtttctgtttcaaagaaatccacatcgtcgacctccattccgcttcctgacaaatcggccaaagcttgacgtacgccttcgggaagggtactgtattcgcgctcttctatctcgtatgtagtatgcatccaggaaagaactccatcagccagtttgtagtacacttctttctgacggccaccgtcgctaatttccacttcgatacctcctttttcttcttcaatgtccagaatcacagcctgaggatattttgtctttaccagctccttcacctccgatgtctgtccgggagttaccggagtatgttctccccattctgcttcttcacgaatcagcgtgccatcttccagataggtaagttcatattccttctcacccgattccacttcaatgacgtaaatcacgctggcatcggttttctcaatcttgtccacatcatctactctccatgatgcgtatgcaccggttttaaatgcatcttgcacagtttgcggtaattgagcaaaaggaatgtcatattccgtcatcacccatacaccgtcgggagtaaaccatgctttgttctcatacccgttatctgcaaactcagcttcatagaactgacctttttgttcccagtccactctcgatacattcgggtatcgggtatcaaaagcttcttgcaggtttgccgaaacttgcaaacggtcgtcatcatctttatcacagctctgcaggccgactacacctagtgtcatcattgcccaaaatacaaacttcttcataattcagtgtcccttttttcttttgtttgtgacaaaggtctgacacaattctgaaaagattttgaaataatctgcgaagttggaaaaaaaatgagatttcgcgtgcccagtctatttttatcactatatttggggtacaacaacttagccaatttatatatgatatatatacaccgcattcttgtgatctttttctgtctgtttttctccactgtatcggctcagaaagtgggactggtactcagtgggggcggagcaaaaggtctgacacacatcggcattatccgtgcactggaagaaaacaacatccccatcgactatgtcacgggtacttccatgggcgccatcatcggttcgctgtatgccatgggctattcgccggacgacatggaaaagctcatcagatcggaagatttcaaacgatggtattccggagggatacaggaaaaatacatctactatttcaaacggaatccgcctacaccggagtttatcaatatccgtgtatcattgaagaatccgctgcacaaggtaaaaacacagtttctgccttccagcgtggtcgacccgctacagatgaacttagcgttcgtggagctgttcgggcaggctacggcgctctgccggggaaattttgacaagctgttcgtaccgttccgctgcgtagcttctgatgtatacaacaagcgtccgattattttcaaggaaggtgatttgggagacgccgtacgtgcctccatgagttttccgggaatgttcaagcccattgaaattgattccgtgctggcgtatgacggagggatatataataatttcccggtcaatgtaatgacggagaactttcatccggacattattatcggcagcgtggtaagttctaatccggggaagccgcaggaaggagacattatcggacagctggaaagcatgatcatgcagaaaacggactattccgtgcctgattctacaggtattctcatgacctttaaatacgatgatgtgagcctgatggacttcaatcgttttgacgagcttcacgacatcggctatgaacgcactatggaactgatggattccatcaagaaccggattccccgtcgtatggactatcgtctgctggaaaaggaacgcatggctttcaaaaagaaaatgcctgaattccgtttccgcaatatcatcatacacggagcaaacgaccagcagaaaaaatacatccgtaaggagtttcatagcgaagaagacgggacattctccctggaagagcttcggaagggatatttccgcctgatgtcgtctgacaacatgatctccgaaattattcctcatgcagtctacaatccctacgaaaacgattttaacctggatttgaaggtacgtatgaaggatgacctctcgctgagagtaggaggtaacgtaggctcaaacggagcaaatcaggtgtatgtaggagccacttatcacaacctgaacaacttctccaaggagttctcgctggacggacagttaggacaaatctacaataacctgcaacttgcgggccgcattgatttgccaacccgtctgccgacctcataccggctggtggcttccttgtctacgttcgactacctgaagcaggaaaaactcttgagcaaaggaaatactcccattttcaacaagcaaaaagaagagtttgtgaagctatttgtctccatgcctttcctgagccgccagaaagccgaatttggtatcggagtaggccaactggaggaccagtatttccagaccaacgtcatcgattttacttcagatatacgtgatgtcagcaaatattccattttcggaggttctgtcgcattagacggaaatacactcaacagccggcaatttgccacctcaggacgccgcgaacgacttgccgcacacatctacacaggtgtggagcgatattatcccggaaatgaagacccggcttacaccgaaaactacaaatacatccagtcatggctacaaattgcttatgaactggagaaatatcatacactgactccgcatttctcattgggtacctacttgaaggcctattattcctcgcgtaatttcagccacaattatcgggctaccatgatgcaggccggagaatttgcgcctacggctcacagcagaatcacctacaacgaagcatttcgggccaaccagtttgtgggagcaggtgtatgtccgatttacatgttcaacagtgtgctacaagtaagattgggcatgtatggattcgcaccgattttccccattcgcgaagaaagtaacaaggcaagctacggaaaagtgttttcacagttcgaatatatgggagaattagacctggttgtcaaacttcctttcggctcgatatgcgcctatctaaatcattatagttcaccgagtaagaactggaatttgggcctcacattgggctggcagatatttggaagccggtttatggaataatttttattgaaaaaaatcgcagaaatatttggaagtttcgtacaaactccatacctttgcacccgtcaaacaaaaaggacatggccgcgtagctcaactgaatagagtagctgactacggatcagccggttacaggtttgaatcctgtcgcggtcaccttccttgttagtttgaatgaaatgattggccgcgtagctcaactgaatagagtagctgactacggatcagccggttacaggtttgaatcctgtcgcggtcaccattttctactgaagatttagaaataattggcc

SEQ ID NO: 3782 - DNA, 23093 bp, Unknown
  gut microbiota DNA sequence
ctgtctgtttctgtctcttctgtaagctggaatgccgcttcttctgcttcggcaataatccgttccacgtcatcgtatttctcagtaacagtagtttcttctttcacttccgtatcaaaagattccgggttctgctcgtctgcttgtgcggaaagagtatctgcttccgcagtcaatgcatcggttgcgtcggttgaagtcggattctcctctgcagcagcttgttctcgtgcggctttttctgcaaaaatcgtgtcaatgaactgcgggtcatttttgattttgttcaaggtttcatgagcagcttcctgctgtgattctttcttggaatatcctttaccttgcccagcgggaacctgttctaccacgacctgtgtttcaaagaccggattctgttgctcgtcgaccgtctgctccagcaggttgaattcaatgaggaatttgtttttctgtccccattcaatcagtttcgacttgaagttgacttccttccgcgacagcttctccagattcaggtagggcttgataatacgttcttccatgaagaacttgcaggtggcgtacccacggtccagataaatggctcccacaagcgcttcaaaggcatttccacacatatagctgttgtgtgatgactgccgtgtggtgtattttatcagcttgtccagtccgatttttacggcaatctggttcaatgtttctcgttgtacgattttagagcgtgtattggtcagaaatccctctcttttcccctcaaaccgtttgtacacaatgtcggccactactgcatccagtatggcatctcctaagaactccagtcgttcattgttcaacagtctgcctttagcttttaccgaagacgatttgtgcaggagggcctgctggtagatttcgatgtttcgcggataaaatcccagtatcttataaaaacaaagataagactccttatcctttcgaaaaagaagtcttatctcatctagtatattgctaaacacagtttattcagtgtattttttaatgattacacatgcattgtgaccaccaaatccgaatgtgttgctcaatgcagcacgtacagtacgctgctgtgccttattgaaagtgaagttcaggttgtagtcgatgttttcatcgttgtcaccttcttcgtggttgattgtcggaggtacaatatcattttttacagacagtacgcaagcaatggcttctacacctccggttgcacccaacaggtgtccagtcatagacttggtagaactgatgttcagtttgtaagcatgttcgccaaacaaatccttgatggcttttacttcagaaacgtcgcctaccggagtagaagttccgtgtacgttgatatagtcgatatcttccggtttcattccggcatcttccagagcgctctgcataaccagtttcgcacccaggccttcaggatgagaagctgttaaatggtaagcgtcgccagatgcacctgtaccggccaattctgcgtatatcttcgcaccacgtgctttagcgtgttccagttcttcaagaatcaaacatccggcaccttcgcccattacgaaaccatcgcggctggcactgaacggacgtgaagcacgtgcagggtcgtcattgcgtgtagacagtgcatgcatggcattgaagccgcctactcctgcagggaagatagctgcttcggctccacctgttacaatgatgttggcttttcccaaacggatatagttgaatgcatcagctatagcgttagaagaagacgcacatgcagaagtagtggtgaagttaggtccgtggaagccgtacatgatagaaatctgtccggatgcaatatctgcaatcattttcggaataaagaacggattgaatttcggtccgaggtcgtttttagtcttttcgtaaccagcgacttcttcttcgaaagtatgaatacctccgattccgacaccgagaatcactccgactttgttcaaatcttctttttctacgtcgataccggcatcagttaccgcttctttagctgcaactacagcatactgagtgtaaaggtccatcttacgggcttccttacggtcaatatggtcagcagcgttgaagttcttcacttcgcaagcgaactgagtcttaaattttgacgcatcaaaatgagtaataggtcctgctccgctgacgccgttcaggaggttgttccagaattccggaacagtgttacctactggagtcaacgcaccaagacctgttactactactctttttaattccataaaggtagaattaaattattttgcgttagcttcgatgtaagagatagcgtcacctacagtctggatcttttctgcctgatcgtctggaatagagattccgaattctttttcgaattccatgatcaattctacagtatccaaagagtcagcacccaggtcgttagtgaagctagcagttgcaactacttctgattcttctacgcccaatttatctacgataattttctgtacttttgatgcgatttcagacataattctaagttttttaagtttataaataatgtaatttattgatttttcgctgcaaaggaataaatatttctgattctaagcaaatattcaggcaaataaatgcttttcctttgcacatttttatacattctgtgcacgtaaacttgttttttttatgccttattcccttcgtaaatgatagtcgccgcgcagttgttcaaacagctccgggtgtgcacgcaattcttcgcagtccttgtgtgggttatacaattgaagtaccctcacattctcgtcctgcgataaggtttgattcggattgtcagggagggcaatatgaaaatcagcccgtttatggaagaaacggcaaaatgcttccagtaccatgcgggtagcattggcttttccgtcggcagaataaccggcaatgtgaggtgtgccgataaataccttgtcgagcaactcctgactgatgtgcggttcgttttcccatacgtcaatgacagcactcgttacgagcccttgattcatggctgtgagcagtgcctcggtatctacgacttctccacgtgatgtattgatgaggtaaggggcttgttgtaacttttgaaagaaagtactgtcggccagatggtaggtcttatattttccttcccggatgaggggtgtatgaaaggtcagaatgttacattgttcggccagtgtgtctaatgaacagaaaccttcttctccctcatcagcccgaggagggtcgttcagcaatactttcaatccgatacgttgtgccatctgccggatacgttctcccacatgccctacaccaatgatacccagacaagattcttgcaggttgattcccttttctttttgaagaagcagaagcacggcgtgaagatattgttctacagcccccgcattgcatccgggacaattgctccaggtaatcccggcttgctggcaatatgccgtatcaatgtggtcgaagccgatggtggctgtcccgataaaccgtacgttgcttccttccagcaattcccggttacagattgtccgtgtgcggataatcaaggcatctgcgtctttaacgacctccggtgtgaaggcttttcccggcagatagaccacttcatccgccagttgttcgatgacttcgcggatgtaaggtattttgttgtctacgattactttcatctttgtccaaattattgggttgcaaagttagcattttccctgactgagtgtatgtaaattttgaaagactatcagttgtttatttgtgaaacaatcattatttttgtttttcattattcactgtttaaaatttgttgttatgacttttacagaattatgtcgtcctattttcgagcaggctatcaatgattatcataagacggataacgtggatgctcctattaataatccatatccgttgaaaagtattgaatattatttgtatctgaaaaactggattgacactgtgcaatggcattttgaggatattattcgtgaccctcatatcgatccggcagaagcattggtgttaaagcgcagaattgacaagtctaatcaggatcgtactgacttggtggaattgattgacagctacttcctggataaatataaagatattactccttcttctgaagccacaattaatacggaaagtcccgcatgggctattgaccgcttgtctatcttggctttgaagatttatcacatgcgtaaggaagtggaacgtacggatacagatgaagctcatcataagcaatgcgaggcaaaacttgcggtgttgttggagcaacagaaagatttgtcattggctattgaccagctgattgcagacattgaagctggacgtaagtatatgaaagtgtacaaacagatgaagatgtacaatgatccggcattaaatccggtattatacggaaagaaataatcagactcttttttgattatggcaaagattctggtcattcgtttttcggcactgggagatgtggcaatgacagtcccagtgctttgttcttttgcgaactcttttcctcagcatcaggttgtggtgttaagtcgccctaatatggctgcattgtttacgcaggttccatccaatgtctcgtttcggggtgtggatgtgaaaaaagaatatgccggaatcaaaggattgtttcgcctgttttctcttctcaagcatgaacagtttgactttgtagccgatttgcatggagtattacgtagtcgttttctctctttctgctttaaactcagtggagtgaaagtggcatgcatagataaagagagaggtaaaagaaagaaactgacgtctgttgaaaataaagttttgactccacaaactacttcttttgaacgctatgcactggtgtttaaacaattaggattttcatttcctctttcttttcattctatttttgggaatgaaaagggaaatatcgaaaatatacgctcggttgtggggtataaggaagtacatgataaatggattggagtagctccgtttgctgctcatcagggaaaggtgtatcctatcgaacttcaagagcagattgtacgttctctttccagtagggaaaatgtaaagctgtttctttttggcggaggcaagaaagaagtggcacaattagaacaatggcaacaagcctatccacgagtggtatccgtagctggcaaattaaagatggcagaagaattagcgttaatgagtcatctggatgtgatgcttgcaatggactccgggaatatgcatttggcatcgttagtagggactccggtcgtttctgtatggggagcgacacatccttatgcaggatttatgggatggggacagagtgaaaagaatgcggtacagataagtttgccttgtcgcccttgctctatttttgggaacaaaccatgtatacgaggtgattatgcttgcttaaggcagattactccgaatcagattatagaaaaagtggagagtcttttatgactctccacttttttattgtttatagcgactgcatatcatggagccgtttgtagtatccgtttttctgaatcagttcatcgtgtgtgcctcgttctacaatctcaccttcatagagtacgcatatttcatctgcatttttaatcgtagataaccggtgggcaatagcaattgtggtacgggttttcatgagtctttccaatgcctcttgtaccagacgttcagattccgtatcaagggcagaagtcgcttcgtccagaatcagaatcggaggattcttcaagatagcccgtgcaatgctgatacgctgacgttgtccgccggaaagtttgcttccgcggtcgccgatattggtattgtatccctccggtttttccatgatgaaatcgtgcgcattggcaatcttggctgcttcaacgacctgttccatggttgctccttccactccaaaagcgatgttgttgaagaaagtatcattaaacaaaatagcttcctggttgacattcccaatcaaactgcgcaggtcgtgaatggctacttccttgatattggttccgtcgatggtgatttctccctgctgtacgtcgtgataacgtggaagcaaatctactaacgtggattttccggaaccggactggcctaccagagccacggtcttacctttttctactgtcaggttgatatgtttcagaatttctttcttttggtcatagctgaatgaaatatctttaaattcaatcttttcttttacttctttcaaaggttgtgggtgtacagggtcctgaatggtattttctgcttttagaatcttgtcaatacgttccatagaggctaatcctctcggaatgttatagcttgccttggaaaattccttgagcggattgataacactatatagaatgaccatgtagaatataaaggtagacgcattgatggaggagtggttcgataaaattagagaacctccgaaccaaagcacagccacaataagcaatgtacctaaaaactcactcatagggtgtgcagatgactggcggatagcaaccttatttaccgcatcacgatagtcattgcaacatttctcaaaccgtgccgtcattttcttttctgcaatgaatgccttgatgatgcgtaatcctcccaaggtttcttccagctgtgacatggtgtcgctccagcggttttgtgcatctaaagactggcgttttagggcgcgtcccacttttcccatgacccatcccatggtaggcaatacaaggatggtaaataaggtcaattgccagctggtgacaatgagagttgcaaaataagaaatgattaaaatcggattcttcaacagcatgtccagtgaactggtgatagaggtttctacttcgttcacatctccactcatacgggcaatgatgtcacctttccgttcttctgaaaagaagcccaaaggaagcgacactacttttttgtagactaaaatacgaatgtcccttactactccagttcgtagaggaatcataatggccgatgaaccaaaatagcaggctgttttgagcaaagtcattcctgcgaggaacaatccgagaaaaagtaaggtagtagcagggccaaaactatcaatcagttgtgtggtataatagtagaaattgttagtagccacatccttgaaatcagcgcttccccattccatcagctgatatacacttctgttctctccggtcttgaataagatatttaatatcggaatcaatagtgagaaagaaaaaatattgaaaacagcggacaatacgtttagaagtattgaccatcccaagaactttttgtacggtgctacaaagcgccgcatcagttgaaagaattctttcatcatggtagttgagtgtttgaaataataggcaaagataatgtaaatctgcaagtttaacttgataaaccttctgaaaaagcaggaattttgtagttttgcagtgttttataaaaagagattccatgaaatttgcatattatctggtttttgcgttgtggtatttattgtcactgttgccattgcgagtactttattttttttctgatcttctgtatatccctttatattatggagttcgttatcggcgaaacattgtccgtaagaatttagtgggttcatttccggagaaaagtcaggaagaaataatacgcattgaaaagaaattctatcatttcttttgtgattatatggtggaaaccattaagctgttttccatgtcgaagaaacagattatgcgtcggatgacattcagtggggtagaagatatgaaagccgatttggagaaaaacaatgtcaattttggctttatgtatttaggacattactgtaactgggagtggatagcctcaatggcttactggacaggtaatgatatattgtgcactcaaatctatcatcctctttataataaaaattttgataaactatttttacgcttgcgtaaccagtttggtggggagtgtattcccatgcgagaaaccttgcggcgtatcattacattaaaacgggagcaccaaaaaacatttgtaggctttattgccgatcagtcgccaaagtggaacagcattcatcattgggtgcctttcctgcatcgtgagactcctatcttcatcggcacggaacaaatagccaagcaggtaggagctgtggtatattttacagatgtaaaacggataaaaagagggtactatcattgtgaactgaaacgaatgacagtacatcctcaagagctacccgattaccagcttacagatatgtatgcccgtatgctggaagaaatgattcagcgggagcctgcttattggctttggagtcataaccgctggaaacggactaaagaagagtgggaacgcagacaatcacaagtataatttatattctattcttttttatccatgttctgatgctgttccaatagatgacaaaatgtagcttgataagaaatttaatcttatcccagcctttgtccaattcccgaatcacttggatgttttcttttagtccggctattcggtgcgtattggaaatgccggtacggtcgtatacagaaattacaatgggaatatgttggaattttttctttgtcagatagcaaaatttaaagaaatagaaatcggccgacattttgaaacgtgtgtcataaggatactgtttcatcagttctgtacgaacgaaaactgcttgatggcaaaagaacatccgttgtttgttacatggctctagtgcttttttgataactctttcattacctctgagtgtaaagatatctccgtaaagaatatcttgttctttattctttgtaaaaggaagaacctttgtcaggacatttgtttctgcgaaaacatcccctgcgtttaaaaaaagaatccattctccttttgcatgtgagatacctttattcataccctgatagatgcctccatcaggttctgagcaccagaatgcaagatgttgtgcatattttttgatgatttctactgttccgtcagtagattctccatcgatgatgatatattctgtatcatggtagtcttgctgtaatacacttttaattgttttttcaataagtgaacagcaattatatgatacagtaacaattgtaaatagggctctttgaggattactgttcatgccttttttaatttcttgatgaatagaagaagtttgtccaaaagagaattcttccagctatgagcacagaggtgaatagcgtatgacgctggtgtcacttcgtgtttgttcccagcaaaaatttcggagcggaagatatgcatattatctttcagatcttggtctttgtctaaatataagaatccatatttttctgccagttgtgcataaatcaaaggggcgaacatgtcggccgataagtccttggagaattgtttatgaacataccagtctaacacatcttttacaaacggacactgaggttctgctcccatgactgctgcttgaatctgcataccggaaatatagtcatcaccaattcgtttcccttcaggacttattctatggatagatccggtttgctccagttggctgggatgatattccaagctggaaaagaatgaataatgtagaaagtcatcgaatctttttagaatttttacatctgaatccagatagatacctccttcagtgtaaagggcatacatacggatataatctgcagcgaaggcccatttacgggcttttactgcttcttgtacatatactggtgcagaagaaacatcgaatgtttccatgctccaaagttttatttcgtagtccggcatgacttttttccaggttttcatgcactttcgaattttttcaggatatgggtcgccacttagccagcaaaaatgtatgattttaggtatcatagttttatcttttaaataatcgttttatcttttcttttcttgcatgtttttgttccagtttttgtaggtaaccagtggtgtgtgcaagtgtttcttcttcatcccattctctttgccgtgcatattctctaaccataaactcaaataaatctcttcggtgcgtaatagtacttagatttttgagacatacttctttgggagggcatgtatcaaaaaagagagaacggttaatatcgattacctgaaactgataatgcgcttctttttccgattttcgaaacaggaagttaccgaaattcaaatctccatgtacaatacctttctggtgcatggagacgattagtgacactaagtctgtagcaagtgttttgtcgtaatcttctttaggtaccagaaaagggaaggccggagggtctgggcatgctgtacaaatgaaatatccggtagtgaacagtccgtgttcatatgtttcaagaaaagcaatctcatgaggagtttctatcccgcgttttctgaagattccggcatagcgaaaggctctttctgctttggtactgcgaaagaatgtatatgcaatctgttgaaagaaattaactcgtttgaatcgtttggcaacgactggtgtgccttgaataatgaaacggcgtacaaagtttctgcctgaatagacgatctctccttgttcctcgtcgaacatacgtggaatatcaaagagttcttttgccatatattgataatctggagaaatttctattttcatattgttttttcttctgtaagtgagcgatacaagttcatcaattcttcagcttgtctttgttctgaaaaacgggtaacgtatttcaggccttgttctatcatgtgctgtctcttctccgggtgattcagtaaactgcagattgcttttgtcatgccttctttatcgtctggatgtacgtagagagaatctggcccgcctgcttcttccaggcaagagccggtggcagcaatgacgggtataccagaatgaagagcttcaataatgggaattccaaagccctcaaatcgggaagggtagacaaaaatttctgcctgttggtaaatagctggtagatactggaaggttacatcatgaagaagatgcacacgtttttccagtcgatggcttttgataaacgcatcaatctggttggtatagtaagtacgttttcccactaaaaccaggtgtatatcttctggtattccaggcagggcctttacagctaataatgcgttttttctttcttctatactcccgacacagagaatgtattttgcaggaagatgatatttttctctggcttcttgcttaagctgctctggtgcgggatgggtaaatacttcatcacatccttgataaataacatgaattttatctgcatcaatatcgaaatagtgtataatatcccgtttggtacattgactgatggcaactatggcatttgcatcttgacatgccttcctgaatttatacgtataaatgaaacggtcaatgggtggataacattgtggatagcgcagaaaaattaaatcatggatggttactacgcttcgggtgtgagttgctttccggatattgagtggaagctcattgctaagaccgtgataaatagtgatgtgatctttctccaggctacgggtgatgccgatggagcgccaggcagagcggcactttttccataatcctttgggagagatgcaggaaagcgaaggacatgcggtaagcaagtgattgaatcgaggattggaacggatatgcggagcgtaaaggaaatattcgttttctggatagaaacgataaagaatctcaatcaggtaacggctgtagttccctaatccggtaaaattttgtacggctcgcttggcatcaaatcctatcctcatattaaatatataatggttacgaattttacaaaggtaggttttcttctctattttaccaattgaatgtgaaaatcatttgtttttgcaggtaaaaaagataaagactacgttccttttagtgcttttcaaaggcttttggtatactaaattctcaaaagactatgtaattcattctttttgtgtagctttgcgaaaagcataagtataaattaaaataattgtttgggctgtaatgaaaaaatatgattatttgattgtaggtgccggactgtttggagcagtttttgctcgtgaagctacccgggcagggaaaaactgcctggtaatagatagacgttcccataaaggagggaatgtatattgcgaggatgtagatggaattcacgtgcataagtatggtgctcatatttttcatacagacaataaatatgtttgggactatgtaaattcattggttccatttaatcattttattaattcaccgttagcacgtttccgtgatcgattgtttaatttgccgtttaacatgaataccttttatcaactgtggggagtagtgactcctgcggaagctaaagaaaagataaaagaacaatgtgcggcatacagtcatatcgtgactccggctaatttggaagagcaggctttgaaattgtgtggaaaagatgtatacgaatgcctgataaaaggatatactgagaagcaatggggacgttctgccaaagagttgccagcgtttataattcgccgggttcctttccgctttgtatatgataataattactttaatgaccgttatcagggaattcctgaaggtggatataataaattaatcgatgctttgcttgaaggcattgaggttcgattaaatgctgatttctttactgaacgtactcgctgggaagacgtggcagactgtattttgtttactgggtgtattgatgaatattttgattatcaatgcggacatctggaatatcgtagtctgcgatttgaagaaaaaatactggaaatagatgatttccagggaaatgcggtagtgaattatacagctcgggagattccttatacccgtgttattgagcataaacattttgaatacggaaagcaaccgcatacggtcattacctatgagtatccggatacgtatgaaccaggtaaagaaccttattatccggtcaatgacgagaagaatggagctatgtatcgcaggtatcaggaactggccttacagtgtaagaatgtgatatttggcggccgattagggcaatatacttatgcagatatggatgatacggtagcttcggcattggaattatgggaaaaagaatgtaatcgataaatgtatgagaaattgttatttgtcacgcaattataaaggagtagacggagccgggaataaggcaaaaaccgatatagagcagattatggagtcaaatggttttgtaaacgtcggtttacgtcagacgcgttacacaaactccatactcgcttttctggccacattagcaggtgtgttgaaacttcctttttctttgagaaaaggtgataggctcgtagtgcaatatccacttaaaaagtatttcacactggtgtgccagatagctcattgtaaaggtgctaaggtagttgttgtcattcatgatttgggtagctttcgtcgtaaaaagctgacggtagctcaggaaattcatcgattagggcatgctgattatataatagctcataattctcggatgaaacaatggctgttggataacggatgcaaggttcctttaggggtacttgagatttttgattatctttcagaaactacagcctcctctcatttggttccctcacaaccttacggagtagtatatgcaggagcattgaatcctcggaaaaatacttttttgtatgaagtgggtaattatgttcattcttataaatttaatttatatggtaatggatttgatttggaaaaggcacagggaaaagagcattttaattgtaaggggtttgttcgctctgatgagttgattgctacggcggaaggagattttggcctggtttgggatggcttttctgtagatgcctgtaccggtaattttggagaatatttgaaatacaataatccacataagacctctttatatattcgctgtgaattacctgtgattatttgggatcaggccgccctttctgattttgttcgctctaacggtatcgggatttgtatatcctcgttggccgaattggatacaatattatcttcattaactcctgcgcaatatgctaagatgaagcagaatactgtggaaataagtaaaagattaagtcaggggtattatataacaaaggcattgtcggaagtagcattttaaagaatggtaaaagaaacaatacacatagcttgcaatatagatacttcttatgtgaagtattgtatagtcatgctgacatctttatttgaaaataatcagaatgttagttttcatatacatgtgattaccgaagatttatcaaatgaatgtagaagtctgatggtggagtttgttgaaaataaatatcaccaaagagtggaattttattatgtagatatggatttggtaaaggattgtcctcgatatgcggaaggttctcatatctctttggctgcttattatcgtatatttctaggtaacttattgccattgaaaatacataaagtcttgtatctggattgtgacttggttgttgtgggctcaatagaaaaactttggaatacagatttgaagacttttgcagtagcttgtgtagaggatatgtggagtggtagggaagaaatttatacacgtttgcactatccttcatcagattcgtattttaattctggggtattattggttaatttagactattggagagaagagggattgatgtctaaagcgcttgattatatctccaaaaacggaagtaagttggtcttttatgatcaggatgttttaaacgctttacttcatgattgtaagttgtttttaccgttccgttataatgtacaagatggcttcttgcgtcgcaaacgtcgcattcgtccggagtcaattgcagcgttggaccaagaattgctccaccctgttattatacattatacgggagggaagaaaccctggcaatataaatctcagcatccttataaaggcctttatttccactatctggatttaactccgtggaaaggcgagcgtcccgtagtgcctttttcatataagttgaaaagagtatttgatcaattattgtattttatgaggttagcaagacctaaatatagaaaatgtatagaattatgtccaaagaactcataacagtagtgacagtttgttttaatgcaggacaaactattgctaaaactatgcaaagtgtgttgaaccagacttatcgcccgttggagtatatattggtagatggaaaatcaacggataacacattaaatattatttatgaattggaacctttgtttcatgaaaaagggattgctgtgcgaattgtatccgaaaaagataaaggtatttttgatgcaatgaacaaaggtgttaaattagccaatgggcgttgggtgaattttatgaatgctggtgacgttttttataatgataaaacaattgattttgtattttcccatgaaataccaatggaagtaaaacttgtatacggagatactttgaggcagaaatcatatgctgtagttgccgcaaaagggaatataccagaagtgactccaaaactcatgcctgcttgccatcagtcaatgtttacggatgtagatgaattgaagtctcatccctttgatttatcttatcgcttatctgctgactataatttcgtatataatctgtacaaacgaggtgaaaagatgctatatattcctgttaatatatctttttgtgaggctgtgtatggggtttcatctgtaaataagattgctgttaagaaggagtgtgcacggattcgtggggtcgatcatactttaacttggaaaataaagattcttggaaagcaggttgagtatggaattaaacaaataatagaataccttataccggcttctttcctgaaggagatgaaaatacgtaatcgaaaacgtttagagcatagaaaataattattttgaaattaacatatgatatagtgtacggacacctttatttgtgtattgtgcgtgtttattcttatagctgagtttatgaaagatttgttgctcacataatgtcttgaaagagtttgcgttgtatgctttgttcatcatattttcaaggtcaaaaatttgagaatggtctgtagggatggagttcagacttcttctgacagaagccagatttgttttagcgattgagatgacataatcaattaaaaagtaatctaaaagcttgttctctttttcccaatattggaagaataattcgcgtgcaaaactgcatagtactccttgaggagaacttcctaaaataaatcccatccattttgcttgagaaatgttatctgtatcaatattggctgccactgtaaataacggttcttgaaaaactttttcagggatgagctggctaacatatacagtcgcatctatccataagcctccatgctcatagagcagacacatacggagaatatctgaaaaatgagtaaatgagatttttccttcctgaacctttcgtaggatgtaatccgggatagtaacatattttgatatgttttcttgtgtaataaggtgaaccagatgattgccagcatgtgagcataaagattgaaagcaactttgtactataggtggcatcgcattttctccttgccaccagcaaacccatataggtgcttgattggaggctgggggtatttcttctttttgtgtgtattttagaatgagattttgataatttgtttgaagataatgcaagattgcctgttgtttccgttctcgacgtatatcacgggtacttttactgccaaagtgtggaagtatagccatgacgtatacattgcggatacctgctacactccatacatttgagatgtcgcgtatcctttgtttaatctttcgtattaactttatcttcatgagatttttctttattgtgtttatactcctcaatccgtttcatatactcctggccttttttgctgtttcccggctggaagttcaagtgctcaggaatatttttcccatgatcaataatcattggcttgactccggattttacaatatctaacgagtcgtataaattaccggcaggtacctcgtaggtgctcatgctgagggtatctccgtgaatacggatgtattggtaataccggctttcaataccatatttatcgaaacgctggttgaatgtaattctatagcttttgggagagcagtgactgacagtgtaaactggaggtgttgcacttccctgttcatcgtgaagcgtcattcgggcataagcgtgttcatggccttgcaggacgaggtccacattgtatttttggataagtgagttgaaaatcgttttttgtgccagattgttgtatttgcctttgacggaatataatggatgatgcaagactacaattttccatcgtgcatcacttgtctgaagttctttttccagccattccttttgtgaccacaggtaaaagaactcccggttactgtcgagcaaaaagagttgcaggtcattatacctaagtgtatacacttgattgtcgcctaccatggagtcttgaaagtaggagaataccaatgggaaacgacgttccagtttgcggatggcatatttcaggtattcatgattaccggttacatttaaaacaggatagtactgcccgatggaatcaagaccagagaatgtttctgcccagtatgaatccataggacgttcagtcaggtcacctccaaagacaaagaattctgttttaggatgtgcctgtaatgcttctttcaggtactgattggcttttccgtttatagtatcttgcacgtcgcctacatagatgaaggagtaatcgttacgggtggtctggttataggtatggaaattgtaccatggagaatattttccgttgttacttacccggtagctgtaaaaggtagctggtttaagtgagcgtaagcgggctgtgtaataggcagctttgccgctacgtgactggaacacttctccctttgcttctatccgtaaagtatctttagccagagtgtcgattaactctacaaaagatgaagaggcaactacagaatcgtattgccagctgatgttacgtgaaagttcttctttgtctccaaatgtcaacagtactcttccgggagcgttgagtggtagataagccggttcttccggattaccaaaccatacatgccagcgggaatgaacccaaaaacctaatacaagtaaaatgaggacggagactccaagggtgatacgttgttttttcttcatctttgtttggtttagaaggcaaagatacgaagttctccaaatttatcgttatttttgccgttcagtatttataaaaaggtgagaaatgatgaagaaagaattgttttccaatgtattgtcactggtttggaatttattgcttgtttatgtatgttatacattaagccggctggtgtttctatgtgtaaattgggatacatttagcgagcacttgacttttggatatgccatgagccttttcggggcaggtattatttttgatactactgccatcctttatagtaatgctttatttattttgttgttcttgtttcctttacattggaaagagactcctgtattttataagattgtacgctgggtatttaccagtgtaaatacctttttcctgataaccaatctaatagactgtgtgtattttcgttttaccggaagacgtactacgatgacggttttgcaggaatttcggaatgagggagacgggaaactaacttctatttttttagatgagtttgctacctattggtatctggtattgttggctgctgtgctgttttatgtaatatataagctgtatcgctcgcctaaggtttcctgtgaaacagaaaatgccttattatgtggacaactggtaactctgttgattgctattccttttacagtgtttggtatgcgtggaggtatgactaccgctactcgtcctattaccttgagtaatgccaatcaatacgtagagcgtcctttggatgcgggtctggtgttaaatacaccattctctttgttccgcacgttggggaaagcgacgtttgtcattcctgattattttcctgaggcagaagctgttgcagcttattctccagtgcatttccctgccgattcaactgctttccgcccgatgaatgtagtggtaattatctgggagggattcagtaaacagcatgtaggctcattgaatcctcagctggaaaacggggcttacaagggttatactccttttattgattcattgctggcaaagagtctgacttttcagtattcatatagcaatggccgcaagagtattgatgggatgccgtcggtattgtcgtctataccaagctttgtagaacctttctttttgactccttcggctttgaatgatgtatccagcattgctggtgagttgaccaaaaacaagggatattcatctgcttttttccatggcgcgatgaacggttcaatgggtttccaggcttttgcccgttccgtgggtttccagaaatattttggtcgtaccgaatataatgaggacccgaattacaatggcgatgcggattttgacgggacttgggctatttgggatgaagaattcttgcagttctattgtgaccggatgtcggaaatgaaagagccttttgtcacatctgtgtttacggccacctctcatggtccttttgatttgcctgaacgttataaaggcaaatttcctacgggagatgatcctttatttgaaacggtggcttattctgattatgccattcagcgattttttgaaaaggccgaaaagcagccttggtttgaaaatacgttgtttgtaattacggcagaccataccagtggaaactgctatccggagtatgtgacagatttaggttattataatgtgcctgtcattttttatgcccctgggcttccagagttgaagggcttggataaagagaagatagtagaccagattgatattatgcctacagtgttgggcatacttggctatgatcgcccttatgtgggctttgggcaggatgcatttcatacacctgcttcagagaagtttgctgtaaattatttgccttcaagtggcatctaccagttcctgaaaggtgattatctgattcagttcgacggagaaaaagtgattcatgcctatcgtttccgtacagacgtgctgatgaaggacgatgtgaaagacagcatgccgcaggaagtgcggaaagaaatggaaacccagttgaagtcaattatccagcagtatatgcagcggatgaacaacaatgagctggtttatagagaataactcaaaacagcatataaaaagtaaaccggactttcacgaggcgagaacctctgaaagtccggtttactttttatataaagaatgaattagttcttgttggcacgtttacgttccgtttcgtccagaatgactttacgcatacgcatgctcttcggagttacttccacgtattcatcttccttgatgtattccagtgcttcttccagtgagaagataaccggcggaatgatacgggccttgtcgtcagaaccagaagcacgcatgttggtcagcttctttgatttggttacgttaatcaccaggtcgttttcatgaacgtgttcacctaccacctgtccggcatatacttcgtcttgcggatagataaagaacttaccgcgatcctgcagcttgtcgatggcgtaagcaaaggcagttcctgattccatggcaatcattgaaccgttggtacggcgaggaatgtcgcccttgaacggctggtattccttgaaacggtgagccatgatggcttctccctgagaagcagtcagcacgttggtacgcagaccgatgataccgcgtgacggcatgtcgaattcaatgtttacacggtcgccctgagtttccatggataccatttcacctttacggcgggttaccatatcaatcatcttgctggcaaattcttcgggcacgctgatggtcagttcttcaatcggttcgcacttcacaccgtcgatttccttgaagataacctgcggctgtcctacctgaagttcgtagccttcacgacgcatggtttcaatcaatacagacaagtggagtacaccacgtccggaaacaatccattttccgtcttcgttttccgtcttgcgtacgcgcagcgccaggttcttgtccaactctttcatcagacggtcgtggatgtggcgtgaagtcacgtattttccttccttaccgaagaacggagagtcgttgatggtgaacagcatgctcatggtcggttcgtcgatggcgataggtggcagcggttccggattttcgaagtcgcagatggtatcaccgatttcgaagccttccacaccgatgatggcacaaatgtcgccagaagatacagattctactttcttgcggcccagaccctcgaaggtatgtacttccttgatttttgatttcactaatgtaccgtcgcgtttagccagggtgatgttcatgccttcttttagtgtacctctgtgcacgcggcctacggcgatacgtccggtataagaagaatagtcaagtgaagtaatcagcatctgcggagttccttccagctgtttcggagccggaatgtatttcacgatggcatccagcagcggagtgatggtgccggtcggagttttccagtcttcacccatccagttgttcttggcagaaccgtagattaccgggaagtccagctggtcttctgtggcgttgaggctgaacatcaggtcgaacaccatttcatatacttcttccggacggcagttcggtttgtctaccttgtttaccactacgataggtttcaatccaatctgcagggctttctgaagcacgaagcgggtctgcggcatcggaccttcaaaagcgtccaccagcagaatacatccgtcggccatgttcaagacacgttccacttctccaccgaagtcggcgtgtcccggagtatcgataatgttgatttttgtaccgttgtaattgatggatacgtttttagaaagaatggttatacctctttcacgctccaggtcgttgttatccaaaaccagttcaccgttggtctggtcgttgcggaacaggtgtcccgccagcatcatcttgtccaccagagttgtttttccgtggtcaacgtgagcaataatggcaatgtttctaatgtcttgcatactatacctatatataattgtgtgcaaaattactgtttttcagcgaaaggcgggtattttatgcagggtttttatattttttggcggaaactggactgcagatgccggtcttcatggggaagaaacttccgtcagggctttcaaaggaattcttcttccgggtatgaaaaaaagatgtaaaacgcttgtagtctgaaagattatgcttacctttgcatccgcaaatcaaatttatacattttaataaatagtcaaattatgtatttagacgcagctaaaaaacaagaaatctttggaaagtacggaaagtctaacactgatactggctcacctgaagcgcagatagcattgttttcataccgtatttctcacctgactgagcacatgaagctcaacagaaaagattatagcactgaaagagctttgacaactttggtaggtaagcgtcgttctttgctgaactacctgaagagccgtgatatcgaaagataccgtgctattgttaaagaacttggtcttcgtaagtaatccgttacttgctgcaggcaaaaaaataagccgcttttccttcaagggagagcggcttattttttgtaccctcgtcgggaatcgaacccgaatctaaagtttaggaaacttctattctatccgttgaactacaagggcaatcttccgcaaaagtaagtctttttattgaatatccatgattttggtatgaaaaaagcggttccctgttgatttttacgtcttttttagctgccatggaaaacctcgaagcgtttggaagaaaacgccaaagcgttttgtttgaaacgcaagttcattttacttcaaacgcacttgcgtttcatatcgaatgcacttgcgtttgaagtgtactgaaaatagttgtcagtttgaagattaattcctgacaaagttgacaggttaaacattatattcctaaaa

SEQ ID NO: 3783 - DNA, 101669 bp, Unknown
  gut microbiota DNA sequence
ataaattgtgtcaacttatttagtacactacagtttgaatctaaacgcacttgcgtttttttagagatgatttttctggttggaaaaatgggaaaagtatatcgggagaaacagtccggaacttatctttttatgaattaaaaacgcatgtaactgtctgggtctatagagaaggctttcctgttttcggtcgataaaccggtgtgcggcacggctttttctcaatgaaatgggaaaggtgtaaaaaaagcttttgcggttggatatatccctttgggttatggctaaaagccgtttgtgtgtatatgagggggagaatctgtacaaaattccatgtatttgtacaattatggacttttgtatatttaaattttctgtaacattgcgatgcaaattaaaaataagaaccttaaataatggcgaaagaagcaaaagttatatataagtcaataaaaacgattaacaattttattaaaaaacacatgtatgaaaaacattagttccatggcggctttagccgcgttactgcttgtgggttgcgggcaggacaccgatgtaaaatttgctggcgacgaaggggcgaaagtcactttcagcgcgtcaatcaacgaacagaattcgcaggatgtatcccgtgtgactggagtgacctgggatgacggcgatgaggtgagcatttcctgcggacctacacagaaaaatgtgttctaccgttacaatgccgccgacaattcatttaccgctatcgaccgttttgatgaaatctggttgcttggaaatgaggagtacgatgtgaccgcttattatcctcacgtaggagaagaaggaactgtgcctcccgtgcagacagtagaaatcacttccgaaaatcaggatacgcccgaagaacgtgccgccttcgatttcctctacgcttctgccaaggctacaaaagccgagccgaatgtgcatttgaacttcaaccacgccatgagccgtgtgaacctgaagtttgtgccgggaacagacccggaaggaaatccggtgactttgacagatatagaatgttacctggtaggtatcaagcggaacggtacgttcgatacggaaacgggtgtggctgcggtgacagaggatgcggctgtcagtgatttgcgtcagatgctgaatgcggacaacgattatactttcaccgcatatcttcttccgcagacgataggagctgaagggcttcagattgaagctgcgatgactactgccgatggccgtcgcatttattatttcctggaaataccggtaagcgactggccggaaatgaaggcaggttactcctataattatacgttgactgccaatgattatatgacggcttctcccacagtacttgaaatttcaggcacagacattaatccgtggacagaagtaaataaggaagaaactccggatgcgaaggcattgggtacggaagccaaagcagaaggttcggaatggggcgaaatggaaacggaagaaattattccggtggaaaaacaataaattgactttaaattctaaagattatgaagctatataatcatatttcaacttgggcttttgccggactgctggctttcaccggctgttcacaggaagaaagcctggaaggaagctcttctttgcaagggttccagataagtgtgaccgacgcaggattccagaacctttcagaaggacgtgctaccgatgagaacttcaagaccacttttgtgaaaggagatgccatcggggtctatgccgtggaaaacggacaagtggtagaaggggtagccaaccgtaagtttacgatgaatgaaaaaggagaatgggacttggaaggtaacccgattgagtatgacagcgagcgtttcaagaacattactttctatgcgtattatccttatcaggcagacgaggaatccattcagtttgatgcggcggcggaagaccccttcgcttcattggtaagcaactggcagattgcggccgaccagggcggtacgaaatacacccaaagcgacctgatgaccagctccagcaaagcggaagacggccgtcttcaaggaaaagtatcgttcaccatgctgcatgaaatggccttggcggtgctgaagatacctaatctggtgtatgatttcacgaacggaggtcttgacgattatagcctgaacgtagcgccgaaagaacttcttataaatgacgtgaaaaccactccttattacgatgcggccagtggtacgtacatggcgttggtgaaacctgaaacaaattattccatttcaggaacttaccagggagcgaaggagatggcatttagtgcggcaggaagtctggctagtggtaaggctaaaatgtatattattaatgataatgatgctaataagctagattacaccttgcagattggtgattacctttgtgccgatggtaatctggtaagtgtagatgctgcaacagttcctgacaatgcaattggtgttgtatgttatgtgggtaatcctcagccgcatgtgtatgctccagatgcttgttccgaaactcaggatgctttgtatcgtgattatcctaactgttctcatgggttagttctttctttaaataatgctgttttacctgatggaacagctacatctcagtatcacacaagcaagagtggaacttatgatacatggtttgattcagatgaggaatgggctggtaagtttgtttactgcaattcaaatcgtgatggtaacttgaaaaatgatgcattgactatgttcccggctttctttggttataacaatacggtcttgatgactatggtaacagaagaaggtaaaggttctccttctacttgcgataatgcttatagctttatcgtggcctatcgtaatgctgtagcagttccttctgctgcgactccttggtatattccttctattaaagactggcagcaagttgctgataatttgactaatattaataagagtatcataaaggttggcggtgaagaaatgacatctgttgataatggtgctttgacaggacattattggtcaagtactcaacgtaatgatacgtttcagtggactcatggtatggacggaggagcatataatttgatttgtgaacgtggttcacgtgctgggcaattccgcatgatgttagctttttaaaatcaaaaattaaaacggcaatatgaataagaaaaagaattatataaaaagtaccgctctccccatggcgatgcttctttcggctgtggctgtctctccgcttttaggagaaaaggcatatgcggctgtagaggccactcagcagcagggcaatatcaagggaacggtcgtcgacagcaatggtgaacccgttatcggtgcgaatgtcatcattgaaggtaccacaatcggtactattacagatattgatggagtgtttatgattaatgccaaaccgggacagaaactgactatctcgttcatcggttataattcggtaaccgttccggcaaaagctgacatgaaagtaacattgtccgacaattctaccatgctgggcgaagtgcaggtggtagcttacggtgtgcagaaaaaggtaagtgtgactggagctatctccagtgtcggttcggaagaactgatgcgtacgccggtaagttcggtcactaatgtgctgggtggtcagatgaccggtttgaccacggtgcagtattccggtgagccgggtgcggatgcggccgacattctggtgcgtggtaaagctactttcggtgattcttctccgctgattcaggtggacggagtggaacgaagcatgacggacattgacccgaacgaaatcgagagcgtgaccgtgttgaaggacgcttccgctacggcggtgtttggtatccgtggtgcgaatggtgttatcttgattactaccaagcgcggtaaggaaggaaagccgaaaatttcgttctctacttctgccagtatccttcagccgacaaagatggtggaacaggccaattcgtatcagtatgccactttctataaccagttgatgaagaatgacggacaagacgaggttttctcgccgacgattgtggagaaattccgtacccattccgaccctatacgtttcccggatacccgttgggccgattacatcatgaaaagcgcggcgttgcagagccagcataacatgagtgtgtcgggcggtacggacaaggtgcgttatttcatttcagccggagcttatacgcaggacggtctgttcaacagtttcaatctgccgtatgatgtaagttattcttacaagcgtttcaactatcgtgcgaactttgatattaacgtcaccaagtcgacacttttgtcgttcaacgtggcaggtaatgtagataataacagcaagcctcataccagccagggaacatccggtatgattaagaacatgtactatgccactccgttctccagtccgggtattgtagacggaaagtttattaccacagctaccgattacagtgacgaaagacttccttttaccggaggtaatggtatggcatactatggtgccggttttgatagggtcagcaataacaaactgacggccgacctgatgctcgaccagaaactggatttcattacgaagggactttctgtcaagttgaaaggttcttacaacagtggtttcgtagtgacaaagaccggtacgggtggtgccgtagccacttatactcccgtgttgcaggaagacggaagtctggcttaccgtaaggcaggcgagaatacggatgtaagttattcttacagcaccggcaagtcgcgtgactggtacatggaggccagcttgaactatgcccgttctttcggcgaccataatgtgacggccttgctgttgtacaaccagtccaagcagtattactttggcagcagtagctctcaataccgtgacattccccgtgggtatgtaggtctggtaggacgtgtgacctacgactggaaaaaccgttacatggccgagttcaacatcggttacaacggttccgagaactttgcgccggaacgccgcttcggtaccttcccggcaggttctgtgggatggattatgagtgaggaaaaatggttccagccgctgaagccgtggatgacattcctgaaactgcgtgccagtctgggtctggtaggtaacgacaagccgagcgacctgaacctccgtttcctttacctggccgacccgtatgaagtgaataacggcagtctgcctaaccgtaacggcggatacggatacagctttggtattgaaaacagtacagtcagtctgggagcaagagaaaccgccaagaacaatgccgatgtgggttgggaaacagccttgaaacaaaactatggtgtcgacatgaatttctttgacgaccgtctccgtacttcggtggactattaccgtgagcaccgtaaagacattctgctgattgacggaacggctccggggctgctgggcttcaccgtgccttacgccaacctgggagaagtggagagctggggatgggaactgtccttgaactggaacgacaagattggcgataacttccgttattgggctacttttaacctctcttataaccagaatgagattctggaagacaagcaggcgcctcaaagctatgattatcagtacaccaaaggacatcgtatcggcgcacgttcgcagtatgtgttcttccgttactacgatgagcagactcccgaactgtatgagcagacgttcaaccgtccgtatccggaacagattcagaccttgcgcaacggagatgccgtctatgtggacttgaacggtgaccgtaagattgataccaatgatatgagttatgactatggttatacggacgacccggaatacatggccggtctgaccttgggtttcagttggaagaactgggaagtgagcacgcagtggacgggcgcatggaacgtgagccgtatgatttccgatgtgttccgccagcctttcttctcatcggccgacgcttctcagggaggtttgctggcttaccatctggacaacacatggacggaagacaacccgtcgcaaagttccaagtatcctcgtgccacatttgtgaaccgtgacaataactacgctacttccacattgtatgaacaggactccaagtacttgcgtttgaagaccttgcaggtggcttataattttaatcttccggtgatgaagaaactgggattgaacacgttccagttggcttttagcggctataacttgtggacactgaccccgtatttgtggggcgatccggaaaccagggcctccaatgcgccttcttatccattgtctaagacatatacattgagtttgaaacttggattctaaacaattaaagatagaaaatatgaaattaggatataaacttttgttcggcgcatgtgtggcggctaatctgattgccacgtcatgtgtggacgatatgaaattcggaaattcattcctggataaggctccgggtggtaccgccacagtggatacggtattcagcagcgcggtctatacccagcagtttctgaattcaatttatggtcgtcagtattatggattgccttataaggatgatacttccttgccggtgtccagcagcccgtattgcggtaaggtagaggctttgacagactgctggcagttgcactggcgtgacgcgcagctttattcgcagtattacagcggtatccatacggccaattacagccgccgtcaggataagttctgttataacgatgaaaaggtgtgggaagtagtgcgctggtgctggctgctgatggaacacatcgacgatgtgcccaatctggatgccaatgaaaaggcgcgtatgattgcggaggccaaatgcttgatagccgtgcgttactttgacatgttccgtcattacggggggcttcctttgctttatgcctcttttgaaggaaatgagtccagctacgaatgtccgcgtgccacggtagaagaaacagtgaactacatgattaagatgttggatgaggccattgattccggggctttgccctgggcatacggtcccggtgccgacggaagttccacctatactggacgctggaccaaggcaggtgctatggcgttgaagtgtaaaatctggcagtttgccgcttctcctttgttcaatgacaatcagggttatgcgggcggtgcctcagaagcggaacagcagcatctggtatggtacggaggttatcgttcggaattgtgggaaaactgcctgaaggcttgcgaagacttcatgaacgcattgcaggcaaatggttattatgaattgaaccagtctgtcaataacacaccggccggttaccgttatgcctaccgtatggggtacctttatcaaggaagtaaggaagtcattcattctgtcagggttcagatgggagacgcttttaattccagtacttatttctggcataattggagcgatttgggacgtaactcttatacgcctacacaagaatatgtggaaatgttcccgtgggccgacggtaaaccgttcaattgggaggaaacagaggcagaaggcaagctggatgaaatgttcgcgaaaggtactttggccgacaataacctggaattgacccgtgaccctcgtttgtatgagacagtgatagtgaacggattgcccaagatgctggactggtcgaacaatgccgggttgatgtccggacagccatacgaactgtgggtaggcggttatgatgccggaaacaactcacgggatgagaccatgcgttttgctactggctatgacaatatgaagtattatatcggtacggaatatcagcgtcagtattgccagtgggtgactttgcgtctgtcggatatttatctcacttatgcggaagcattgcttcaggcaaaaggggacaatgcgggtgcgttgacctggataaataaggtgcgcgaacgtgtaggccttggcaagctggaagattgtaatccggaaaagaacctgacttcaaacaaggaaaacttgttggaagaattgctgcgtgagcgtgtgtgtgagcttggtatggaagacgcacgtttctttgatttgattcggtataaacgtgcggaccggtttgaaaaagagctgcacggactgttgatttaccgtctggatgagaaaggaaaccgtatagagacgaaatggtttgaaggtgaccagaatcaaggagctccccagcccgttcattttgactatgaaagatttacgttgcacaatatccgtcgttactggtgggattatggttttgacaccaaatggtatttgtcaccgttccctcaaacggaaataaacaagggatacggactggttcagaatcctggctggtaatttataaaagtataagtaatagatttttgataatagctttatgaaaaaatataagaatctgatgtgggcatgcctggccttgctggctgttcctgctggtgctcaggacacggacaacaatgtcagaggaatggttgtcgacaagtgggggcatccggtttatggtgcttctgtcatggtgaaagggatgccggaaacaagagttgagacagataaggatggaaaattttccatagaagcttctgccggacagcaattgaatattgtgtcagtagataaaggtacgactacggtaaaggcggacggaaagtcgctggtgaaggtcgtactgaattacgcggggcagtctgtcgacgtgggcgccggacgtgtttttacccgtgccgagtctacggcagccgtttctaccatttataatgaagactttgataagcgtagtgctaaaaacatgtctaattctctgttagggcagggaatgggtatgatggtcttgcagaattcgggaaattatgcggatgtggaacctactttttatatcagaggacttcagagtctttccagcagcaatccgttgatattggttgatggtctggaaagagacatgagcctgcttagcccggaggaagtggaatctgtatccgttttgaaagatgcggccgctgtagctttgtatgggtataaaggaattaatggggctatcctgattacgaccaaacgcggtaagtataattccaaagaaatcaagtttacttatgaccatgtaaataatttcatggaccggaagccggagtttgtggatgcggccacttatgcgcaggcttataatgaggcacgcaggtatgaaggtttgtctccccgttatgcggataaggaagtggagtatttccgtaatggagacttcccttatttgtatccgaatgtaaactggcttgatgagactttcaagaattcgggcatttccaacaagtatacgattgaatttcgcggaggtggttctaagttccgttactattctatgcttgacctggtgacagacagaggtttcgtgaaagaaggcaatatgaacgaaggctattctacccagaacaagtattcgcgtgccaatctgcgtaccaatatggatattgatgtaagcagtactacaaaactgaaagtgaatattttgggtacattgtcggaatctctccgtccgggtgcttctgccaatctgtgggatatgatttataccctgccggcagccgcttttcctgtaaaggatgaggacggcttatggggaggaaacaataccacttggttgggaacccagaatccggtggctcaatctcagggagcggcatattcaaaaggtcatacgagaagcttgtttgcggacctgaccttggaacaagacttgtcggctgttacagaaggtttgggattcaatttcagattggcttatgataactattcttctatatgggaagaccatagccaggcttatacttatggcggatatacggtgacttatactgatttgacaggacctttgtatacgcatacaactggaggtgagcctacagaaatgggaaaagacggaagcataaataactggacacgccagttcaacttctctggtggatttagctataaccggaactttgcggatacacacgatgtgtattctcaattgaagtgggaatatgagtaccgtgattcatacggcttgaatacaaccatttatcgccagaatgtgtcatggtttactcattatggatatgacaagcgttatttccttgacttggcgttggtaggctccggctccagtctgcttgctcccggtcataaatgggcgttttctcctacagtgtcggcggcatgggtgctttcggaagaaaattttatgaacaatgtgtcatggattgatttcttgaaacttcgtgcttcattcggcattatcaatgcggattatctgccggccagtgatgtgtatgattactgggaccagatttataccacaacaggtacgcgctatatgttcaatagtgcgtatgattcttcattcggtacgacagaactcggccgtttggcaagtacgaattatacgcatgagaaaggatataaatacaatgtcggtgtagacgccacgttgtttaaagggttgaatctttcggtagacgcatattatcagcgtagaaacaacatctgggtttcttccgaaggtaagtacacggctgtcttgggacagactcctccgtatgagaacgccggtgtggtagacagttggggcggcgagttcagccttgattacacgaagcgtgtgggagatgtggtgctgaatgctggaggtagcttcaactggaaccggaatgagattaaggagcaactggaggaacctagaatgtacgataatcttgtacagaccggccactcgttgaaccaggtttatggtctggaagctgtaggtttctttaaagacgcagatgatatagccaacagtctgcctcaaagcttcggaacggtctatccgggagatattaagtatcgtgatgtgaacggagataaaataatcgacagcaatgacgtgacggctatcggttatagcacagtcgctccggaaatttattatacgttccatttgggagcggaatggaaaggacttggatttgacgcccagttccagggaacaggccgttattctgccatcttgaatacgaagagtatgttctggcctttgctgagcacaactacgctttctactcattattatgaaaatcgttggactcctgataatcaagatgcaaaatatcctcgattgagtactcagagcaatacgaacaactaccagacaaatacagtgtggttggcagatcgttccttcttgaaactccgcaatattgaagtttattataatttccctaaatcatggttgcagaaaacaaaattcatcggcgatgcaagattgtatgtacgaggagttgatttgctgtgctttgataagattgatgtgttagaccctgaatcttatggagcgacaaacccattgaacaagagtctgattgtaggtttgaaagtaggtttttaatcttaaaagaaacgaagaatgaaacttagaaaaattgtctatggtatgttgtgtatgggagcattggcttcgtgctcagaccaaatgaactaccatgaatataataattatgatgaagattttgtgaagctgaattttagtaatgttggaggtctgattaccactatttacctggatttggatactgattttggtaattattctggagcaatattaggatcggctactgatgagtcacagtatgcatatacaggaaattctattgagacattttataatggctcatggagtccgactaatgctcaaagtggaacttggagtacatgttattcgggtatttcaaactgtaatctgtttttggataagtatgttggattgacattcccagagttagagcagaatgcagactataaacctcagatgttccgttacaataactatcagtatgaagtacgttttctgcgtgcctatttttactttaatctggtgcgtcagtatggagatgtgccgttcatcgatcatttcttgagtgcagatgagagcaatacattgaggcgtactccggctaaagatatttttgattatattatttcagagtgtgatgatataaaggatctgataattgaagattatgccaaccttcctgcagatgtggtattacctagtgaatctccagaaacaggtcgtgtaaataaagctacagttttggccttgaaagctcgtgcggctctttatgcagcaagtccattgtttaatacagataataatccagaattatggcatcgtgcggctacagcgaataaagaattattggattattgtgtaaatgaacgtggcatgaagctggttagtgactatgcctctttgtgggataaaaataactataagaatgctacggatgaattaatttttggtcgtcgcgcgaatcgtgaatctagtactatggagtcttataattatccggttggaattgaaggtggaaatgggggaaattgtccgacacaaaatttggttgatgcgtatgaaacaactgatggttgtcctgttcgtctggttgatggagtatggactgcagaaggaagtcgtgtttttgacccggcaaaaccttatgacgaccgtgacccacgtttgaaaatgactatttgtgtaaatgaggaaacaggatggcctacatggaatgaaactccgatttatacttaccagggaggagcaaacggacaacctctgaacggaggtaccccaactggatattatttgaaaaaatattgccagggagacattgaccttcgttctaatagtactaataagtcggcttatcatacatggataacttatcgtttgggagaattctatttgaattatgctgaggccgtgtttcgttatttgggtagtgcggatgctacggatagcgagtttaccatgtctgctcgtgaggcagcaagtatgacccgtgaacgtgaaggagtcgaaatgcctcctttcccgttgaatatgccggatgaggaattttgggaagcctataaaaaagaacgtatggtggaacttgctttcgaaggacatcgtttctgggatgtgcgccgctggaaggaagccgacaaatattttgtgaacatagaaggattgcaaatctcaaaaacaggagataatactgcttattcttattctacagtggtaaatactcgtcagtgggacgataagatgtatctcttcccgatacctcaatccgagagaatgaaaaatcctaatttaagtcagaatccgggctggtaagtcccggattccggaaaagtataaatatttaaaaatataagatatcatgaaaagactatttacaagtttcttaggtgctgtctgtctttttgcattatcagcatgttcggatgaagaaactccggctccgcaaccaggaagtggtgatacagaagaactgcctgcacttccctctgaagtggtaaaagacggtcgggctatgtgggtaagttatgatcctactcctgatgcggatgctaattctactacttttatacatggggctttggttagctggcgactattgcaaagcgatccgtctaacgtggcatttgatatttataaatcggtagatggagggcaggaagtaaaattgaatggcgaggcactgcttaattcaacttgctttttagatgaaaatatagatgctacaaaagcaaatcattatcgtgtcacattatctggaaacactgaaacaatttgtgagtgtgattttacgccagagatggctcaaacttattaccgtaaaattacattgaatgcgaacccttctacaatagagctgcctgaaaatggttattatgtggctgatgatattcaggtaggtgaattggatggtgacggtgaaatggaaatcgtgattaagcgtgaaccttatgatggagctaatcaggggggatggcataatggtactactttattggaagcctataaattggatggaactttcctttggcgtattgacttgggagttaatattcgttcgggctctcattatacttcttatatcttgtatgattttgatggtgatgggttgtgtgaaattgccttccgctctgctgaaggtacccagtttgcagatggaaagatgattacaggagaagatggaaaagttcatgattatcgtattcgtgatttaaatggtgccggatgggcttcaggtgcaaaacttcctactacttgtggcttgatttttgaaggtcctgaatacatctcaatttgtcgtgggtatgatggacgtgaaatagcacgtacagataatattcctcgtggaggtgaaggttctaaagtagaacgtgctgagtattggatggattattggggcgatgattatggaaaccgtatggaccgtttctttattggtgctgcttatttagatgggattcctgatccatcaactggtgctagaacaagtaatcctagtctgattgtgactcgtggcgtgtacaagaattggcaggtttgggcctttgacctaaaaggatcggaactggaaaatcgttggaaatttgataccaaggatcatgatgaaaaatggttggcaatgtgttctcatgcttttcgtgtagcagacttagataatgatggaaaagatgaaattctctatggacaggctgcaattgatgacaatggaaatgaactttggtgcactggaaatggacatggagactgtttgcatgtgggtaaattcattaaagatcgtgatggcttgcagattgtggcttcctttgaagaagaaaatacatatgcagtacaaggattggggtatggatgtcaggttattgatgcacgtgacggttcattaatttctgctcatggtgctggaatgcatggtgatgtagggcgttgtattgtagcagacgtagatcctgatagtcctaatatggaattttggtcttcgatgaattctggaatgtacaattgtggaggttctatagatgtacctataagtcctgatatgcctactggtattggtggtggtacgttatataatgcagcaatttggtggactggagaattgactcgtgagttgtttgaccgtgctttgattgtaagctataaagctaatccgagaacgaataagaaccgtcttgtgaattttgcaactggatatggaagcaatgaaggtaatcatagtacaaaatataatccttgttattacggtgatttcctgggcgactggcgtgaggaagtaataatgggctcttcagaccattctgcgatttatattttctctacgaattatccgacagagcatcgtttcccgcatcttatgacagatcatacttatgatatgagtcaggcaatgcagaatataggttataatcaacccactcatttaggctattatatcggatccaaataatagtaaacaaaagttagttagatttcggttggcgtgtgagcaagtgattgtgtggacgccaaccatttttattttgtataataacaaaagagactatttctcggaaaaatggaaatagtctcttttgttttttgattgaataagacgaaaatttaaatacccctttccttgataatgccgttctggtaagctaccagcagtttcttcaaatcttcaatttgtaccatcagttcgcgtcctttgtcggtatctttcaccatcatgcgctgactgctcaattctacgatttgggtggtcgacttgatgtcttgtccttcttcgatggctttttgggtagaagtgaagggttcgtgctgtacaagctggaaaccgcgtgagtggtacaccaatgtgtagcctgcaatacccgtttccggttggtaagccttggagaatccaccatcgataaccatcagtttaccgttggccttaatcggtttctctcctttgactgcttttaccggtacatgtccgttgatgatgtggcggtgttctccttccacgccgaattcatccagaatcatgtcgcagatatcttcacggtcgcgcaaagtgtaataatagcctttcacttctttatgagtttccttgtcggtcaggaaatagcgctcgaaggtagccattttactcttatcgaaggcaggagagttctttccgcaccacaggtaccagatgaagtctctggcaaatgctttttccggattatcttcttctgcaaaataagctgtacggatgagctggcctacgcgcttgagcagggcttctcccttgtatttctttccgaggatgtctacttccttaagcgttccgtcggcattcatcggcatagaagcgtggaagagcaggttggagttgcatacattgtacatgcatccgtaacggaaaatgcatttcatgtgcttgcgcaacttttcacttcccgtgaaggatttgtgcagtttctgtacgatttcttcttcttcctctgtcaactggtatgggttttccgggtcgatggtcgggaacaggcagtcgcgcatttcgtaatcttttccgtcaagctggaatactttccgcttgaaatcgatatggtgcaacagcagacggctgttcatgtcgaattccggatgacgccggatggcagcagcttccagcttgaactggataatggtgatggccttgtgcatctgcgagatgagccgcaaggtcttgtcattgtatgaactgctttcgggcgcaatcttaggagcaaagtattcgcatgggtcgttggcgtaggcttccatagcaaaggtagccagcggaagcaggttgatgccgtatccgtcttccaatgccggaaggttaccgtagcgcatggccagacgcagtacgttggcaatacaacagtcatttcctgaagcggctcccatccagaggatgtcgtgattgccccattggatgtcgaagttatggtagttgcaaagtgtgtccatgatgatgtgaggaccaggaccacggtcgaaaatatctcctaagatatgcagtgagtcgatggtcagtcgctgtatcaggttacacagtgcaatgatgaagtcgtcggcacggcgtgtctcaataatggtacggataatgacattgatgtaagcctgcttgttgggatccatgggactttcgtgaagcaactcctgaatgatgtaggagaattcttcaggcagcgccttgcgtacctttgaacgtgtatatttggatgatacattctggcagacttttaccagctggttcagggtgatgacataccagtctacgaggtctttttccacttcctttaccagttgtaacttctgttccggataatatatcagcgtgcagagttcctttttctccatttcgcggaggttgttgccgaaaatctcgtttaccttccgtttgatagctccggaagcattgcggagcacatgctggaaagcttcgtattccccgtgcaggtcggccagaaaatgttccgttcctttcggaaggttcagaatggcctccaggttgatgatttccgtgctggctgcagccaggttaggaaaatcgtgtgaaaggagttccaggtagcggatgtccttctgtatcatttccggggtaatttgtttgtaggttttcatgatattgagtgatttaaaagttgctataaaaataacatgagcactaattgtgcgatgatgacgcgggtaaacattccgagagggtagaccgtcgcgtagcttaccgaaggttcatctcctggaatgatgtcgttggcatagttcagtgccatcgggttggccatacttccgcagagcataccgcatgtattgccgaagtccattttgcacagacgaagggataccaaagccatgataacgacaggaataaaggttatcaggaatccgatgcctacccacaaggctccttccggacgcatgacggtttcaaagaagtgcgcaccggcatccagtccaagacaagctaagtaaagagacaagccgatacctcggagcatcagattggcactgcgcgtggtataggtcaccagatgcagacgaggcccgtaggctccaatcaggataccgattacaatcggtccgcctgccagtcctaatttgacaggtgagctgatgcctggaatggcaataggaatggaccctacgatgagtcccagtatgatgccgataaaaatagaggctaagttagggtctttaagcgtttttacggtatttcccaatactttctccacattctgaatggctgccgcttcacctactaccgtcagacggtcacctaattgcagtaccagtcccggagtggccagcagttgtacaccgcttcgcagcacacgactgatattgatgccatacgtgttgcgcagacggagtgaacccagtttctttccgttgatttccggtcgggtgacgataatgtgcttggaaatcagtttgctgtcgatggcattccagtcaatgtcttctttgttccagtcccgtttttcctgttcaccgaacagaatggtcagtgtgggcgcatctttttcggtcgtgattaccagaatacggtcattctctttcagtatcttttcagaagtcggaatgctcacggtaccttcacgccagagtcgtgagatgacgaatttgggatagcccacctgagcaatatcctgtatgcttttgttgaagatggcaggattgtgtatctgaaaagtagcaatgtacgtgtggttggagtcgtcgtgttcatgctcctgcatgtcagacgggcgtacaaagaactttctgataacgacgatggcaaaaataactcctaccactccgagtggataggtcacggcacaactgagggcagctccgctggtgggctcacctaactgtttcagtgtctgctgtgcggcacccaaggcaggagtattggtagtggctccgcaaagaatacctaccatatcgggcaagctgatgggggtggtcatgctcagcactacggccattattgtaccgaggaagatgactcctaatcctaacagattcagacggtatccgcctcgctgaaatgagctgaaaaatcccgggccgacctgtagtcctaatgaatagacaaagagaaccaatccgaagctttctgcatagctgagcatttgcggatcgatggcgagccctaaatgcccggccagaattccggtgaagaaaacaaatgtgactcctagggagataccgcagatatgaattttccctaatcctaatccgattgccgtaatcaacgacagtatgatgaccgcctgaagagcggattgttccacaaataaattaattagccattccatgctgcaaagatatatactttgtggaaaataattctttcgtgtcagacaaaatgttagaaaaagtatgcagaaaagaaatccccgaaaggctttcatcgccaatttggccgataaaagtctttcggggatgataaaataatggtaggacttgtatgccggaattatcgaacgaacaacagttcgcgatatttcggaagtgtccacatctgatcgtcgacaatcagttccagcttgtcgatgtggtaacggatttgttccagcatcggagctactgtatcgtgataagcaatggctttttcacgttcgctggtaatgcggttagccaccttacgggcttctaccatttcatccacatgcttcttgatgaaggaagtatgttctgaaatttccttgatgatagccaggttttcagctgacaaggtctgagcttcttcttctgagaacaatgatttcatcttgtatgcattgtctatcagttttgtctggtattcaatggctaccggaaccacgtgattcattaccaggtcacccaatacgcgggcttcaatctggattttcttagtgtacatatcccatttcacctcgttacgggcttccagctctttgcgggtcatgacaccggttgattcgaacatgcggatgctctccggtttcaggtagttatcgaaaattaccgggcagctggtttcgcagtccaaaccgcgtcgtgcagcttctaccttccactcatcgctgtagccgtttccgtcgaagcggataggcttgcattccttgatgcatttgcgaaccacctggatgatagcagaaatcttaggttctccttgttctatcagttcgtctacttctttcttgaactcaatgagctgttcggctaccgctgtattcagggcaatcatggcgctggcacagttagcttctgaacccggagcacggaattcaaagcggtttcctgtaaacgcgaaaggagaagtacggttacggtctgtattgtcaatcagcagttccggaatctgaggaatatccagtttcattccctgtttgcctcccaaagacactaagtcgtcgttggtactttcttccaagtggtcgagcaccttgctgagctgtgttcccaggaaagaagaaatgatggcaggaggagcttcatggccacccaaacggtgtgtgttggtggcgctcatgatagaagctttcagcagtccgttgtgacggtaaacagccatcagggtatttactacaaaggtgatgaaacgcaggttttcttcagaagtttttcccggagccatcaataaagtaccggtgctggttccaagtgaccagttgttgtgcttacctgaaccgttgacacctttgaacggtttttcgtggagcagtacacggaaaccatggttacgtgccacttttctcatcagtgacataaccagcatgttgtggtctactgccaggttacattcttcgtaaatcggagcaagctcgaactggtttggagctacctcgttgtggcgtgtcttgaccggaatacctaattccagtgactggatttccagatctttcataaaggcagctacgcggcttggaatggctccgaaatagtggtcttccagctgttggttcttggaagcttcgtgtcccatcagggtacggccagtcagcagcaagtccggacgggcagcatacaagccttcgtcaaccaggaagtattcttgttcccatcccaggtaagagatgattttctttacagaagggtcaaagtaatgcatcacatccagagcagccttgtttacggcacgcagtgctttcagcaacggagctttgtagtcgagtgattctccggtataagcaatgaatacggtcgggatgcacaaggtgtcgtctaccacgaagacaggtgaagaagggtcccatgcactgtatccgcgggcttcgaatgtattacggatacctccattggggaatgaagaaccgtctgattcctgctgaacaagcaattttcctgaaaactcttccagcatgccaccctttccatcgtgttccacaaacgcatcatgcttttcggctgtaccttctgtcagcggctggaaccagtgtgtatagtgggtcacccctaattcgatcgcccattttttcattccgtcggctacggcattggcgatgctgcggtcgagggtggcaccgttgtcaatcacatcaatgagtttggcatatacgttgctcggcagatacttgaacattttttcgcggttgaatacatatttcgcaaagtattcactggggcgtgttgctggcgaggccacttctaccggttttttgtgaaatgccttttctactactctgaatcttaattttgacataataccttatttcttattttaagttatttgatttctatatttacaagtcgttttgtttacaggcactgacaaattcgctggataccttcttcgcattggtggcgttcgccgaaagatgtcagtcgtacatatccttctccgcttgggccgaaaccaactccgggcgtgcttactacctgtgcttcgtacagaagtttgtcgaagaacttccaggaagtctggttgtccggtgcctttatccatagatacggagcgttttctcctccaaaaaattgtatgcctgtcttcgagagcatctttttcatgattcgggcattgtccatgtaatattgtaccatggctttcacctgttcttttccttcgggggtatatatcgcttctgctcctcgttgggtgatgtaagatacaccattgaacttggtggattgtcgtctgagccatagtttgttcagcggaatccgtttgccttccaaagtggctgcggtcacttccttgggaattaccatgtatccgcatcgcacaccggtgaaacctgcggttttcgagaaactgcggaattcaatggccacttttttggctccttttatttcataaatggaatgaggaatgtccggatcttgtatgtatcgttcgtaggcagcatcgaaaataatcagtgcatcgttctctatggcatagttgacccactttttgagttcgcttttacttaatacagccccggtaggattgttggggtagcataagtaaataatgtcgatgcgttgcttgggaatttccggaataaagttgttctctatacggcagggcatgtacaccacattactccatttgccgtctttttccaatgtgccggctcttccgcatgaaacgtttgaatcaatgtaagccggatagatagggtctgtcactccgatgctgttgtcgtggcgcagtatatcgccgatattgcccgtatccgatttggaaccgtcgctgatgaaaatctcattggcatcgaaataaatgccgtgggcggcgtaatcatgcttcaaaatggcttcgatcaggaagtcgtatccttgctcaggtccgtatcctctgaatgtgttgggattccctaattcaccggctgctttttgcatagcctctacacatgctttggggatagggagggtcacgtcgccgattcccaaatgaataatgcgggcctggggatgtgtcactttaaaagaattaactcttttcactatatcggtaaacaagtagttttccggtaatttgagcaggtgttcgttgactaatgccatttattcttctatttggcggcaaaagtacgaaaatcatgtcatttttaaaagattgtccccgctttatttttcttattttttgaaattgatataagtcaattgtatggaatttttcttacttttgcagctgaattttttttagaaaatcgatacgaaaatgaatccagctttgcctgctacaagaaagcagaaatttttgagagagaccaaggattatttaatgattgctttgggtatgattatgtatggcatcggatggaccgtatttctgttgccgagtgatattccttcaggagcggtgccgggtattgcatctatcatttattggggaaccggctttccagtgcagtatacctatctgattataaattttctactgcttcttcttgcgttgaagatcttaggattgaagttctgcctgaagaccatatttgccgtctttacgttgacgtttatattaagtgtcattcagaattttgtcaccggagagttgattcatgaccagcctttcatgtcgtgtgtgctgggagcttctttctgtggagccggtatcggagtcgcattctctgccaacggaagtacaggaggtaccgatattattgcggccattatcaacaagtatcgtgacattacgctgggaagggtcatcctgatttgtgacgtgattatcatttcttcaagttacctagtgttgcataactgggagaaagtcgtctatggatatgtggtgctctttatttccagttttgtattggaccaggtggtaaacagtgcccgtcagtctgttcagttctttattatctccagtaaatacgaagaaataggtgcgcgtattaataaagacttgcatcgtggagttacttttattgacggtgtaggctgttatacgcataacggagtgaaaatgatgtttgtcttggctaagaaaagagaatccaacaccatcttccgtttgattaaagacattgatcctaaggcattcgtctctcagagtgcggttattggtgtatttggtgaaggtttcgatcgtattaaagtcaaataatttgtaaatgaataatatgatgacaaatatagaagtagccaagattatggtttccggaatgaaatgtatgttaagccgggaacagattcatgaattggctgacatattggtttgcaggaaattcaagaaaggcgaacgtatcctcgacgaaggagaggtttgccgttccatgctttacctggaaaaaggactgactcgtcagttttattttaaatacgataaggacctgactgaacatatagcgtatgaaggtggggtcgtgatttgtctggaaagctatttgaaagaagaacctacccgtctgatgattgaaaccttggagcctaccattgcgtgggatattcctaaagataaaatagaagagttggctttaaaggatgcagagataggagtgtggtatcgcaaactgtttgaagcttccttgattgaatctcaggtaaaggctgatacgttgcgttttgagccggcgcatgaacgttataataaattgcttcagttgcatcccgaaatcctgaagcgtgctcctttggtctatatcgcttctttgctgcaaatgacaccggaaaccctgagccgtgtgcgttctgcaagtctgaacggataagtaaaatcttttgttcatataaaaaggaatggttttgtttagaacaaaaccattcctgcttcaatcaccattttcttatcgaaagcctggttgtctttatatgtccgggtccatccgtatccaccggcaaggaacaggccgaatttctttgtcaagctatattccagacttattcgtggttcgatagcatataaacgggctggataaccgtggtgcttgttttccaaagattctatgtgataatatccaaggtcggcactgaggtctaacttgtcagtcaggctgcgatatatgcctgcacgatagaatcccgtgacggaaagtttattgtctacgcccagatagtatgcacctgtaccgatttgcgtataagtatatttattcttgaaccggatagacaggctggctttattggcgttacctccagatacaagcatttgcacacgggtttgtggtttcaggttgatgcagccaatctgatgggccgtactgtccgtgctgacattgacaataccgatctgataacctttggagctgtttttagtattgacatttcctactcctaactgtacccctctgttagtaacgctgtaattgagcaaggcagtttgtacccctttattttctacactcacatttccaagtccggctaattgccatccttggttagactttccacttacgtttaatagcgaggtcagttgtacacctctggaggaatttccggaaacgttcatcaatcctccgataatgagtccggcctgaatatccttgtttacgttggccaagccagagatagcaagtcctctggtatcttcgctgacattgaccaaaccggcaatgccaacacctttaatgtctcctccggaaatatttcccaaaccagcaatggataagccgtatgcagaagtacctgtgacgtttgtcaatccggaaaggataaacccgcaggctcttttacccgtcacattggcaataccggagatttgtacccccgtagatttcagtccggacacattggtaaatccggaaatctgcataccatacgaattataatgctgaaggctggaaatcgcgttgataccaagtccgttcaaacaagaataattgctaaataagccaaggtttacgtatgtccttggcgggaatttctttttattggtgatgttcagtgaaacgttcggaccttttttcagggctgaggccggtttcgtttcctgtgcagataagtgcgttcctgccaggatacctcctaacaggaacgcgaatataaatgttcgtttcatgatgctacttgacttcttggtataagaaacgcttgatgcttttcttaggtgtcttttcaaattcttccgggtaaatcttgatgcgcgtaatctgagaataagcaggaagttccgcattcactgctacacggttttcttccatgattctttcaatatcggcatctgtcaatccctgtttgtaggcttcctcaaagtccggatagataagcgcagccagtttatggtcgctttgctgaatcacaatgttttcgcatacatacggcaggttgcttatcttttcttcgatttcttccgggtagatattttgtcctgaaggtcctaacagcatattcttgcttcggcctttgatggtcacgtttccttcttcatccattacccccaagtcgcctgtgtgcaaccagccttccgcatcgatcgcttgtgccgttgcttccggatttttgtaatatcctaacatcacgttttctcctcgggtaagaatctctcctacaatattctgagggtccggactgtctatctttatttccatgcgtggtgcggctttaccgcaagaccccggtttgtagcgcaaccagtcctcgtagcagataatcggtccgcattcggtcattccatatcctaccgtatatgggaaatccagacttctgagtagtctttctacgtcctgattgaaagctgctcctccaataatgacttcatagaaatttccaccgaaagcctgcaccatgtgttcacgtacggcttccttaatcttatcgttgatcagaggaaccttcagcagaagtttcattttcagcgtttccagcttaggcaacacgttctttttgataatcttctcaatgataagtggaaccgaaattacaatgtgaggcttcacttccgagaacgcctggaaaataatcttggggcttggcatacgggtgaggaagtacacatggcaacctgcacagaattcatagataaattcaaatgccagtccgtacatgtgtgccataggcaagatggagattaccttattgccaggttgcagggtcaacacctcaaatgcgaactgtgtattcgaccataagctgcgataaggaagcattacccccttagagaagctggtcgttccagaggtatagttgataagtgccagttcttccggagtatctcttcggtagctgacatgctccttccggaaattgcgtggaaatttctttccaaacatttcgttcaagtgttcacgggcatattccaactgcttgctgcggcatactaacaaggtaaagtcggtcatcagaatgataccttccaggttcggcatttcagcctcgttcaacgcttcccataccacatctcccacgaagagaagacgggcatcggaatgattgacgatattatgtacattgtctgccttgaattcatgaagaataggaactgctaccgcaccgtatgtcaggatagccagaaaggctactccccagtgtgaactgttgcgtccgcacaaggctaccttatcgcccggcttgatgccactttcctccagcaaaatatgcagtttttctattttacgtgctacatccttgtattgcagagtggcacctttgtagtctgtcagggcatccaggtcccagttctttttgatactgtcctcaatgaaggccagaaaacttttttccatataattgtatttatagtttgcacaaagttatgctatttgtgcaaagatacctttttgtttcaagtttccaaacaaaataaattaaaactatttacgtttgaaagctatcagtcctgtttcggctgtttattttacttttagtttaaaaatctttccaccgtatgcaggcagttccgtgcaagtgggactttcgggcgtgaagcagattttttctgtctttccggtaagcaggtccttggcattgcattgggcagatggagtcattttgaagtattcaaatgcatgagccggcacgttaactgctacctgagttgccgtgtcgctgaagtttaccataatgaagagtacttcctgaccgtatttacgcaagaaagcgtactgcttgtgctcattcatctgccatccgttcaggttcacatacatcaggtcgaagaattcacctttgctgatggcctgttctttctggcagatatgcaggatggtttcgtaagttttacgcagttccttttccttttcactgagcagatgcgtattccagcgtccgcggttactccagcggtaaatgctgtctacgttccaatagtcgaagatagtggttcgtccgtcctgtccgctgaaaccctcgcagtccattcctttttcgcccaattcctgtccgaaatagaccatgaccggattgcttcgcaggcaggaagatacgatgaaggcaggaacagccttgaatggattgccagcaaagaagtcggatgcaatgcgctgttcatcgtggttttccaggaaattcagcatgtggtcctgaatgtcgtctacactttgccagcagtgggtgattccggtggctgaaccatatccgcaagtaatgtttctcagcgtgtcatacagtcctaccttatcatataggtaatcgaaatgtccgttgtaaatatagttacggtattcattcggattgtacacttcggcaataaagataatctgcgggaaggcagccttgatacgaggaataacccatccccagaattcgcaaggtaccatttcggccatgtcgcaacggaaaccgtcgataccttttccggcccagtagctcagtatgtcttccattttcttccaggtgtccggtatcgggtcaaaatgtcctccggtgtgatgcaggtagtccactccataattcagcttgatggtttcataccagtcgttccggttgggccatgcgtcaaagcggtcgtttccggtagccttggccggcatttcctcgtaattcccttgttccggatcataaaggtcgatttcgcctgccagcttctgtcccggtatatagtagaaattgttttgtggattgaaatcctgagagcagtcatcgttctcacccaaatcctttacaccagccggtttggccagagagtgatactgccgtgccacatggttcggaacgaaatccatgatgaccttcagtccgcattcatggctgcgtgtaaccaaatgctcgaattcctccatacgcttgtctacatgctcgaccaagtccgggtcgatgtcataataatcgcggatggcatacggagagcctgctttccctttcacaatggaagggtggttcttgggaatgccgtatgcagtgtaatccgtttgcgaagcgtgcgctatcagtccggtgtaccagatgtgtgtagcgcctaatttttttatttcgtgtaaggcctgtttggtaaaatcattcatctttccacatccgttttcttcaaggctgccattcggacggcaggtcttgttctggttaccaaacaagcgggtaaaaacttggtatatgataatcttttctgttgtttccataatgtttgaataattttaaaaacgaaaaaagcacgaattatactttcgcacggataagaaagagaatccgtctgctttgtataattcgtgcccttgtcagactcatggcctgattatgctattccatgcgcattggcgtttttgttgattttcttgatcaatccttgcaatactgcacccggaccacattctgtgaagtcatcagctccgtcggcaatcatctgctgtacagtctgtgtccagcgtacagaagcagtaagctgtgccaccaggttcttcttgatttcagccggatcagtgtgtggaagtgcatccacgttctgataaatcgggcatttaggtgtatggaattctgtagcgttgatagcagcttccagttctactttagcagggttcatcagcggagagtggaacgcaccacctactttcagcgggagggcacgtttggcacctgcagctttcatcagttcgcaagccttgttgataccttcgatgctaccagaaatcacaatctgtcccgggcagttgtagttggctgccacacaaacttctccttcagcggcaactgaagcacagatttcttctactttctcatcaggcaatgcgatgatggcagccatggttgacggctgagcttcgcatgctttctgcatagccatggcacgtgcatacaccagtttcaatccgtcttcgaatgacagagcaccggcagctaccaaggcagaaaattcacccaaagaatgtccggcagtcatttctggctggaaagcgtcgcccatgcacaatgcagagattacagagtgcaggaatacggcaggctgtgtcaccttagtctgacgcaagtcttcgtcagtaccttcgaacatgatgtctgtaatgcggtaacctaaaatatcattggctttctcgaataattctttagcgagcggagagttttcgtacaggtcttttcccatacctacgaattgtgctccttgtccaggaaatacaaatgctttcataatgattatctttcttgtttataagttattgtctgcaaaggtaatgattcttttgagatattactcatttttgtcgaaaatgtgcatggcgacgggggagtggaagtggttcaacgggccgtgtccgcctccgatgcaaacgtcttttccagattcaatacctttgtatacatattgtttggctttctttacagctacagacatgggttctcccaatgccagaaacgtggcgatggcagaagacaaggtacatcctgtgccgtgtgtattccggctgtttactttcggggctgtaaacaagtgcggggcttcttccgtagccgtttgcagcacatcgcacatcagtcctccgtccaggtgtcctcccttgatgagcactcctttacatcctaacttcagcatttctttagcctgacgtttcatgtcttctacggtgcggattttttgtccggccaggatttccgcttcactcagattgggagtgatgaggctggccagaggtataagccgggtagtgatggcttcgatagcttcgtcttccatcagcttgcatccgctggtcgacaccataaccgggtcgaacaccacgtattcaggatgatatttgaggatagattcagctattacctttacgatttccgcgtcgttaatcatcccgattttcacagctttcgggcgaatgtcgtccataacggcctctatttgccctttcacgtaagcgggaggaacggggtgaatgcccgttactccgagcgtattctgcacggtaatggcagtaatggcactggctgcgtatgcacctaacgcagatatggctttaatatcagcttgtatgcctgcgccaccgctgcagtcggaaccggcgatggtcaggacgcatggatatgttctcattttcagttgataattttttgcaaagataggaaatattcaaattaatgagttaactttgcgatattatcaagaaaagtttgttatgaatccaatgaataaccatgtggtcattatggccggaggcataggcagtcgcttttggccgatgagtagcccggagatgcccaagcagtttattgatgtgctgggttgcggacgtacgctcatccaattgaccgtcgatcgttttaaagatgtatgtctgccggaaaatttctgggtggtaacctcggccaaatatgcggaaatagtaaaagagcagcttcccgaagtgcctgttgaccatattttgttggaaccttgtcgtcgtaatactgcaccttgcattgcgtatgtaagctggaaaatcaaggtacgtaatccgaaagccaatatcgtggtgacaccgagtgaccatgtggtaatgaacgtacgtgagtttgcccgtgtagtcacatcggccatgaagtttacggccgattcggatgccattgtgacattgggaatgaaagccaatcgtgcggagactggttacggctacattgaagcggacttgtcaatggcctgtccttccaataaggaaatctatcgtgtagatgcgttccgtgaaaaaccagacctggctacggcagaacgctatttgcagcgtaacaattatttctggaatgcgggaatctttgtctggaatgtgaataccattgtcaatgccatccgggtatatcagccggccatggcaagagtgttcgaacgtctgcttccttattattatacagacaaggaacaggagatggtggatgagctcttcccgacatgtgaaaatatctcggtggactatgccgtgatggaaaaggcagatgagatttatgtatttccggcttctttcggatggagcgacctgggtacctggggttctcttcatgaaaattccaagcgtgatgcgcataacaatgtctgcatcggttcgaatataaaaatgtatgaatcgcgaaattgcatcgtacataccactcaggaaaagaaagtagtggtacaggggcttgacgggtatatcgtggctgaaaaagacaatactttgctggtatgccgcttgacggaagaacagcgaatcaaggatttttctgcggaataagaaaatagacaaaagataaaaagaaaagggacagacgtgaaaaatacggactgtcccttttcttatttatatacctttaaattttatttgagtgcagcaagtgcggcatcataatccggttcctttacgatttccggaaccagctgggtgtagataacctttccttccggattgaggataaccacggcgcgagccagtaatccacacagcgggccgtcggtcatcagcactccgtagtctttcccgaaagtagaggtatagcggaagtcagacagaggaataacgtgttcgattccttctgccgtgcagaaacgtccttgtgcaaacggaaggtctttcgaaatagccagtaccaacgtattttccattccggctgccagtttgttgaacttacgtacagaagcagcgcatactccggtatccatgctgggaaagatgttcaacactacaaattttcctttggcatcagccagagaaaaagtgcttaaatcgccttttaccagtgaaaagtcgggagcctgtacccctttttgtataaactctccggccagtgctacgggagttccttgaaataaagttgttgccataatgattctatttttgaatattcgtcataaatataacaacaaaaaccataaaatgtttttggagatagtgactccgagcatttttttcacttactttgcattcgctaatcatttatgggaaaattgatggaacgaaaactgaaagactatgcagttctgatgctgaaaggaatgggaatgggagccgcggatgtagttcccggagtctcaggaggaaccattgcctttatcgtaggcatttatgacgaactgattaactcgattaaaagtattaatctggaaagcctgaaacttttcttctctggaaaatgggcgactttctggacgaaaatcaatggtaatttcttgttttttctgctggcaggtatcggtatcagcgtattttcattggccaagctgattacatggctgttggtaaaccagccgatattggtgtggtcgttcttcttcggactggtgctggcgtctacctggtttgtatcgaaagacattaaggagtggaagagctggaaaacgtgggtggcttttgtcattggggcagtggttgccttttatattaccgtggcaactccggctgaaacaccttctaatttgcttttcattttcctgtgcggagtcattgccatttgtgccatgattcttccgggcatttccggtagtttcattctggtgctgttgggcaagtattttttcattatggatgcagtgaaaacgcttgatgtagtggtgattgctgtatttggagcaggtgcctgcatcggaattacctctttctcgcgtatcttgtcgtatgcgttggcacatttccgcaacatcacgctggcggtattgacaggctttatgttgggctccctgaataaggtttggccttggaaagaggtggtagagacatttgtcgacagccacggagaagtaaagcctttgatagaaaccaatatattgcctaatgcacatgtgccagaagcagtagtgctgatggtagtaggctttttcttagtgtattttctggagaaactttcggctaagacaccggttcgttaaggagtttctttataggtatacgatgccgctggagagattttgagcgtcttttcagcggtattttttatgcttttcataagaacaagagaaggggtgaaaaaacgtaagtgcgtttgatatgaaacgcaagtacgtttgagttcaaacgcaagtacattttacttcaaacgcacttgcgttttactttaaacgtcgaagcgttttaaaagaaatgcccttgcgttctgaatcaaacacaagggcattgttttataagttttttaactccttaaaatcagtgtaataaaggagtgcttttatctcctcacttttatttgttgattttgctccatgtatctttcaatgatacggtgcggttgaataccaggtggtcaggagtagaatctttgtccacattgaagtaaccgatacgctggaactgcaggtagtcgagcggtttggcatcggccaggaatttttctacgtagcattcgttcagcactttcaatgagtccggattgatcatttcctgcatggcttctagcggagagcatcctttggcttcacgtatagctgccatttcatcgcgcgggttttctaccttccacaagcggtcgtacaaacgtacttctgctttcaggcagtggttgcagcttacccagtggagcgtacctttcaccttgcggttagcttccggcataccgctcttggtgttcgggtcgtactctgcatacacttccaccacatttccgttttcgtctttcttgcaacctgtacattttacgatgtaggcatttttcaggcgaacttcctgtcccggagtcatacggaaatattttttcggtgcatcttccatgaagtcatcgcgttccatccacaattcacggctgaactcaatggtatgtgtaccggcgctcaaatcttccggattgttgatggcttccatttcttccacttgtccttccggatagttggtcagaatcagtttcaccggattcagaacggcagatacacgggtagaacgtgcgttcaggtcttcacgaacggcactttccagcaaagcaaagtcgttcagtgcatcgtatgtagtatatccgattttgtcaatgaatttgcggatagactcaggagagtatccacgacggcggaaaccgcagatagtcggcatacgtgggtcgtcccatccgtctaccagtccttcttttaccagtgtcagcaggttacgcttgctcatcagtgtgtagctcaggttcagtttgttgaattcatactgatgcgggcggttgtcgtccaggtcttttccgtctttcacccagtctacaaacaaatcgtaaagcggacggtgtaccacgaattccagtgtacacaatgaatgtgttactccttcaaagaagtcgctctgtccgtgtgcgaagtcatacatcgggtaagccttccatttgtcaccggtacggtggtgaggagtttttaccacacggtagataaccgggtcgcggaagtgcatgttcgggttggccatgtcaatcttggcacgcagtaccatcttgccttcttcaatttctccggcattcattttctggaacagttccaggctttcctcaatcgggcggttacgataaggactttccgttcccggctgggtaggagtacctttctgggctgcaatttcttccgaggtctgttcgtctacatacgcctttccttctttgataagacggatagcgaagtcccatagttgctggaaatagtcggaagcataatattcatttccccactggaagcccagccactggatgtcttccttaatggcttctacatattctacatcttctttcgtcgggtttgtatcatcgaaacgcaggttacaggttcctccgtatcgctgtgcgattccgaagtccagacaaatggcttttgcatgtccgatgtgcaagtatccgttaggctctggcgggaaacgggtttgaattcttccaccgtttttaccttcctgcaagtctttctctacaatttgctcaatgaaattcaggcttttcttttctgaattttcggttgtatttatttctgtcatacggaaactttttgttttttcttttaactctgcaaaaatagtaaaaataatctccttatagataattggaaagaatatttcttcggagctacatccttttacttaaatttgcttatctttgtagagcgcgaagatgcatcttgttaataatgccaaaggaaagacaatgaaaaaaaacgcagaatgtgttttatgacatgtttttttatttggttacctgaaaaaaaggccgcatctttgtgccgttatcctgaaaacaatctttttaccttaagaaaaaaaactaatacctattgaaaacttaaaaaggccctttgtgaaaagcgccttttttttgcccttacatttgcatttcagttgtgtttcatcgtgtgatttttgtgtgtcgccgcaggttttctttgcgtgtattcagaaactttccgtatctttgggggatattaattaaggtagaactatggcacaaccattggctgaaagaatgcgtccgaagacgctggatgaatatattggccagaaacatctggtgggagaaggggccgtgttgcgcaggatgattgaagcggggcggatttcttcgtttattttgtggggaccgccgggagtcggaaagaccaccctggcgcagattgtagcgaaccggctggaagttcctttttatacactgagtgcggttacttcgggagtgaaggaagtgcgtgaggtgatagaaaaggcgaaggccaaccgtttcttttctcagcaaagtccgatattgtttattgatgaaattcaccgtttcagtaagtcacagcaggactcattgttaggagcggtcgaaacgggggtggtgacgctgataggtgccactaccgagaatccgtcgttcgaggtaatccggccgttgctttcccgctgccagttgtatgtactcaagtcattggaaaaggaggatttgcttgaactgcttcatttggccttgactaaagacccgatactgaaagaacggcaggtggagttgaaggaaacggatgccatgttgcgctactccggaggagatgcgcgtaagttgttgaatattctggaacttgtgatagaggcagatactgccaatccggtgattattaccgatgaaaaagtggtgtcaagcttgcagcagaatcctttggcctatgacaaggaaggcgagatgcattatgatattgtttctgcttttatcaaatccattcgtggcagtgatcccgatggagccttgtactggctggcccgtatggtagaaggaggagaagatccggcatttatagcccgtcgtctggtaatttctgcttcagaagatattggtctggccaatccgaatgcactgttgctggccaatgcggcctttgaggcagtgatgaaaatagggtggccggaagggcgtattccattggctgaggctacggtgtatctggccaccagtccgaaaagcaattcggcttatgaaggaatcaattcggcattggagctggtacggcagacgggaaaccttccggttccgctgcatttgcgcaatgcacctaccaagcttatgaagcaattgggatatggaaaggactataagtatgcgcatgcgtataagggaaattttgtcaagcaggatttccttccggaagagattcgtacacagcgtatctggcatgcacaggataatccttccgagcagaagctgaaagagcggatggtgagcctgtggggtgatcgttttaaagaataatatgaatatatagttttaagaagaaagatatgaagattgtaatattagacggatatacattgaatccgggagatttgtcatgggaacctttgaaggaattgggggaagtgaccgtgtatgaacgtacggctccgaaagatgtttgcaaaagagcagaaggagcagaagtggtgtttacgaacaaagtagtgctggatgaggctgtgcttgaaaagcttccttcactgaaatatataggtgtgctggctacaggatataatgtagtggatgtggctgcagccgcccgaaaaggaattgtggtgacaaacattccggcttacagcaccagctcggtggctcagatggcatttgcacacattctgaatattgtgcagcgtgtgggatattatgcccaggaagtaagtaacggaaagtggagtcgtcaggctgatttttctttctgggatgcgccgttgcatgaacttgatggcaaaaagataggtattatcggttttggaaatacgggacgggctacggcacgtatcgcagtcggttttggtctggatgtgtatgcttataccagcaagtcggccatggaacttccggctgatgtacataagtgtccttcaatggatgaattgttccgtaagtgtgatatcgtgagtttgcattgtccgttgacggaaacaactcgtgaactggtggatgcccgtaaactggacttgatgaagccgtccgctattttgattaataccggtaggggaggcttggtaaacgagcaggatttggcggatgcactgaacagtggcaaaattgctgctgcgggtttggatgtgctttcttctgaaccacctcgtgcagataatccgttactgaaagcacgtaactgttttatcacgccacatcaggcgtgggctacgaaagaagcgcgtgttcgactgatgcagttggccgtaaataacctgaaggcttttctggaaggtaaaccggtaaatgtagtcaacaactaaaaggaaaggaaatcatgacgaaagaagaacgtatacagaaagctgttgcgctgttcaaggaaggatataattgctcacagtcagtcgttggagcttatgcggatatgtatggttttaccttcgagcaggcattgcacatggctgcttcgtttggaggaggtatcgggcgcatgcgggagatatgcggtgcggcttgcggtatgtttctgctggcgggtttggaacgctgtgcagtggatggggcagacagggaaggaaaggctgccaattataaattggtgcaggaactggctgaaaagtttaaggaagaatgcggaaccatccgttgcagcgaactgttgggcttgtcaaagaaagaacctattgtagctacacccgatgcccggaccgcacagtattatgccaaacgtccgtgcgcacgaatggtggaaacggcagcaagaatttggggcgatttcttggaaaatgaagggaaattgtaataagaagctgttttttaggttgtaaaatgaaagttttctctttttccttcacgccttttcttgttttttgttaattttgccgcagtttaatgcacgtcaagtttagatgtataattataaaagcaaaaagactatgttaaaagaaaaagcaggtgtcattgccggacaaatctgggaggcactgaatgaaacagaaggcaaaactcagaaacagcttaagaaagaagctaaattgaaagcagacaaggacttgttcctgggtttaggttggttgttgagagaagacaaaattgagacaagtgaagtggatggagagttattcgtgaaactgaaataattcttaaagaaaaatagaaaagtgcgctggttggaagtttttttccggtcagcgcactttctttttgtggtgttcaggagtgatagcatcctttggctgtatcttcacattgcgagcctggggtttcaaattcgatggtagaatgggtaattccgtgttgggataacagttgtttaagtgcatgtttggtacattcaatctcattcagactggtaattaccacgtgaagggtagcggcattttcagtcgtactgacagcccatacatgcaggtgatgccagctttccactccctgtgtctgactgatttcctgctccagtttgtcgaggtgaatgtgctcaggcacggcatccagtgtaaggtagagactctctttcaagagtttccaggtagaaatcaggataatgagggctatgcccattccgatgaacgcatcgagtgcgtaataatgggtcaggctgataaggatgcccgagataactaccccgacggataccagtgtatccatggccatgtgcagaaaagctcctttgatgtttaagtcgttttttcgtcggctcatcagtagcagggcggtagctccgttcactaatatgcccgctccggcagtccatgagatggcttcaccggaaacggtgccggggctatataatttatagatactttcaatcagaatccctcctacggcaatgaggagtatgacggcattggtcagcgagacaagtatggtactttttttatagccataggtgaaatggcgatttccttttcgtgccgccatccggatggcaaagagtgaaagcagtaagctgaatatatcactcaggttatgtccggcgtcagagagcaggcctaaggaatggtaggaaaaaccaatggccgcttcggctattacgaacaacaggttcaggatgatacatacgatgagtgtggtactgaccgattcgatggcatgatggctgtgcgtgtgtgaatgagagtgtgaatgtgacatagttgtagctgttttattatgaggcgaatttacctccttttttgctttcttgtatcagttatgtaataataacaaccgggttgcataaatagatggggataatagcggtgtagagtggggattccatgaaaatatgtatctttgtgcagattaataaagtataggacatgaaaaaaatgttgtgcccgcaatgcaaaattgcagcgatgtatgtgaaaaatgaagcaggagagcgtcggttggtatatgtgacttctgaaggagaagtcgtaccgaaaaaagaagatgaatcgcttgaaggatttgatttgaacgaggtcttttgtctggggtgttcctggcatggaaatcccaaacgattagtaaagtattaatttcattgttgtttaagtagtcaatttagccggaatctgatgatttggctatttatcatgatttttaggctactttattttgataagaaaaagaatcgaaataagaaaatatacttatctttgtctatattttatgctttttaaagaataaggataattatggagaaagttattattaactcgtacgaagagttcgaaaaattggtcggccagcagattggagtatcagaatggcttgaaattccgcaggaacgcatcaaccagtttgcagatgctacattggatcaccagtggattcatgtggatgcagagcgtgccaaagcggaaagtccttacaagagtacaattgtacacgggtatcttaccttgtctttgttaccttatctgtggaatcagattatcgaggtgaacaacttgaagatgatggtgaattatggaatggacaagatgaagttcggccaggcagtattgtcaggtcagagtgtacgtctggtggctgatttgcactcattggtaaatctgcgtggagtggcaaaggcagaaatcaaattctccattgaaattaaagaccagaagaagaaagcgttggaaggtattgctactttcttgtattatttcaactaatacgcagcaaagaatctgttcggaagtggacgcagcaggaaatagtttgctgcgtacatgcttccgggattattcagaattttaaagaggtatagaatccgcaataaccgtcaccggctacggggctgatggccaaatcatgtttcttggcaaacggacgggtaaaaagataggagcttcctactccgatggccgcgccggccgctacatcccaccagtcatgtttttttccgtatacacggctccagcctacataagtagagactacataggcaggaagtccccatttccatccgtaacgtcgctggatgaaagaggcagctgtaaaagatacagaggtatgcatggacggaaatgaatgattgtcgctgtggtcgggacgttcttttttaactgcatatttcaatgcgtatgtaactcctaacgtggtaattccagccaatgcgccctgtttcagtccttgccagtctttttcaataagtatggctgtcagtccggctacgggaagcagtacggcacccacatcgccggaagtacgtacggcttttcggggctggctgatttcaagctgttgtgcctgtaaagacacgctgaggcagagtgctgccaaaaaaatcatgacaggtttcatgacagggtaagaattttaggaatgaatattattaatccgacaatggctgcgctgatagccagaatcaatacggcaccagctgccaaatcctttgtacgcttgatagcttcgttgtattctggtgaaactaaatcggccagtgcttcaatggaagaattgactgcttctgcagccaatacggaaccaatggcaaacacgatggctatccattcagtggaagaaagtccaattagccatcctgccagggttacacatactgcggcaaaacaatgaatccaggcattgtgctcgcgtgtaatcagcagacggataccgtttccagcgaacttaaagctccgtaaacgcttccgtaaggtaaatccttcatttttcatgcggcaaatcaaatttcaacggtcacttccacggggcaatggtccgagccgaatatttccgtgtgaatcttcgcttctttcagcttatcggcaaggctggctgaggccaaaaagtagtcaatacgccaccctgcattcttctcgcgtgccttgaaacggtaagaccaccaggaataaatgttggtttgctcgggatagaagtaacggaaggtatcgatgaatccggcatctaacagcaattgaaatttttcacgttcctggtcggtaaagcccgcattcatccggttggttttcggattcttcaggtcgatttccttgtgagctacattcaggtcaccgcatatcagtacgggtttgctttggtctaacttctgcaagtaagcgcggaaatcatcatcccaggtcatgcgatagtccagacgtttcagtccatcctgtgaattcggtgtgtagactgttaccagaaagaatttttccatctccagtgtaatgacacgtccttcatggtcgtgctcatcaattcccagaccgtaagttacttgcaggggctggtgcttggtaaagatggcagtaccggaatatcctttcttctcggcataattccagtaggaagtatagccttcaaaagagaggtcaagctgtccttcctgcatcttcgtctcttgcaggcagaaaaaatcagcatcaagttgggtaaatatgtctcggaaacctttgtcgcagcaggcacgcagcccgtttacgttccaggatataagtttaatcatacaaattattttttcaaatcaaataaataagtcagacgtccgccaatgtaagaatgggcagaacgtgagaaataatcttttttactgttgttgtagaaatcgctcagaccgaaataataacgggcttccagaaggaaatgaccgatacctgtacgtatttccaaacctcctcctcctacgattccgtagtcaaattttcggtcggcaaattttccgtattgttcatcagtcccttgcggacggttggtggtatcccaggtcgacgggtcgctgtaaaattctttttcgcctaaaaggaagcctacttgcggacccaggttgatgataaatcgggctccatttcctttgtctttcccgaaagccagatgggccagcagagggacttctatgtagttcatggcacggtggtaggtattgttacttccgtcttcaatgacttccttccatcctcgctgggaaaagttgatttctccctgtataccacaaatcattttgaagtatttctcagagatataacggactgtaagaccaaattccggtgcaatgaagttcgtctgcttgatgctgggggtgaaactgacagagtttaagtttactcctccattgattcccacggatagattatgccgttcgtcttgcaattgggcaaacaacgacaagggcagcatgcaaagcagacagcatataaaaatcagttgtcggtatcttttcattttattcaaaatcaagtttgatcaattcataattcttggtcagatgaacaaaaaatactttccggttgataaagccaccccagttgttaactctctcaaatttgaatcccgtctgaataggggtaaccgaaactttatccagattttcttcgaatttattgccttgttgtgacaagcccttcaggaagaaatatcccgtatcaaatcccagcataccgtatttggggaaagtgttcgccatgtctttgctataccagcggcggtagctttgggtgaaccggacagcttccgggaacaggttgttggtatagaacgatgaatagaaatacgtatccagttcatagaagctggccagatgttcctgtgtgtaagtttgccattccggataaccgaacaggtgcatgtcgaaatgcggatgtgaacgtaatacattagtcagctgaggaagtatccgggtcagtgccgaactacgtccggaagtcggaataaaaatattttccctcagtgtatccatggctgcaatgattctttccggagcgatttcgctgcttagctgaatctgcttgaagtctacacggttgtcttttaactcgcttttcaggccattgatgaattcatttttttccttgtctccattagccggatcgacaaatatgatgcgggccttactgaatttacggagaaaatggtcatacgcttctgagtaaaaataagattgcggtgtgttaatctgatagaccatcggattattgaacacctggtccactttcggagcaaaaggaacgaccagtcgtattttgttacgctctgcaaaatttgccagcggttcgatgtttgaagtatggacaggtccgaagatgatgtccatattcttcatttccggtttgttgagaatgcttgaaataacattggtgctgcctttcgtgtcgtaggtatataaatcaaccgaaacaccctgacgtttcaaactgtctacggcaatcaggaagccttcgtaatattccaccatgcgggtctgctcttcaggtttgatacttccggaagcggtaaacggaagcatcacggctgcctgaatggttcgcagagatttagaagccgttttgctttgcttgaacagttcttcattggatggtgtttgatccattgtgggagtaggtgttgctgcaggctggctgctcttagggtaaggaataaagatgaacataccttttttcagcttcccgtttttcaattccggatttagcgccagcaaatcttcttgtgtgatgccatattcctgacagatgctgaagatagtttcctttcgttccactttatgcatttctttccatcctttctgggtagtagaaggagtggaagattgagctggagcgaggggagtgaccggatccgtcacactttccgtagggattgagattacctgtcccacgcggaaattgctggcactcagaccagggttggcatcgcagatagcctgtgcgctgatattgtatttcaccgtcagctggtaaagcgtttctccagcctgtatagtatggaatcttccgttcttgctggaagaagaggagtttgcctggggaattttcaatgcttctcctacccggatttgcttgtcgcttcccggattcaaacgtacaatgtcgtcaatggacacatggtacatgtttgcaatggagtaaagactctgtcctctgcttactgtatgtagaaaataattgtttccgttctgtgcgaaggtagttattccggcgtttcctaaagtcaaagccagcgaaaggcaaactatctgaaagaatctcatggttattatggatttgttgagtggcaaaagtacaaaaaaaattgcattgtcgaatgaaaatggaaaagtaaatatctctatctttgattctcgaagataggatgcggctcggcatagccaaatctgaaaactttgttttccgtttgtctctgttctcgcctttcactatctttgcaaagatatcattgatggataatgtatgactgaaggaacagaaacgatttgtgtacaaggagctcgggtacacaacctgaaaaatatagatgtggaaatccctcgtgacagcttgacggtgattaccggattgagcggaagcggaaagtcttctctggcatttgatacgctgtttgtagaagggcagcgccgttatattgaaactttctctgcctatgcccgtaactttttgggagggatggaacggccggatgtggataagattacaggattgagtccggtgatttccatcgaacagaagacgacgaacaagaatccacgttctaccgtgggaacaaccaccgagatttatgattatctgcgactgctgtttgcccgtgcgggtacggcttattcctatctttcgggtgagaagatggtgaaatataccgaagaacagattctggatttgatacaccgtgattataaaggaaaacgcatttatatcctggcacctctggtgcgtacgcgtaaaggacattacaaggaattgttcgagcaggtacgtaagaagggctatctctatgtacgtgtagatggagaagtgaaggaaatcgtacacggcatgaagctggaccgttacaagaatcatgacatagaggtggtgattgacaagatagtggtcacggaaaaggaagaaagccgcttaaagcagagcgtagctacagccatgcagcagggtgacggattgttgatgatactggatgcacagacggaaagtgtgcgtcactacagcaaacgcctgatgtgtccggtgacgggactttcttacaaggagccggcaccgcataacttctcgttcaactctccgcagggggcctgcccgcgttgcaagggactgggatatgtcaacttgattgatgtggacaaggtgattccggagcgttcgctttcggtgtatgaaggagctgtggctccgttagggaaatacaagaacgtaatgatattctggcagttggaagcgttgcttgaacgctatgaagctacgttgaagacaccggtgagtgagttgccggaagatgccatcaatgagattctgtatggatgcgatgagcgcttgaaaatcaagagtacactaattcatgccacttccgattactttattttatacgagggcatcgtgaaatacattcagatgatgcaggaaaaggaagcttctgccaccgcacagaaatgggcggaacagtttgctaagacggatgtgtgtcccgattgtaaaggagcacgtctgaacaaggaagccttgcatttccgcatccacgacaagaatatttatgaactggccacgatggacatcagtgagttgtatgactgggtgtgccatgtggaagactttctggaagacaagcaacgtctgatagcaacggaaatcctgaaagaaatacgtacccgactgaaattcctgctggatgtgggactggactatctgtcgttgaaccgttcatcagtcacactttcgggaggagaaagccagcgtattcgtctggccacgcagattggttctcagctggtgaatgtgttgtatattctggatgaacccagtatcggactgcatcagcgtgacaatatccggttgattaactccttgaaagaactgcgcgatttgggaaataccgttatcgtagtggaacatgacaaggacatgatgctggctgcggattacgtggtggatatgggaccgaaagccggtcgcttgggtggtgaggtcgttttctccggtacaccggaagaaatgataaagaccaacaccctgacatcgcagtatctgaatggaaaaatgagtatcgaggttccggcagaacgaagaaagggcaacgggcattctctcgtgttgaaaggggcacgtggaaataacctgaaaggcgatgatgtggagtttccattgggaaaacttatctgtgtgaccggagtatccggcagcggaaagtctactttgataaatgataccctgcaaccgattctttcccagcacttctaccgttcactgcaagatcctttgccgtatgacagcattgaagggctggaatacattgacaaggtggtgaacgtagaccagtcgcccttaggaagaaccccgcgttcgaatccggctacctataccggagtcttttccgacatacgtaacttgtttgtcggtcttccggaagccaagattcgcggctataaggcaggtcgtttctctttcaacgtatcgggtggacgctgtgaggcatgtggaggaaacggttacaagaccattgaaatgaacttccttcccgatgtgctggtgccgtgtgaggtctgtcacggaaagcgttataaccgtgaaacgttggaagtgcgctataaaggtaaatccattgccgatgtgctggacatgaccatcaaccgggcagtggaattctttgaaaacgtgccgcagatactgaacaaaatcaaggtgctgcaggaggtgggattaggatacatcaagttggggcagccctctactactttgtcgggaggagagagtcagcgtgtgaaactggctactgaactggctaaaagggataccggaaagactatctatattttggatgaaccgaccaccggactgcattttgaagacattcgggtactgatgaacgtgttgaaccgtctggtagaaaaaggaaataccgtcattgtcatagagcacaacctggatgtcattaagatggcagactatattatcgatatgggaccggaaggcggaaaggccggaggacagttgctggtgtgcggtacaccggaagaagtggcccagtcgggtaaaggatatacatccggatttttaaaagaagaactgaaaggagtaacaaaataatggcaaaagacaagattgcaaaaaccaatgcggcccgtttgctggaccgggataaggtgaaatatgaactggttccttacgaggtagatgaaaatgatttaagttgcgtacacgtagccgctactttaggagagaacattgaacaggtattcaagacgttggtgcttcaaggagataagtcgggttactttgtctgtgtgattcccggtgagcacgaaatcgacctgaagctggcagccaagatttcaggcaacaagaaatgcgacctgataccgatgaaagaactgcttccgctgacgggatacattcgtggaggatgctctccgatagggatgaagaagcatttccctacatatattcatcacacatgcaatgatttcccttatatatacgtaagtgcaggagtgagaggcttgcaggtgaaactggctccggctgatttaatcaaggtgagtcaggctgaagtttgtactttattttaacttgatagaaaaagaatttataatttatgggatacggaaaatggattgggggaatcatgggtttcatgaccatgggacctcttggagccttggcaggatttgccatcggttctttgttcgataaaagcgtgacagcacaagaggaaatggacggtggctatggaagtacggcacaagaagatgtgtacacaggccagcgtaacagttttttgttttctatgctagtcatggcttcgtatatcattcgtgccgacggacgcatcatgcacagtgaaatggagtttgtgcgtcagttcttgcgcgtgaatttcggagaggcttctgtcagtgaaggagagcgtattttgctgaatctgtttgaacagcgcaagcgcatggagcagaatgacccttctgcctttcgtcgtaccattcgggagtgcggagcgcagattgctgccaatctgacgtatgaacagcgtttgcagttgctcgattttctggtgaagattgcacagagcgacggaaatgtttgtgcggcagaagtggatgccttaaaggaagtagctcagtccatgcagttgtccatgcaggaagtcgattccatgttgaacctgagaggcgattcgctggaagatgcctacaaggtgctggaaatcgaacctacagcttcggatgaggaagtccgtaaggcgtatcgtaacctggtactgaaacatcatccagaccgtgtggctacgttgggagaagacatccggaaagctgccgaagaaaagctacaacgcatcaatgatgccaaggagcgtattttcaaggcaagaggaatgaaataaatagcataaaggcctgcttcgttttttatgttgcaggcctttattgtgtttccttttattgttttgatatacagtactatatattccgtgagtactacttaaggagtactgtagtactttcttggcagtactgcagtactttcagcaaagtactcgagtacttcttagaaagtactggctaatcgaaccagttgaatccctcttcctttaaatcgaagtctagattttctgtgactcctgcctgtttcagggccttgcgaatgatttcttgttcttggaggttcagctttctgtctcctcttcttctttcaaagtaaggatttcgtccgaaacgtgcaatcagaaaattcatgaacttctggtattgttcgggatacattcgctttttcatttgtgtgaagccacgcatgtaggttacgggagctgcatcacggtaatatggacatgaatggtctttagtgcatcgggtaggattggccagatgtagaaaagcttctcgttccagtaataccggataagccagttgacgaagacaggtggaaccgcaagtacaatctgtatgtacgcatacagaaaaattggccggagcctctttgtaaggattctttttcataaacgtgtttttttatgtttgagtttgatgacaaagttatacaaaaaaacagatttttatgcttgattgataagaaagtctgatttgtaaagcaaattgtgttttgaacaggactttccaaaacttttattattcttcagacgatgaaagaagtgtcagataatatattttttaatgtaaaagaaatcgaaaccctttccattccctctaaaacggtattattggaggaaggaaagattgcggataagatatatcttgtccgtaaaggatgcttgaggttgtttttttataatgaaggaaaggatataacttttcaattcttttttgaaggtgattttgtggcctcgtttgatagcttgtatagagggacacccagcttgttttcactagaaagcattgagccgtctgaagttgtgtcaattaaaaaagaagatttctatcacaaaataggaagcaatctttcattgagactgttatatgaagagaaaattatagaacggttcagcttttaccagcacttgtttttgtcccgtatcaagaatacgccacaacagagatacgaagaactattgaaggaataccctaatattattcaacgggtaccgcaacattacatagcttcctatcttggtattacacctgtttcgctgtcccgtattaggaatcgtcgttaaattccatttctttacaattgttatcgtccgtttccaataaagtagtgacctttgtcgcgtaataaaaacggaaatgtatgaaaagaatttttgtaattgactggatattgatagttgtatttatcatgtctgctatttcaggatttggtctgcatgtggccggacatggtggcactcatgaagtctggcataactgggctgtgtttcatgtctttgtcagtatgttattcctcatagccgtaatatttcacgtggcaatgcacttggaatggtataaagggattataaaaaagggaataggcaggaagagtaaagttacagctgtcctctctgtcatatttttattgctgtcggttacaggtctcgcactatggggtataaatggggcaaattctctgttgggattatggcattataaaataggagtgataaccacagttataacccttggacatgtgataaagcgactgtctgtttttcgtaagtcgctgaattgtaggaggtaggattacggtcagttttgaggggatgtactggaaatattcgtcttcgacttcccaaaccatttgtcaatgagcagagccaatgcgccatccccagttacattacaagctgtgccgaaactgtccatggcaatgtaaagagcaatcatcagtgcctgtgcattctcatcgaatcccagcatggacgacaggataccgagcgaagccatgatggcacctcccggaacgcccggcgcagctaccattgtcactcctaacatgaagatgaatccggcgaacatctggaaatcgtagggaatatcctgcatcatcatcaaggccagggcacaggccacaatcttcatggtacttccggacagatggatggtggcacacagagggatgacaaatccggcgataccttcattcactccgttttgtatagtctgtttcagggtgacgggaatcgtagcggccgatgattgtgtacctaatgccgtaaagtaggccggcatcattcttcctaacaggcggagcgggttcttgcctacgaacattccggcgatgcagtattggaatatcagcaggaaaatatgcagaaggaagatgattccgataatcttgacaaagacagccagcacgtggaatacctgtccggagtgagtcatgttgaagaagattccgaagatgtaaatcggaagcagggggagtatgacagcctgtatggtcttgacaatgatttccttgaagtcgttgcacgcatttttcaagtaatttgtatccagatgtgccaaccccagtccgacggtaaatgccatgacgagggcagtcatcacgttgagaggttccggaatagctaccgtaaagaaaggggtaacacctttggcctcactgatttcggataaaggaatatttcgggtaataaggtcaggaaagaaggtttctcctacaccgaatgaaagaaaaccggagaacagtgtggccccgtaagccagaagtacagtggctaccagcatctttccggcgcctttcccaatatcggcaatggcgggagtaaccagtccgacgatgataagcggaatgataaaattcaggaactggctgaacaatgcgttgaatgtcacgaacacgcgtacgggaagttccggtgaaaccgttccggtggcaatacccagtgcgatggcaatcagaatttgtggcaggaggcctagtttaatctttttcatatcgttgaccttttggagcaaagatagtataataatcctgaataaatgatacaccctgcctggagaaatgattacttttgtgtccgtgaaaaaataatttaacgaaattatggaatcgactcaaaagaagattaacaaagtagagcttcgaaacttgcagattgaagactacgcacagcttgcccagtcgtttacccgcgtatatgcagataaagatgtgttctggacacacgaacaaattgagaaactaatcagtatttttcccgaaggacagattgtaacggttgtagatgataagatagtggggtgtgcactttctattatcgtagattatgatatggtgaaaggtgatcatacctatgccaaggtgaccggaaatgagactttcaatacgcataatccgaaaggtaatattttgtatggtattgaggtgtttattcatccggaatatcgtggattacgcttggcacgtcgtatgtatgagtatcgcaaggagttgtgtgaaaagttgaacctgaaagctatcatgtttggtggccgaatccccaactattacaaatatgcagaccagatgcgtccgaaggagtatatagagaaagtccgttcgcgtgaaatttatgacccggtactgactttccagctctccaatgactttcatgttcgcagagtgatgcgtaattaccttccgaacgacgaggagtcaaagcactgtgcgactttgcttcaatgggacaatatttattatcagccgcctacagactcttttgtggacaaaaagacgacggtgagagtcggactggtacaatggcagatgcgttcttatcagacgctggatgatgtgtttgagcaggtagagttttttatcgatgccgtatcgggctacaagagcgatttcgtgctgttccctgaatattttaatgcaccgctgatggcaaaattcaaccacatgggtgaagctcagtcaatccgtgcattggcacagtacacggaggaaatcagagaccgtttcattaatctggccatcaagcacaacatcaacatcattaccggtagtatgccttatgtgaaggaagatggtggactttataatgtaggcttcctttgccgtcgtgacggaacatacgagatgtacgaaaagattcatgtcactcccgatgaagtaaagagctggggattgagtggtggaaaaagagtacagacctttgaaaccgactgtgctaaaatcggtgtgttgatatgttatgacgtggaattcccggaactgtctcgtctgatggcagatcagggcatgcaaattctgtttgttccgttcctgaccgatacgcagaacggatattcacgtgtacgtgtatgtgcgcaggcacgtgccatcgaaaacgaatgttttgtggttattgccggaagtgtaggtaaccttcctcgtgtgcataatatggacatccagtatgcgcagtcgggagtctttactccttgtgactttgccttcccgaccgacggaaaacgtgcggaagctactccgaatacggaaatgattctggtttcagatattgatctggatttgctgaatgcacttcatacttacggaagcgtacgtaatttgcgcgaccgtcgtaacgacttgtatgaacttcgtatgaagaagaatgcgttggaaaataattgaagagtaaaataatagacataaaaaatccccaggttgcattgaacgacccggggattttttttatgcttactctttgtataaatcttcatgataatcaaacagccattccgcatcggccaatagaggatggtgtttgtctttttctgaaaggatgaccttctccgtaggaattctccagtcaattttcagtgccggatcgttccaggcaatggctccctcgctttgaggtgcatagaaattatcgcatttgtactggaaaataacctcgtcactcaatacgctgaatccgtgagcgaatccgcgcggaatgaagaattggcggtggttgtcttctgtcagttctacggctacgtgctgtccgaaagtaggagagcctttccgtatatctactgccacatccagtacggctcctttaatgacccttaccagcttgctttgtgcaaagggtggtttttggaaatgcagtccacgcaatactccgtaactggatttactttcattgtcttgtacaaaatgaatggtgcgtacctgcttgtcaaaatctctttgggaaaaagattcaaaaaagtaacctctctcatctttaaacaggcgaggttcaatgatgaccactccttcaatctctgtctttattacttccatttttatatgatgaaaaatcatttattggttgtttctttccaattcgtcaattaccttcaatagatattggccgtactggttcttcagcatcggttgagccagttcacgcatcttttcaggggtaatccatccttgtcgcagggcaatgccttccaggcaggctactttcaggccctggcgtttttcgatgacttcgatgtaagtggatgcttcagccaatgaatcgtgtgtaccagtatccagccaggcaaatcctcgacctaaagtctgcactttcagttcaccatcggccaggaaatgctggttaacggtggtaatttccagttctccgcgtgcggagggtttgatgtgtttggctacttctacgaccttgttaggatagaaataaagtcccgttacggcatagtttgatttaggatgctgtggcttctcttcaatggagagacagtttccttctttgtcgaattctgccactccgtaacgttccgggtcacttacccagtaaccgaatacggtagcttttccttcttcttcggccatacgtacggcttctttcagcatgacggtgaagctgttgccatggaagatattatctcctaataccaggcaggctgcgtcattgccgataaacttttctccaataagaaaagcctgtgccaatccgtcgggggaaggttgttctgcatattcaaagtgtactccgaaatcacttccatcgcctagcagtctgcggaatcccgacaaatcatagggagtagaaataatcaggatgtcacgtattcctgctaacatcaggacggatatgggataataaatcatgggtttgtcgaaaacaggaagaagttgtttggaaactccttttgtaatggggtagaggcgggtgcctgaacctccggcaagaacaatacctttcatttctgttgtatttaagttggttttctgcaaagaaagccgttttttgtgagaactcaaagataagaggaggtaaaagggggtaaaaagtcgtttttgtaaagaaaaatgcaatttcctttcttcaggtattgcaggtttaaaaaatagttgtacctttgcaacgcatttgagaaaaacaagtgcagcggcatcggttccttggatgagtggcttagtcagcggtctgcaaaaccgtgtacggcggttcgaatccgccaggaacctcgcaaattagaaagagagaacttctggttccttggatgagtggcttagtcagcggtctgcaaaaccgtgtacggcggttcgaatccgccaggaacctccagaaagtttgaatgcactcttagctcagttggtagagcaactgactcttaatcagtgggtccagggttcgaatccctgagggtgtacgaaaagagattaccattgtggtaatctctttttttatgccttttttctaaaatctgttcttaaacatagataatacttttgcggtcttgtataaaatcttttcctttgcatcaggatagttcagcacagataaagtcttgatatggaaaagaatataaaattcgggcaacagtctaccaaagtgaagcagctgtcggatctcatcgagcaggatattttggtaggaaagtatcgtaccgatacgagtctgccttccatcaatgcattgagtaagacttatcatgtgtcgcgggataccgtatttaaagcctttgcggatttgcgtgagcgaaaactgatagattctactcccggtaaggggtactatgtaaccaaccggaaagaaaagatttttttgttgctggacgaatattctcctttcaagaataccttatataatagttttgtcaagaaactttctgtatcgtacaaggtagatctctggtttcatcaatataatgaacatatttttaatactattctatgcgaagccataggacggtataattattatgtggtgatgaactttgacaatgagaagttttctcctttgtttgataagattccttcttcccgtcttctgctgcttgatttcggtaagtttgagaaaggaaatcactcctatatttgccagaattttgacgatgctttttataaagccctgactcagctgactgctcgtctggagcgttaccgtaaaatcgtattccagttgcctcaggaatccaagcatccacaaacctccgtacaaagttttgagacttattgcgaggatcaccattttgtaggtgaagtggtgaatgaggaagatatacaagaggtagaaaaaggtgttgtgtacatcgttattcgtcagacggacgtggtgaatgtgattaagcgaagccgacagaacggtttgaaatgtggagttgatttcggactgatagcttataacgatacgccggcatacgaggtgatagacgaaggaattaccgctctcagtattaattgggaggaaatgggacggaaggctgcaagtttcatccttacaggtgaaagcgtacaagagttcttgccgacagaagtgcatcttcgaaattcggtataagaatggaagaatgaatattattatgccgtagcttcagcacagttcagcatggatgaacttgcctggtttgaaaagaaaatagataacattaactttataaataatcgaaacatgaaaaattacccgaaaattgggattcgtcccactatagacggacgtcagggtggcgtgcgtgaaagccttgaagaaaagacgatgaatttggccaaagccgtagcagaacttatttcttctaatttgagaaacggtgatggtagtccggtggaatgtgctattgcagattctaccatcggtcgtgtggctgaaagcgcaacttgtgccgaaaaatttgagcgtgaaggcgtaggagctaccattacagtcacttcttgttggtgttatggagcagaaacaatggatatgaatccgtattacccgaaagcagtatggggatttaacggtacggaaagaccgggtgccgtatacctggctgcagttctggctgggcatgcacaaaaaggtttgccggcatttggtatttacggacgtgatgtacaggatattgaagataatactattccggccgatgtggcagaaaaaattttgcgttttgcccgtgcggctcaggcagtggctacgatgagaggcaaatcttacctttctatgggtagcgtgtctatgggtattgccggttcaattgtaaatccggatttcttccaggaatatttgggtatgcgctgtgagtctgtagatttgacggaaatcattcgccgtatgacggaaggaatttacgataaggaagaatacgccaaagcgatggcttggactgaaaaatactgcaagaaaaatgaaggaaaggatttcaatgtagaagccaagactaagacacgtgcggaaaaagatgctgattgggatttcattgtgaagatgaccattatcatgcgcgacttgatgaaaggtaacccgaagttgaaggaaatgggattcaaagaagaagcacttggtcacaatgccattgcggctggttttcagggacagcgtcagtggacggacttctacccgaacggtgacttctctgaagccttgctgaatacttctttcgactggaacggtattcgtgaagcttatgtgctggctactgaaaatgacgcctgcaacggagtagctatgctcttcggtcatttgctgactaaccgtgcacagattttctctgacgtacgtacttattggagcccggaagctgtgaaacgtgtgactggtaaggagttgaccggactggcaaagaatggtattatccatttgattaactctggagctactactctggatggtaccggccagcagactgatgcagaaggtaatccgaccatgaaaccgtcatgggagattacagaagctgaggttgaaaaatgcttggaagctactacatggtatcctgctaaccgggattatttccgtggcggtggtttctcttctaacttcctgtcaaaaggcggtatgcctgtgaccatgagccgcttgaatctgattaagggactgggtccggtgcttcagattgctgaaggatggacggtagaaattgatccggaaatccataagctgcttgatgaacgtactgaccgtacatggcctactacttggtttgtacctcgtttgtgcgataaacctgccttcaaggatgtatattctgtaatgaacaactggggagccaatcacggtgccatcagttacggacatataggtcaggatttgattacgctcgcttctatccttcgcataccggtatgtatgcacaatgtggaagatgataagattttccgccctgctgcatggaatgcctttggtatggataaggaaggtgctgattacagagcatgtcaaaattacggacctatctataaataatcaattttacgctgccggaactggcggatcttccgtctgttccggcttttatttgctattaaattaagaagttatgattcagaacgaacatattgaagaatttttgagacaagcccatcgggtaggtgatgccggattaaccgtgtgcagtagtggtaacctttcatggcgtgtaggcgatgaggtactggtttccggtacaggttcatgggtgccttctttgacaaaagataaagtggctgtttgccgtctggaaacgggtgaaatactcaatggggtaaaaccttctatggaaagtgtattccatttaggtgttttgagagaacgtcccgatgttaatgtggtactccattttcagtctccatacgctaccgcagtggcatgtatggaagatataccgaaagattttaatgtaacagccgaagttccttgccatgtaggagcggagattccggttattccttatttccgtccgggttctaaagagttggctgaagccgtgattgcggccatgaaagaccataactccgtattgcttcagaagcacggacaggtggtttgcggaaaagacttcaatcaggcttttgagcgggccatgttctttgagatggcttgtcgcataattgtgctttccggcggaaaatgcaagaccttgacaaaggaagagattgacgaccttgaaacgtacattttaggcaagaagacaaaatgaaagaagcatatttggcgattgacttcggaggaggtagcggcagggtgattgccggctgcctttccgagggtgaactcgtgctggatacgatataccgttttcctaaccgtcaggtacggatgggacggcatgtgtactgggattttctttccttgtttgaggatatgaagaccggcatccgtatggctgtagaaaaaggctatacgttgaagagtatcggaattgatacgtggggtgtggatttcggactgatagacaaacagggaaatttgttgggcaatccggtgtgttatcgtgacggccgtacggaagggatgcccgaagagtttttctcgaaagtggacgtaaaggcgcactatgtagaatcgggtacgcaggtcatggctatcaataccttgtttcagttgtatgccatgaagaaggaagacaatgcgcagttgaaggcagccgacaagttgcttttcatgcccgacctgttcagctattaccttacgggagtggctaataatgagtatagcatagcttctacgtcggaactgctggatgccaaggcacgcacctggaatttcaagttgattcgggagctggggcttccggaacaccttttcggcgaagtggtcatgccgggaacttcccgcggctttttgaaaccggaaatcaaggaacagataggaatagactacgaggtagaagtgattgctgtagcttcgcacgatacggccagtgcggctagtgtagtgcctctttctgccgagggagaaaaggttgctttcctgagttcgggcacctggtcgctgttgggagtgatgagcgacgaaccgattctgacggaagaagcccgtctggcaggatttaccaatgaaggcggtacggatggaaaaatctgttttctgcagaatattaccggactttggatacttcagaaactgatgcaggagtggaaggaagaaggaaaggatgtagcttattccaccttgctgccggctgcagaagtggcagaaactgatgccttgattgacgtggacgatactgttttccagtgtccggtaagtatggctgaggcgattacgaattattgtatcgcacatcagcaaacaccgccttccacacagggggaatttgtgaaatgtgtcctccgttcattggcgttgcgctataaaataggtatggaagcattgaaccggctcttgcctgaacctgtaacgaagctttatgtgattggcggaggaagtcagaacaaatacttgaaccggctgacagaagaagctattggcattcctgtggtagaagggccgattgaggcgactgctatcggcaacatcaggcagcaaatgaagtaaaaacaccaagagggctgtagccgtcacttaaaatctaacaccatgagtaatacattagaaaacaaatctatattgaagaaggatggagtgagctatctggttccgttcatcctgattaccttctgttttgccctatggggctttgcgaatgacattaccaatcctatggtcaaggctttttccaagatattcaggatgagcgtaactgaagggaccttggttcaagtggctttttatggcggatattttgccatggcctttccggcagccatgtttatccgtaaatatacttataaagccggagtcatgatgggactgggcttgtatgctgtgggagccttggctttctttcctgccaagttgaccggaaactattatccgttcttgttagcttattttgtcatgacttgcggattgtcttttctggagaccagctgtaatccttatatcttgtcaatgggaacggaagaaacagctacccgtcgtttgaacttagcccaggcattcaatcccataggctcattgatggggatgtttgtcgctatgaatttcattcagagtcagctgcatccgatggatacggccgagcgtgcccagcttagtcaggctgaatttgaagcaatccgtgattcagacttgaccatccttatcactccttacctgaccatcggcatcgttattctggtcatgcttctcgtcattcgtatgtccaagatgccaaagaatgcggataagtctcattccattgactttattcctacgttaaaacgtctgtatgccgtgaagcgttatcgttatggagtagtggcgcagttcttctatgtcggtgcgcagattatgtgctggactttcataatccagtatggtacccgtctgttcatggcacagggaatggaagaacaggctgccgaagtcttgtcgcagaaatataacatcgtagccatggtcattttctgtatcagccgttttgtgtgtaccctgatgctgaagtatgtcaatccgggacaattgttgaaagtgctggccattgccgcctccttgtgtgtactgggagtaattttcttgcagaacatatatggtatgtattgtctggtaggtgtgtcagcctgcatgtcgctgatgttccctaccatttacggtattgctctgaaaggaatgggcgatgatgccaagtttggtgccgcaggattgattatggccattcttggcgggtcggtacttcctcctttgcaagccgctatcattgattgcaagaccttgtgggggatgcctgcagtaaatctgtcgtttgtacttccgctcgtttgttttgtggttatcactgtatatggccacagaatgcgtcgggagcattaaaaagggaggataacaaatcttttttccggattttgctgggaaaaagatttgttatctttacaattttgttgcagtattaaataaagcccctatctttgcacatatttcaccaacgactgatgaatgaacttaaagactaacttgctattcattttattattgctgctgtcagtggcagcccaatgtatttttggcaactttccgtttgccttttttgcttttccattagatgctattttagccttactgtggattgcattgataggatatggctataaggagaagcgtcattcggaagctgtccgtctgtggctttccccgcaatgtacctgctggacattaggctggtttttggccggttgtctggtgataggcttgtttccccaactttctgcgcaagaggctgcagagaagtcgggtctattttctcgtttgggttgctataattttatgtcttcctggatttttgttaccggattattcgggttgctgactcatttgggaatgattaccgtaagacgttttttcacgccgggacgtaatcggtggcgttttatgctgaatcatgccggattgtggctggcactctttgccggatttatgggaagtgcagaggaacagactttacgcattccggtatttcgggctaatccgaacaatgaagcttttacctccgagggaaatgtggtatacctggagaaaccgttgcagctgacaaactttactgtagagcattatcccaatggtacgccacgccgcttctttgccgaagtgtcaatggacggaaaacccatacatctggaagtaaaccagccctattcggcaagctgggcagaagattattacctgacttcctatgatgtgcattctgccgaaccggaatactgcgtagtgcagattgtgcgcgagccgctgaaatacgtcatgctgttgggcattgtgatgatgctgtgcggaggattactgctctttttagcaggaccagacaagcagatgagtaaatctgtaagtgaacttgttgactgactttatatataactaacactattcttgaatgattacgtgggataatttttatttgtttgccctgcctgctatcgttttatggggagccggagcggtttttgccttgttctctaaagggcggagccgatgggctattgggttgaccttgtcgggtatactggtgtttgctgcctttattaccggattctggctgagccttcagcgtcctcctttgcgtaccatgggcgagaccagattgtggtattcgttttttatgggtatatccggcttgctgacctatcttcgttggaagtatccctggatattgtctttttccactgtagtaggtgcggtatttgcgattatcaatattctgaaaccggaaattcatgaccggtctctcatgcctgccttacaaagcccgtggtttgtccctcatgtcacggtgtatatgttttcctattcggtgttaggctgtgcgttcattttggcctgtatgggactttacaagcatcgggagaattaccttgaagccgccgacaagttagtttatgcaggattggcttttctgacagtcggtatgctgaccggagcaatctgggcaaaggcagcctggggacattattggagctgggatccgaaagaaacctgggcagcagttacgtggacaggttatttgctgtatgtacatctgcgcttgttccgcaggaatactccgcgtgcgctatattggatactgattgtgtctttcctttcgctacagatgtgctggtatggagtgaattaccttcctgccgcacagcaaagcgtacatttatacaaccgttcttagcattttaacgtgtgagatatttattgagttattaaaatctaatcagtttcttatgaagaaaagaacaaaaatcattttttcagtgctggtggtagctgcggtattggccgcaacttatcgggtggtgaaccgtcctccttcagccagtttggaaagcagtgatcagatggaagaaatcattgcgagcagcggatgtatggcctgtcatactgccaatccggaattgccgttttatgccagtttgccggttgccggaaaactggtcaaggaagatgctcgtctggcctaccgctctttcgacatgactccgatgttagaagccttgaaaaaaggagagaaagtcagcgaggtagatttggcaaaagtagagaaggtgatattggacggcaccatgcctatggccaaatattatctggtgcattggggggcttcgttgaacgatacggaaaagcagatggcactttcgtgggtgaagtcacagcgtgcagctttctatccgaatcagctggctcatgcacagtggagcaatgagaccattcgtccggttcaggactctgtaccggtagatatgcggaaagtgattttaggaaatctgctgttccacgacgtacgtctgtcggccgataataccgtatcttgttcctcttgtcacggattgaataccggtggagtagacaacaaacagttctcagaaggagtaggaggtcagtttggtggagtaaatgctccttctgtctataacgcacattataactttgtgcagttctgggacggacgtgccgctacactggccgatcaggcagccggtcctcctttgaatccggtagaaatggcttgcaagtcgtttgatgagatttgcgagaaattgaatgcggatgcagctttcagcaaggcatttaaggaagtgtatcccgacggtttcaatcaggcaaacattacagatgccattcaggaatttgaaagaaccttgcttacaccgaactcacgtttcgacaagtacttgaaaggggataatgcagccctgacggctgaagagctggctggatatgatttgttcaagaaatacaactgtgctacttgccatgtaggtgagaacatgggtggacagtcgtacgaattgctcggcatcaagcatgattactttgccgaccgtggtacggaactgaccatagaagacaatggccgtttcaaggaaacaaaagacgaaagagaccgtcatcgctttaaagtgcccggattgcgtaatgtggcattgactgcgccttatttccatgatggaacacaggctacgctggaagatgccgtgatagctatggccaagtacgaggtaggcgtcgatttgtcaaaacaggaagtcgcacagatggtatccttcctgcgcacattgaccggagaatatcagggtaagttactggtgaacgagaatgacttgcagaaataagtaagtacatataccttaatattatataagccgtttcagccgtaaagattggaacggcttttttctgttattttcctgccgttttatttggtttataaaataaacttatttatatttgcattaaagcaagagagaagcgcgcctccttgcctttatttttcgctttatggtttataaaataaaccatattgagtttaaaacctaaaactgattgccttatggaagaaaagaaattatcagaacaagaaagtctggaactgatttcacaaatgatccgttctacccggaagaatatggaagtgggcagtggaaaccagtttctttactggggatattttactgcggcgctttcagtactgttgtttttattggtgtactatacgggagatgcccgttggagtatcggctggttcagtatgtttctgttctggggctttatgcttcgtatgcagcgcaaggaaactccttcggtaattacgtataccgaccgtgccattctgcaggtctggaaagtgataggcagcctgtttgtgctgaccgtagtcatcatgtctttgctggcattccactacggaggagtcaatttttccttgatgctacccctttctctgctttatagcggcatcggagtttccattacgggaatcattatccgtagccggctggtgatgtggtcaccgctggtaggcttttgttttgccatttacatgctgatggcctatacccttcatcaggctgttaccattgactggtatctgtactttggattgtcgtttgtggtcatgatggtgttgcccggccattatttaaaccgaaaggcccgtaacgtatgttgaaagaactgaatccgttgcttcattcgcagctccgtttagctgtgatgtcgatactcttgtctgtggatgaggctgattttgtatacttgaaagagcagaccaatgccacggcaggtaacctcagtgtgcagcttgacaagttgagcgaagccggttatatcgaggtggaaaaaagttttgtgggcaagaagcctcgtaccgtttgccggatgacctcaacagggcgggaggctatggctgaatatatggaagtgttgaaagagtatttatctggtatttagggaatttcatccttttttaagagccggatttttaccccgagaaaacgcctttgcgtttgaactaaaacgcaagtgcgtttaacttgaaacgcaagtgcatttaagataaaacgcaagtacgttttgcatcaaacgcacttgtgtttttttcagcatacttttacggtggttggaagccttgtgtaaaattaaaaagtgttgttttttgcgtttgggaagaatatattgtgaaccttctaatttttataaaaaaagcagttgaagtgcctgttatcccgaaaaaagtttgtagacttgtgcccgttattgtaaaaaacaatgtgatttaagaattatgattataggaatagatgtaggaggaagtaccaccaagattgtcggggtgaaagacggtgaaatcagaaatccgatgtttgtcacagccaaggaccctgtcacttcgctgtttggtgcattcgggaaatatatatacgaccattctatccagctttcggaagtggagcaggtaatgctgaccggagtgggaagttcatacattcagcagcccttgtatggtctgcctacggcccgtacggatgagtttatcgccaacggtctgagtgcccagtatgccacggggctggaccggctcatggtggtgagtatgggaacgggtacttcctttgtgaaggtggaacgtgaaaagattcgccatgtgggcggaatcggtatcgggggaggcacactgatgggattgtcgcgtttgttattgcatacgcaggacattctgtgggtgtcagaactggctggaaagggtaatttgcagaatgtggacttgcagattcaagatatttgccagacttctttgcccggattgccacttgatgccacggcttccttattgggtaagttggataacaatgtgtctcccgaagatttggcgttgggcttgatgcatatggtgttgcagtccatcggacaggcagccgtactttcagcgctggaaatgggaatccgtgattttgtgttgattggaaatctgacccagttgccccagtgccgtccggttttcgataccattgcacagatgtacgatgtacgttttatcattccggcaaatgcggaatatcagacggccataggagccgcattggcttatattaagaaaatagaaacaagtccggtaaggtaataggtcttatcggacttgtttctattggtgaatcttttgtttccgttatttctgccgcaggatgtcagccatcaggtaaacctggctttccgacagcccctgtgccgtcagtgcatccttgtctgccaagaactgtgagatgaattcctcgttcgatttgcaggccgtttctgctttccggtagtaagttaacgcctgaggtatgttccccatagccagatacacgtgacctgagttcagccagtcgttggcttgtgggttttccagagcaagtagcttatcatacatccggacagcttcttcgtatttaccggacatgaaatagcaccagccgatggcgcgtcgtgccttttccggatgtgtttccaggaattctaccttatagaataccttaatggcctccggataatttttcagtgccgcaaggcattgaccggtttgcatcaggatgtgcaggttgtcagggtcaaattcaagcactttctggaagcagaaggctgcctgagaataatcacccgacagcttgtggcattgagccagatgtttgagcgtccataaatggttgggttttatcgtatctgcctgcaggtaagctttaaccgccttgtcataaagtttgcttttttggtaggcaaatcctaatttctgccaggtttctgcgttggccggattctgttgggccagactttcataaagttcggcggcttcttgcatatatccctttgagaagaggtagtctgtaatctgaccgtgatacgttcctttcagtatcaaaggacggagcagaggattgttccagaaatccagtctctcacggaaaatgtcttgcatttcctgtttgaatttccacagtttatagaagcggtataaattgtggatgtattgccgttgtatgtagttgattttctgttctgtcggattttcgctgatcttaagatcattgaatatcgagtcttctccatttaatttggagcgcatgaaggtctgctggtcggcaggaagtgactgcatggccaggcagaaagagtatttgtccgagtcgcagaacatttgggagttgacaaccatacctaacaacgatttctcatcgaatgctttgtctttataaatctggtacaagtcgggcactttcatgctgaacagatagaaccagtgggctgcttcctgaaagaacgggaaggtcttgagttgtgaaaaggcagtcatgtaggtgtcggccccttccagttgcaactctcccagttcacggatgtggctgtttatctgttccaggtctttctgccattccgggttgaggtcttctatatcttctatttcgatgacttttgattccggatttctgagattgggattgcgcatcatttgaggaataatttcttccttcattttcttgtctatcttctctgtctcgcgtgaaaggaggaagatgatttgtatgtcgtgcaactgtttcaaggcagcagggtcatcttccatcagtttcaatgcagagaccaattccggatacaggtttatccggtcagcctgaaagtaagctgcaagggcaatccccgtcaatgcccgttgggtcacggtcggttccttggtttgctgataagctatgagtaacagcaggaatttccggctgtcaaaaagctggagcaggttgagggtgacggcacttatcattacagctttgtcgttggcagccatggatggtgagaatagaagttcacgtgcttcttggtagtcttcttcactccattgtgtagagacccatatcttgttgaacagctcatcgatggtgtgctcatgcaacgtataactgtgtattctctgcgcttcttctttgttgacttgcgacatgtcgaatgtgcgtttagctgcttccagcatgaaatcgagttccttgaatgagtgtggaggggtttgggcgaacttgcggaatgtgtcggcaaaatagccatacgccttatcccattctttcaggaaatacgtcttgtctgccagttcatatcccttgcaaagcaactgattgtaaatcgcttcgcgctgcgggtcttgtgtgcccattgccatatattgaagcatgtactcataagtcgtttgttgggtttcaatctgcgactttaattcccagttgttaagtgtggctgcagcttccttaatttgggtgaatgcttctttcaatcttttctcgtttaacagttgaatgatttccttatgcatgatgtcgtttcagaagtcttaaaaatacaatcagaaaaataccttattaaaaaactttttcttgtaggcaaaagtaataattatttcttactttttatccgtcgtatgtctgcaaatgaaaaaaatatagccaaaaatgtttctgtttctttctcatttttagagtcttaatgttggttggagatttttttcaaaaaaaatggtttttcgaataggggttttaccaaagatgtgcgttatgaagacaaaaacacccggccgggtgaaacaacagagaaattaaacgtaagacttttttaaaactaaaaaactagactttatgaaaattcaattgattgctttatctttgtgtgtgttagcaagtacaaatctggtaaaaggacagggttttactccttctgaaaataaacacgaaatacgtttgtctgtcagtgacggactgacacaaggatcggtagatatattgggaatgggattggcagatgccgtgacagggagcaagcgtacggatgaaaactacagtttggtgtatggatttggttaccgctattcgttaggccgtttcaaggtaggaacagatttgggtttttcttcttccaacagtaaactggcattagctggtgaacaggctccttcattgaaagagagtaatgtgaatttcatgattcttccggccgcagaatttgtatattataaaagaggcttgtttgaattgtatggaacggctgctgccggtgttaacctgagtcgtcacaaagaaactgctttgacggatgccggaaagaaggctgcaaagaaagcagatttgagcacttcgttcgcttatcaggtaaatccgattgccttgagggtaggaaatgaccggattggcggttttgtagaagccggattaggaaataaaggcttcttgacagctggtgtaagtttgaaattctgattattcgtattgacggaatcatgataatgagagccgatagaaaggacatattcaaatcccggtttcaggaacattattcaaggctgtgccgtatagcctatggatatgtttctgaccaggacgacgcggaagatattgtgcaggaactgtttatcagcgtatggaacaaacgactggatgacatgcctgagaaggagtttgctgcctatatgactacctccgtgagaaacagttgcgtatcctttctgcggaagcgtaaggaagatacggtgtcgatagatgatcatccggcttctgcaagttgtatgccggatgaaactcctgaagaaggtaagacgcttcaggatatattggactcggcattggagactcttcctcccagatgcaaggacgtttttttactggccaagcttcaggggttgaaatatcgtgaaatagctgagaagttggaggtgtcagagaaaacagtggaaaaccagatgacaaaggctatcaagctgcttcgtgcgtatgtggcagcgcatggtgcgctgttggtaacggtggctgccattattttgtccattattataaattgtgaataagaccatgaataacaaggaagatatagaccaactgctggcccgttattttgcgggtgaaccgctaagtcttgttcagcaaaaggaactggacacatggattgcggctcatcgacaggagtttgaacagattcacaagctgatgcaggctccggtaaggactgcggaagaaattcattttgatgcggataaagcctgggccaaaattgagccgcgtctggaaaaccggacacgggcagtgacatttgaacggaagatgacctttttcctttccgtggcagcttcgttattggtgttgctgggcatcggtgccttttatctgttccgtgcaccggcagaagagggattgtattatgccaatgcggatagaacagtaaagcagatagttttgcccgacagctcagaggtgattttatatccagaagctacattgtcttattatttttcggataaagaaaaaggaagaatgaccacattgaaaggaaaggctttctttcaggtgaaaaagatgcatggaattccttttagggtgaaaactgactttctggatgtagaagtacttggaacttcgtttttggtagacgtggcacagaaagaaaaagccggagtgtttgttaaaaccggaaaggtgcgcgtggaatccgctgaacatgaagtggtgattcaagccaatgaaaaggcagaactgaaagggagcgtcttgaaaacggatacgattcgtcgtccgcaggatgtattcggtgtggacgattcggtactgatttttgagcaggcacccattacggaagtggtgaaggtgattcgggaaaagacaggtatacagattgatttggccgaagggttggagaaaaatctgattacgacccggataaacagcaatgagccggacatagccggagaactggcttttctttgtggatgtaaatgcgagacattggtgaaaggaaaacattacaggttatatgaaaagtaaatggctgcttctcttgctgtggatgtgcatggttgcacgaccggaagcatgggggcaggaagtcaaatcagcgaatacggtagcggaagagtggatacaagtgaactcctcttccgctaccgtattgcagtggtttgaatggattgaaaaaagtacgggaatcgtgctttcatataatcctgcacagatggagttaggtgaggtgtgccggatagagccgggagggagaatgacggtagaagaacttttgcattgcatcctctccggttatcaggtgaaaattgcttttgtacctcctcgtaaactggtggttcatgcacggaagattgaaagttatgatgtcagcggtacagtgtccgaagtggacagcgaagaacgtttgtatggtgcggtcgtgacactggaggataaggatggaaaacaatggaataccatttcgaatggaaaagggattttccgtctgcatgtacccgaaggaacatatacagtgaaaacttcttacatgggctacactccgcaggtgcagtcggtccgggtgacgagagactgttttatccgtacccgtatgaaaccattgttgtttgagatagaagaaattaccgtggagtcgggtaaacgggaaaatgaactgggagaactgactccgtctaatttgctggcttttagtgggggagacctgttctcgcagatatggattctgccgggggtgacttcttctttggtcggacagaattttatggtcgacgggggcggatacgatgagaacttgctgttgctggatggcgtacccgtgtttcatcccggacatttcagttcgcttttgcccgtgttcaacggggatgccgtgaagaacatggtttttcataaaggtttctttccgactcctttggagggacggatttcgtcggttacggaagttaatctgaaagagggaaataagaaagagcatgtgcgtaccttgacgttggacatgccggctgcatccgtcatgcttgaggggccgattatcaagaataaactgtcgtacatggtcggggcacgcagaagctggcttgattttttcgatagtcttttgtcggaagaaaatcgtttgaatcattccacttatgattataatgctaaattatcgtacaatttgtctcctgttaccacaatgaattttctggcctacggtgcccgtgatgattatcatttacccatcgaggaaaacggtgaaaatgtgtcagtgctgcgttgggacaatcaggcctatcagctctcgtttgccacacagaagggtagattgggaaattcgacagcggtattttattctgcccataccaaccgcgcttatatgggagagataaaagaggatacggacggatatgtacatagcggtatcaagtcgctcaacgtgacgacggattttagctattcgctggagaatctctatcatgcgcgctggggagtgaaatatgcgtatgaagtttacgatttggtttcgcaaggtgaggagatgcgggtacggcatgagccggtgaatcaggtatcggtttattatgacaacctgttgcgtatttctccggaattctctgtgcaggtgggggtacatggggtggcttattgcccacagcagcatcggtcgtattatagtattcagccacgtctgtcggtgaaatatttcccgtcggagagaaatctgctttatctgaacttttcgaagatggagcagttttatcatttccttcgtttcgacagcttttctttgcctacggacttcagaatgcccagcattgacggtttcaagcctcgctcttccgagcattatgagatgggatggaagcattttatgaattcaggacagtgtgaagtttctgtgtactataaaacgaggcggaatgtgctggccttgcgtccggacacatgggttgaagatgagggatggcagaaatacttgatggtaggtaatggagacagttatggggtgaaaggatatttatatcagcgctggaagcgttggagtctgcaactgtcgtatgcttactcccgaagccgggagtggtttggcgagttgccggaaaaagggaaggtgccctctttgtacgatgtacctcatcagttggggggagccttgtcgtatcagttgacgactcattcttctttctctgtaggaggcatgctgcgttccggaaaagtccggttcttgaatgaagattatgagcctttgtcagtagaagaatttcgtgaaaagcgtgagccgctgaattatcgggtggatgtgggctattcttaccggaaatcattcggcgataaattgctcttgcttcgtttgggtgtatataatgtagtgggaaatccttccgaagaagatattttgagtttttattccgtgcactggagtggcaactgtttgccgtacggaagtctcagctttaaattttaaggaagagttgccgttgtattctttgttttttgtgcgcatattcaaacgagattgattatttttgcagcatctattgatgagacaatgagtataaaagagcttcaagaggtatatgccaagcatcctaatgtggcaggcttggcttctttacgtaaaaataaggatataaagactgtttatttggaaggtatgcacagttcgtgtgcttccttgtatgcttcggtatcggtcaagacgatgccgggaattcatgtgtttatactgaacgatttggaggaagctgggtatttttaccatgacctggtgcaggtggacggagagactgatgtcctgttttttccgtcttcttaccgtcgtgccatcaaatacggacagaaagatgcagccaatgaaattcttcgcacggaagtgctgagcagactggagcagaagaagccggtcacggtagtcacttatccggaagctttggcagagaaagtagtttctcggaaacgactctcggatgcgatgctgaccttgaaagtgggacagcaggaagatacggtcaaattgatggagacgctttccaagtatgggtttgagcatgtggactatgtctatgagcctggacagtttgctttgcgcggcagcattcttgacgtgtattcttttgcatcggaatatccttaccgcattgactttttcggagatgaaattgatagtttgcgtacgtttgaagtagaaactcagttgtcgaaagaaaagaaagattctatctgtattgtacctgaactttcaggaacggaaggagcggatatctgttttctggatttcgtggataaggacgctacactttgggtaaaagacttgctctgggtgcgcgaacgtattcaggccgtacacgatgaggcggtttctcctcaggcactgaaagcgtatgaaggcgagcagacggaactgatgaatttgtccaggaaactgattgacggagccgaattcacggtgcgtgcccttgaattcttccgggtagatttcggacataaggccttaggaactccgcaggcacgcttgtcgttcgagacctccgtacaacccattttccacaagaattttgatttggttgcaagttctttcaccgattttctgcaacggaaatatcgtctgtatatttgttcagacagcatgaagcagacggaacgtctgaaagatatttttaaggaaagaggcgatgacattacctttgaaccggtagaccgtacgttgcatgaagggtttgtggaccatgcgttgcgggtttgtgtgtttacggaccatcagatttttgaccgattccataaatacaaccttcgcagtgacaaggcacgtagtggaaaagtggcattgtcgctcaaggaactgaacatgtttgaaccgggcgattatgtggtacatattgaccacggtatcgggcgctttgcaggcttggtgcgtattccgaacggaaatactacgcaggaggtcatcaaactggtgtatcagaatgaggatgtggtgtttgtatccattcattcattacataaaatttccaaatacaaaggaaaagaaggagaacagccccgtatcagtaagttgggcacaggagcatgggaaaaaatcaaggaacggacgaagacgaaaattaaggatattgcccgtgatttgattaaactttattctcagcgtaaacaagagaaagggtttaaatatagcccggacagctttttacagcacgaactggaggccagtttcttgtatgaagatactccggaccagttgaaggctactcaggaagtaaaggcggatatggagagtgataagccgatggaccgtcttgtctgtggtgacgtgggttttggtaagacggaggtcgctatccgtgccgcatttaaggcagtgaccgacaacaagcaggtagcggtgctggtgccgactacggtactggcttaccagcacttccagactttcaagaaacgtctggaggatatgccttgtaaggtggaatacctgagccgggcacgtacggcaaaggatacaagccgtattctgaaagagttggccgacggaaaaatcaatatccttatcggtacgcataagattattggcaaaagtgtcaaattcaaggatttgggtctgcttatcattgacgaggagcagaagttcggtgtaagcgtgaaggaaaagcttcgccagttgaaggtcaatgtagatacgctgacattgacggcgactcctattccgcgtacccttcagttctctttgatgggggccagagacttgtctgtcatccagacgcctcctcccaaccgttaccctattcagacagaagtgcatacattcaatgaagaaattatatccgaagccatcaattttgaaatgagccgcaacgggcaagttttctttgtgaacaaccgcattcagaatctggtggagctgaaggcgatgattctgcggaatataccggattgtcgggtatgtatcgggcatggacagatgcagccggaagaactggagaagattatcttcgactttgtcaattatgattatgatgtattgttggccacgacgattattgagagtggaattgacatccctaatgccaacaccatcattatcaatcaggcgcagaattttggattgagcgacttgcaccagatgcgcgggcgagtgggacgaggcaataagaaagcattctgctatttgctggcaccacctttgtcatcgcttacaccggaagccagacgccgtttgcaggccattgagaatttcagtgatttgggcagtggcattcacattgccatgcaggatttggatatccgtggagctggaaatatgttgggggcagaacagagtggttttattgcagacttgggatatgaaacttatcagaagattctgaatgaagcggttactgaactgaaaaatgaggaatttgctgatttgtatgccgaggaaatcaaagcgggtgaagaaaaaatcagcggagaggagtttgtggatgaatgtacggtggaaagtgacctggagttgctcttcccgaatgagtacattccgagcagcagtgagcgaatgttgctgtatcgtgaactggataagcttgaactggataaggatgtggaaacctttaaggccaagctggttgaccgtttcggaaaaataccgccagaaggtgaagagttgctgcgtattgttccgttgagacgtctggccaagcgtttgggcgtagaaaaagtggtattgaaggcagaacggatgacgctctacttcgtcagcaacctggacagtccgtattatcagagtgtggcttttggcaagtttattgaatacatggccaagaatcctcgttattgtaatctgagagagcagaacgggcgtcgcagcatggtagtatcgaaagtgacagatgtgaagagtgcagtaagcatcttgcaggaaattgtcagcatcgaagcaaagtagccggtttctcaaagcagtgacaaggggatttcatttctgtttcatgggaagtgttttcatgattttccaagctacataagagggaattaagtggagtaatggtgtaacttcgcgcctaaaatttggaaaatatatgaagaaaagaggatggattgtgctgttcctggcttttcctttgtggatgcagggacaaagtgcacgtgaggagattggaaagaatccggcattggctgcaggaaaatattatgcttatcaggctccggaggagaagttgactccggctcctgcagggtatgaacctttttatatatccatgtttgcccggcatggttcccggtatcttacaaaagagaagaagtatgccgcgccgttgtcactccttcttgaagcagacgaggagggagtattgactcctgatggaaagtgtgtgctgaaggtggtggcttctctggcccaggaggcagaggggcgttatggagagttgactccgaaaggagcgcagcagcatcgggagctgatagaccggatgttccaccgttacccggaggtgttcagtgacggtacgcatgtggatgcacgctccacatacaagacccgtgcttttctttccatggctgccggatgtgtggaattgaaaggcttgaatcctaaactgaatgttacgacacagaccagtgaggcggatgcttattatataaagtataagaatcccttgtatgaagcacagcatttggagaatgtggattccgtgtatcgtgctgccgacagtgtgtatgtacatccggagcgattgatgaaacagatgttccgtgactctgtttacgtggaaaagcatgtggatgccgtgaaactgatgatggatttgttcgaacttcatggcatcagtcaaagtagttacaaccaaccggatctttcttttttatttactcccgaagaacagtatgatttgtggcagcggaataattttgaatggtattacgaaaaagggccttctccattgagcgatacgtgcatgtataagctggaacgaaatctgctgaataattttatagaaacagctgatacggtaattgcttcccggaaaaatgcggtgacattacgttacgggcatgacacgaacctggctccattggccacgctgatgggaatgaacgcactgcaaaaggagactgtcgattggaataagatagcagatacatatcgcacttatcgcctgattccgatgtgtggcaatgtccagcttattttctatcgaaaacaaggcaatcaggatattttggtgaaattactgctgaatgaacgtgaagtcacacttcccttgcggacggatgtctcaccttattatcattggagcgatgtaagggaatattggaagcgggttgtaaaaggaatttcccttccagaaagtaaagataaataatcgcatttgtaatatgtttgtaaaaagaggtatttgcgggctgggcctggaagtacctcttttttattgtaaaggatattgcgtgtaaatgtaacacaatagaaatctctatgcaatacctatgaaaatcatacgggatacttttgcagcaaataaggaaagcaaatgaaatctaagattgtattggtattgttatcactgatgtcggctggagttcaagctggtgtgataaaaggtaaaattaaggatgcacaaactggagaggagattataggtgcatcggtgattgtgaaggaagatcctggaaaaggaacagtaaccggattggacggaagttttaatctgtcggtgaacagagacaaatatacgctggtctgttcttatgtgggctataaaaaatatgaagttagcgtagcagcagataagaaagaaattgtaattcctttgaagagtgacgacgttgctctggatgaagtggtggtggtagcttctaatccgggaagaactgaagctggtgcaagaggcatcgaacgtcaggctatgaacgtggtgaatgtgatgagtgcgaaggcgatagaactttctccagatattacggtagccaacgtgattcagcgaatgtcaggtgtgacaattgaacgtaacagtagcggtgaaggacagtatgccattcttcgcggtatggataagcgttacaactatacattagtaaatggagtgaaaattccgagtccggataacaaaaatcgttttgtgccgctggatattttcccgtcagaaatgttggaccgtttggaagtaaccaaatctttgaccgccaatatggaaggtgacggaatcggaggagcggtcaatttgattatgaaggatgcgccttctgaacgtcagtttacggcaaatctgtcaaccggttacaatgcaatgtattttgatcgcgattttcagtcgttcaatcacggagcgattgtgaagaaatctccttatgagcagatgggaatgccggaagacagccgagtaacaatggataactttacgacagataatctgcggatgaaatggaacaaaccgttgcccgatttgactgccggattatcttacggtgaccgcttctttaacaataaattgggtgtgatgctggcaggtagttatctgaatacgtatcgaggaaaagaaagtcagttgtattatcagccgggaacaacccacaatggtatcgaataccgaaattattcttctcaacagactcgtatcggggctcatgccaaactggattatcatatcaatgccaatcataaactgacctggtataatggatatatggatatgagagaagcagaagtacgtgacggacatgacgacaaagaaggagccgtacgtatgaagtggaatcatcagtatattatcaattctacactgaaaggtgaacatgcctttctggaaggtggtgcacttcgtttgaattggtcggctgtactttcaaaggcatacagtgaaacaccggataatgcggaaatcttcttattgggtaaccatgtacagacttctggagcagccatccgtcgttgggagcataactccgataaagacaaggccggataccttgatttgatgtataagttgaaactggatggaggttctgtattcgacttctcggtaggaggtatgtaccgcgataagaaacgtgacagcttcttcaatgaatatacctttaactctgctacgggagtgaaagatccccagtatcagggagaggactggaataactacgatgaaatcttgtttactccgcttaagtacggtaacatcagtgatccgttaaactatgatgccactgaaaagattggtgcaggatatggaatggtgaaatacacataccggaaatgggaatttattgcaggcgttcgtgtggaacataccaatcaaggctatacattgaagttccctacagagaatgcagatcctgaaggaaaccagaaatatacggatgtattgccgagtttccatgcaaaatacggagtacataaaaacgcgaacctgcgtttctcgtatgctcgttccatcaaccgtcccagcttctttgaaattgttccttacagcattatcaatgaagattataaggaaaaaggaaatccggatttgaaacatacggtagccgataaccttgatttgcgttatgaattcttcccgaaatcatctgagcagttcatggtaggtatgttctacaagagactgaagaatccgattgaatacggattgctgaacgaaggacaggatacctattataaaccgatgaattttggtaatgctaccaacttaggagtagaagtggatgtaatgaaatattttaactggtttggaataaaagctaattatacctacacgcattcttccattacgaccgaaaagcgaatcatggatggaaatgatgtgaagacctgcactcagacccgtccgttgtttggtcaggctgcccatgtagcaaatctgtcactgctgttcaaaagtaccaaatatggctgggaaggacagattgccggaagttataccggaaagcgtttgagtgatatttctaactggtatgatgacgatatttgggaagatggctatatgcagttggatgcttctgtagagaaaagctttaagaatggtatcagtctttttgctaaggcatctaacttgctggatactcctttgcttcgctttattcagaatggccctcgtacggagaatgtcaactctgaacgtaacaatggcaatgtgatagagcgaaaggaatggcacggacagtcatttatgctgggaatcagatacaaactataataaagagataaagaactatattgactaacatttctaaattattacaaaatgaaactgaaaaattatttgttggccggcacggctctggtagcattgtcttttatggcagcttgtacagaagaagacccgattgcaaacggggatggaactgagactcccggaaacaatgacgatggaaataacgatgaaaatgccgatggtggaaatggagagacaactgacagcatcattgtctggcctgcagatacgatagtaaatctgaccaaccattacacagtgcccgaaggtaaaagccttgtaatcaaggaaggtgtgaaaatcattgtaagtacagcaggagtaggagccaatcatgttccggtagaatttaccgtaaacggaaacttgtattgtgaaggtacagctgaaaaacctatcttgttctctgtgccagaagatgaacgtacaaaggaaaatatttttgcaggtctctggggaggtattgtggcttcatccacttgtgaagaaatgctgattgaccatacaatcattgaatacacaggaggtcaggttgtggaaggttctcctgctgctgcatctgaagtgtatactgctggagacgatgcctatccgcagattacaaccaataacatcaatggacattatgtcattaccaactctgtattgcgtaacggttggtcagatggtatttatttgatgggtggaaatgccatcatcgctaacaatgtgtttgctgcaaatggatatgatggtgcagaagctgtgaacgtaaaagcaggatgtgtggtcgatgtagctggaaacgtcatgttcagcccgaacaccaacggcttgaaactctccagctctggtcagagtgacacacgtaatatggcaaaaatccaggcatacaacaataccattatcaatgcaggatggcgtcgtgacggtgaaaaaggcggtggcgtgtatgtagaaaagaatgccttggccaatgtgttcaataacctgatggtgaactgtaagttcagagcgatgactcctagcttcgacatacctaatgatccggaagaaggatacaatgataagtcggttattgactataactactatgcttcaggtacacagaaaagtgacgtcgtgtttgcagatgagtctggtgtggcttactcttgggaaggatatgcttatccgcatgaagattataatgaaggagtggtagatgcacacagtgtaattacaaagacacaggcagaatgtgctactaatgatactaaattcgtaaactatccgattaatgaagtaggtttgaccgattatgtatatcaggatgcatgggacttccatgtacaggctggttcaccggtactgactggtgcttacaatggtaatgatgctactatgcagccttatttcgcagcaggtctggaagtaaatggagtgacttatacctctccgaaagtggaagctcgcttcggagcatacggtacaaaataataacatccttttctaggttttgttaaggcagttgtgaaactgcatttttccttagacgaataagtccggacattcttgtttcggacttattttttgaaaactttcagcagaggagttttcctgattttattcagaattgggatttacctttgcaacaacaaacaaataattgataaaactaaaatgattatgatttcattaaaaagaattttctgtacatgttgtctgcttttatcggtatgggcagtttttgcacaaggtccttcagaatggaaggcattggagaaacccttgaatttttatctggcaaatgatttgggccgtaatggatattacgaccagaaacctatcgccgaattgatgggtcagatggcagagaatgtagatattgaagcagtggtagcagccggcgatgtgcatcactttgaaggcgtacgcagtgtaaacgatccgttgtggatgaccaactacgaactggtgtacagccatccggaactgatgattccatggtatcctatattgggtaatcatgaatatcgtggtaatacgcaggctgtattggattatagtcaggtgagtgcccgctgggagatgccggcacgttattacacaaaggtgctggagaacgatgatattacggtgcgcctggtaatgattgacacagctcctctgttggataaataccgtaaggatacagaaaagtatccggatgcatgcaagcaagatatggacaagcaattggcatggctggattctgtactgacatctgccaaagaagactgggtgctggtcgtaggtcaccatcctatttatgcggatacagacaagaatgattcggaacgcctggatatggaaaaacgggtagacagcattttgcgcaagcataacaatgtaaatatgtacttgtgcggacatatccataacttccagcatattcgcaaagcaggaagcaagatagattatgtagtgaacacttccgcatctttgagccgcaaggtgaaagcagtagaaggcactgtgttctgtagtggagaaacaggtttctctttgatttctgccgataagaaagaattgtgcctgtatatgattaataaggaaggcaaagtgttgcatacagtaagacagacccgttaatgcggctttctgcctgtttccattattttgcaaactcgactttgcgttattgttttaaaatagataatcctctcctcatttttaggtatttttgagggaaagagtagcaatttggcaaaaaaagagacattcgttggaacggtgtctctttttttgctatttttgcacagtttttggggcatttgtgccgaatcgactatgaggggcatgcagatgctcagtttattggactatatgagaatagtccggcatcaaaagaaatcattattaaaacataaagcatgatacacaaagtattaatcgctaaccgtggtgaaattgctgtgcgcgtgatgcgttcttgccgtgaaatgggtatccgtaccgtagcagttttttccgaagccgacagaacggctcgccacgtactttatgcagatgaggcttgcctgataggtccggcagcatctcgcgaaagttatctgaacatagataaaattatcatggctgcaaaacgtcatggagtagatgctattcatccgggatatggcttcttgtctgaaaattcagaatttgcacgccgttgccgtcaggaaggtatcatttttattggtccggatcctgaaacgatggatgcgatgggtgacaagatttctgcccgtaaacacatgattgcagctggagtgccggtcgttccgggtacagaacagccgttgcagagtgtagaagaggctaaggaaatctgtaacaaaatcggttatccggtcatgctgaaagcttctatgggaggcggtggtaaaggtatgcgtctgattcatagcgaagatgaagtggaagaagcatacaatacagcccgttctgaatctatgtcttcttttggtgacgataccgtttatctggagaaatttgtggaagaaccgcatcatatcgaattccagattttaggagataatttcggaaatgccgtacacttgtttgaacgcgaatgttctatccagcgtcgtaaccagaaaatcgtagaagaaactccttctcctttcgtaactcctgaattgcgtcagaaaatgggtgaggcagctgtggctgcggctaaggctgtacactataaaggagccggtacgattgaattcctggtcgacaagcaccgcaatttctacttcctggaaatgaatacccgtttgcaggtagaacatcctattacagaagaagtagtgggtgtagacttggtaaaagaacagcttcgtgtagccaataacgagccgttgcacttcaagcaggaagatttgaaacagcgcggacatgccatcgaatgccgtatctgtgcagaagattcagaaaacaacttcatgccttcaccgggtgttatccgtcagctgatggaaccgaatggtatcggtgtgcgtatcgatagctatgtgtatgaaagctacgaaattcctatctattatgacccgatgattggtaaactgattgtatgggctactactcgtgaattcgccatcgaacgtatgcgccgcgtgttgtacgaatacaagattaccggtttgaagaccaatatcggttacctgcgtcacatcatgaacgtgcccgattttgtagaaggacattacaacacattgttcatcccgaaacatcaggacatgctgcgtgagtgggccggacagaaagaagaggaaactgaaaacatcgccatgattgcggcttacattgactacctgatgaacctggaagaaaacaagtcagcatcaagcgacaaccgtcctatcagccgctggcgtgagtttggcctgaaaaaaggtgtgctgagaatctaagtattttgaattaaagtagaagattatggaaatacatataggagacagagttgcggatgtgacattggtcagcaaagaaggcaacaaggtacagttgaccattgacggagttccatacgatgtagacatcgtgatggccgaaaatggtagctgctccattctgcacgaaggaaagtcgtacaatgccgaactgattcgtaaggaaggtggaaagagctatactgtaaatgcacattatcagtcatataacattgacatcatcgattcacaggctaaatacctgcgcatgcgcaagggtggtgacgagaaacagcaggataagattgtttctccgatgccgggtaaggtagtcaagattccggtgaaagcaggcgaccgtctgcaggctggtgatatcgtagtagtgattgaagctatgaagatgcagagcaactacaaggtaaacagcgaatgcgtagtgaaggaaatcctggtaaacgaaggagattctgtcaacagcaatcaggtgataatgactttggatgtaattaaagaagacgaacaatgacaacagcagaacaatataagaaatttgaggagctggataagcttgcttctcagggtggtggcgtagaacgcgtggaaagacagcacgccaacggtcacatgacagcccgcgaacgtatcgacatgttgcttgataagggtacgttcaatgaaatggacaagttcgtaatccatcactgtacagacttcggaatggataagaatcacattccgggtgacggtatcgtatgtggttacggtaagattgacggacgtctggtgtacgtatatgcatacgacttcaccgtatacggcggtacactgagtgcgacaggtgcacagaagattgtgaaagtgcaggaactggcattgaagaacggtgctccggtgattgccttgaacgactcaggtggtgcacgtattcaggaaggtgtaggcagtatctcaggttacgcttctatcttctaccagaataccatcgcttcaggtgtgattccgcagatttcggccatcttaggtccttgtgcaggtggtgcctgctactctccggcactgaccgacttcatcttcatggtgaaagaaaagagccacatgttcatcactggtccggacgtagtgaaggccgtgacacacgaagaagtggacaaggaagaactgggtggtgcttatacccacagcagcaagagcggtgtaactcacttcctttgcgatactgaagaagaaactttgatgagtatccgtgaactgttgagcttccttccatctaataacatggaagatgcgccgatgattccttgcactgacgacatccgccgtgcagaagaatcactgatgacagtcattccggatgatccgaacatgccgtacgacatcaagaacatcatcgaaccggtagtcgacaaccactacttctttgaagtgatgcctcactttgccaagaacatcgtggtaggatttgctcgcctgggcggacgttctgtaggtatcgtagccaaccagcctgcttacctggccggtgtgctcgacatcgatgcttctgacaaggcttctcgctttatccgtttctgcgactgcttcaatattcctatcgttactttcgaagacgtaccgggcttcttgccgggatgcacacaggaacacaacggtatcatccgtcacggagcgaagattgtgtatgcgtacgcagaagctacagtgcctaagattaccgtaattacccgtaaggcttacggtggtgcttacatcgtaatgaacagtaagcctatcggtgccgatgtaaacttctcttacccgacagccgaaatcgccgtaatgggtgccgacggtgctgtaaacatcctgtaccgcaaggctactccggaagaaaaagcgaaggcagtagaagaatacaaggaaaaattctctaatccttatcgtgcagccgaacagggttacatcgatgaaatcatccttccgaaggatactcgctataaactgattcaggcattggaaatgactcagaacaagagccagagcaatccgccgaagaaacacggtaacatgccgctgtaatcaggtagcaattgtatagataataaataagaagaagcgaagaattccgccggtcatacgtgaggagttcttcgctttcttgtatcgtgttcacattagattctttttatatgaaggaagcatttataaaactgcatctttccattctcatcgccggaggaacggggattttcggaaaactgatttccctgaatgaaggtctgcttgtgtggtaccgtatgatgttcgcctccgtaatgtttttcttgctgctttcgtttctgaaaaagctgcggaaagtgaccttgggcgatgtaaccaagattggctctgtaggattgctgttggccttgcactggatatttttctatggaagtatcaaagcctccaatgtatccatcggcgtggtttgtctttcgctgatgagcatctttaccgccatctttgagcccctcatcaatcgtcaccgcatttctttgcgggagattctgttcagtctggtggccgtgctgggcattgtgctgatattccattttgacacccgctaccgggtgggtatctgtatgggagtcatttcgtcggctttagcttctctgtttaccatcgtcaacaagaaggtagccgtgaactacacctccagcaccatgctgctttacgagatgctgggtggtttcttagggctctcctgcatcctgccggcttatttgcattacttcccggtgccctctattcttcccggcgcccaggatttgatttacctgctttgcctggcttcggtatgcaccgtggaactttatattcttcagattcaggtactgaaagtcatatccgcctttacggtcaacttgagctataacctggagcctatatacagcatcatcggcgccatgctgatatttcaggaagccaaagacctgaacttcagtttctacttaggactaggactgattgtcctgtcggtcgtactccagaccctcaatgtgttgtcgcagcatcataagtttattccttcattgtatgtaaaatggaaacgttaaagaaccgtatcgtgaaactgctggacaccctgaacgagcgggtgtacggcaaagaagaagtcatggctctggcgctgctttcggctgtggcaggagagagcatcttcctgttaggccctccgggagtggccaagagtatggtagcccgccggttgaaactgatgttccgtggaggaacggctttcgaatacctcatgtcgcggttcagtacccccgatgaaatattcggtcccgtatccattgcccggttgaaaaacgaagacacctacgaacgcatgaccgaaggctatctgcccaccgctaccgtcgtcttcctggatgaaatctggaaagccggtcccgccatacagaatgcccttctgaccgttatcaatgagaaaatcttccgtaacggacagttttcggtacgagtccccatgaaaggactgattgccgcatcgaacgaacttccgacttcaggacaaggactggaggcactgtacgaccgcttcctggtgcgtaagctggtgggcggtattgaagacctgtccgatttcgaccggatgatttccactgccgacgaaagcgagccggaaatggacgaaagcctggctgtgagcgacgaagaatacagccagtggcaggaacagatgaaatccgtcggcctgcactattccgtgctggaagtcatccattcccttaaagacaagctggaagattataaccgccagctggagaatgccgattcacccttctctgtagcactctacgtgtccgaccgtcgctggaagaaaattgtccgtctgctgcgggcctctgcctttctgcaaggaaacaccgaggtacgcctgtccgactgcctgctgatggtacactgcctgtggaacgagaccagccagatagactgggtacgcgatgccgtactgacggcagtaggcgagagcgtgcgtggctacgtgctgaacctgtcgggcattgaaaccgatttgcaggccttgaagaaagaactcgactcggcaggagccttgcgcgaacgggccgatgccggactgcaactggtcgatgcatactactatcaggtggggcgcgtacgcctggccggacgactgctcctttttgcatccgactaccagcagttggacgacgtcggcaaacagttctatctgcataaagacaaatacaagaccgattgctatgtactgaagaaatacgacccctccatgcgcaacaaggtatccccatccaaagtctataccctgcgccgtggccgtcgttcagtatttatcaacgactatgaatatcccttgctgtgcactcccgactgtgcgtcgctgcccgccatggaagtacaggcgcaggaagatatccccgcacgcttcagccagctggaacaacggctcagccatgcagaagcccattgtggcgactgggtgaaagaagaagccgactactgcgcaaaccacctgtttgtcgggaaaagagagaaagaagccatgagccggatactgggcgaaccgtcgaaagccctgttccgctatcggaacgagttggaggaaatgaaacatgcataccggaaagagaacgaggaatatccgtctgaaagacctgaaaacagcctatttggagcaacttcgtgagcgaagccgggcgcggatggaagaataccttcagcaccacaccgtgttggaaagtgaactggaagagtgcatctgggaatattatcgccagacggccccttccttgcaggaattctattcgcgctacacccctgaatgggaagtcttctacgagcacgaaaccctgccgccgaccgatttcctgatatttttgaaacgaatggaaacagccttccgcaaacgctacaccctggccgaactcgacgtatcctattacatcagtcgcctttcccggcttcccgagcggagcgaagaacgggcagccttgcaggaactcttcctcgacaagtggcaccatctgctcacggtcaaggaatacgactatcagtatcagcacctcttccgtctgtgcgaaggatttcagattctggataaatcgtttggtctgaaaacggaaggcgacatcctgggttcgcgtgtgaagtggctgttgcggaaccatccggaactctaccataaagtagtcccctacgaaaaagccatggagcagaaccgccagatacgtgagctggtgcgctgcctggggaagaacgtgggtggacggaaagaatgtttcgattccttgtctggacttcaggccgacagtctgattcgtcatgccacccagagcgatgtagaaggtgtgaccttgggcgatgaccttaacagtctgctgcctgtggaatactgctacctcaccgacgaagtactacatcccttcttcatgcaacgttatgtggagaaacgcctgcagcagtttgattctttttcgcatgaagacacatccaatccctcaccggaaaaaaagaaagtcagttcacaggggccttatatcatttgtgtagatacctccggctccatgagagaagagcgtgaacggctggccaaatcggccgtgctggccattgcccgcctgacggaggccactttgcggaaatgttatgtcatcaatttttcggaggatatacaaaccttgctgattcgtgacctgaaaaccgatttcccgatgttagtggatttcctgcaacgtcgtttcgatggaggaaccgatgcgcgtccggctttttccgaagccctgatgatgctgcgcacccacggctggcaacgtgccgacgtggtgatgatttccgatttcgagatgccccctcccgatgacgcgttgctggccgacattcaccgtgcccgtttgcggggtacttccttctatgcgctggtgttcggttctcatccggaaacggactacctttatgagtgcgaaaagtactggggtatgtattagtttgaaaaatcatcttgcttttattttgcaaatattgttgagtaaaagatttgaaatgcggaattctgctttctttttgagtagctgaatttcgcattttttcttgtcgtagattttgctacccctctcagaagccttctggaaggggtagcttttgtgtaaaaatgaaggtttgagcgaatttaggtaatcaaacacgagaaaatctgtgtgaaaagcgagatttcgggcgaaaatgccgaggagtttggaagaaaaacctaaagagcttttgggaaaactcttttacgtttggaggaaaacgcaagtgcgtttgaattcaaatgtacttgcgttttggaaaatgcgtttctgagtcttttgagaggggatggagagtgaagacttttgaggactttcgctgctggaatgagataaattatggataaaatgaaagtttctttttgttttttgtatatctgaatttggtagttctatattgtgtaattgattgttttgtgtgataatgtttgtatattggttgattttgtgttctttggaaattgtaagtaggcatcttgttgcaaaaaatgagataacgggattccgggttgctaaattacagaattctgatgtggaagagtgtgatttgacattttgttatattgatatttttgattaagtattgggacgaaagattaaagttctcatggctatgagatagaatactccttcgatgattaaccttatatacctgatattttggggtgattttaattatattgttgattatatttgtataatgttgataaacatataattatttgttgatatttatattgtaattcataaatttgtaaaccaaatatataaaaaggttatgaattacacaatttcaatatggctgaagaatgtgaggagaatgcgtggatttactcttgaagaagtaagtcaacgtctgaatggaatggttacaaagcaagctatatctaaatatgaaagagggttgatgaaaccttctcctgtagtcatggatgctttgtgcaagctctatcaggcctttccggattttcttttgggacggaaacccgttgttgcttctgatatatcttttcgtagtaaagagcctgtacctcaaaaggtgaaacagcgcattatttctgaagtgcagatatggatgggacattatttggctttggagaatctttttgatgctatgacaagttttaaaaatcctgttccaggtctgggtataacatgttttgatgatatggaaaacgtggcaatacaggtcaggcgtaaatggggacttggtaatgatgctatcgcatctgtatgtaggatgcttgaattggccggggtaaaagtacttgaacttgatatagaggaagatgtagatggattatgtggatggataaataaaaagactccatttatcgtactgaagaaaaataatgtaacagtggagcgtaagaggtttactgcattgcatgaacttgcacatatcttgtttccattgcttgagagtatggattataataagaaagagaggatgtgtcatagatttgcatctgctattttattgcctaaagaagtggtatatacttatgtaggtcaaattcgtgataatctttctgtttctgaactgtcatcattgcgtactatgtatggagtatcggtggctgcaattgtgcatcgtttaagggatttgtctgtaatcagccttgattattataatcatatttttgatgatagaatcaagtataatttgcttgaagagggatggggagcttatcctttagttgatgaagctatgaaatatgcatcgcttgtaaatagagctgtgattgaggggtatatggaagataatggacaggtgcatattgatgagaaatacaaaatagatttgggtgagattgaaataatgtaacttaacaatataaattatggaaacattttctggatttacaaatttgtatcctttgtcaaagacattgcggtttagattgattcctgtaggggaaacattgaaacattttattgatagtggaatattggaagaagaccagcatagggctgagagttatgtgaaggtaaaggctattattgatgactatcatagagcttatattgagaattctttatcaggctttgaattacctttggaaagtacaggtaaattcaattctttggaggaatattatttgtatcataatattcgaaataaaacggaagaaattcagaacttgtcatccaaggtcagaactaatctgaggaaacaagtcgtgactcaattaacaaagaacgaaatatttaaaagaattgataaaaaagagctgattcagagtgatttgattgactttgttaaaaatgagcctgatgcaaatgagaaaatagcactaatctcagaatttcgtaattttactgtatacttcaaaggttttcatgaaaaccgtagaaatatgtattcagatgaagaaaagtccacgtctatagcctttcgtctgattcatgagaatcttcccaagtttattgataatatggaagtgtttgcaaaaatacagaatacttctatctcggagaattttgatgctatacagaaagaactttgcacggagttggtaaccctttgtgaaatgtttaagttggggtattttaataagactttaagtcagaaacaaatagatgcttataatactgttataggtggtaaaaccacatcagaaggtaaaaagattaaaggtcttaatgaatatattaatctttataaccagcagcataagcaagagaaattacccaagatgaagcttcttttcaagcagatacttagtgatagagaaagtgcgtcatggctgccagagaagtttgaaaatgatagtcaggttgtcggtgcaatggtgaatttctggaatactattcatgatacagttcttgcagaaggaggattgaaaacgattattgcttcattgggtagttatggccttgaaggtattttcctaaagaatgatttacaacttactgatatatcacaaaaggcaacaggtagttggagtaaaatatcttctgagataaagcaaaaaatagaggtgatgaatcctcaaaagaaaaaagagtcttatgagagttatcaagaacgtatagataagctattcaagtcttataaaagtttttctttagcttttataaatgagtgccttcgtggtgagtataagattgaagattattttctcaagttaggggctgtgaatagcagttcgttacagaaagaaaatcatttttcgcatattctcaatacctatacagatgtgaaagaggtgattggcttttactctgaatcgactgacactaaattaatacgagataatggttccattcaaaagataaaactgtttcttgatgcggtgaaagacttacaggcttatgtaaaaccattattgggtaatggtgatgaaaccggtaaggatgaaaggttttatggcgatttgattgagtattggagtctgcttgacttgattactcctttatataatatggttcgtaattatgtcactcagaagccgtattctgtagataaaataaaacttaatttcaggaatcctactttattagacggatgggatcttaatcgagaaacagctaatacctctgtgatattgcgtcgtgatggcaaatattatctggccataatgaataataaatccagaaaagtctttttgaaatatccattagggacaggtaaagattgttatgaaaagatggagtataagcttataccaggtgcttataaaatgttaccaaaggctttttttgctaaatcaaaaataaataagtttatgccagacgagcatttattgtcaaattataaaaaaggaacacataaaaaaaataatgctaattttgatttagatgattgtcatactttgattgatttttttaagaaatctttaaataaacatgaagattggaagaattttgactttaagttttctgatacttctacttatacagatataaataatttttataaagaaattgataaccaggcgtataaattatcatttagaccggttccttcagattttgttgataaacttgttgaagaaggtaaaatttttctgttttggatttataataaggacttttctgggcatagcaaaggtacgcccaatatgcatactttatattggagaatgttatttgatgagagaaatttagaggatgtggtgtacagtcttaatggaggagctgaagtctttttccgtaaagcaagtataaatgtatcacatccaactcatccggctaacatacccataaagaaaaagaatcttaaacataaagatgaagaaaggattcttaaatatgacttgattaaagataagcgttataccgtcgaccagttccagtttcatgtgccaataaccatgaatttcaaggcggatggaaatggaaatataaaccagaaagcgatagactatttatgttcggcatcagatactcatataatagggattgaccgtggtgaacgaaacttgttatatcttgtagtgattgatggaaatggaaaaatctgtgagcaattctctttaaatgaaatagaagttgaatataatggtgaaaactattcaacaaattaccatgatttgcttaatgtcaaggagaatgaaagaaagcaagcaagacagagttggcaaagtatagctaacataaaagacttgaaagaaggctatttaagtcaggttattcataagatttctgaattgatggtcaaatataatgcgattgtggtgcttgaggatttgaatgctggatttatgcgtggccgacaaaaggttgaaaagcaggtttatcagaaatttgaaaagaaactcattgagaagttaaattatctcgtattcaagaaacagtcttctgatttgcctggtgggcttatgcatgcttatcagttagctaataaatttgagagttttaatactttaggtaaacaaagcggatttctcttttatatccccgcctggaataccagtaaaatggatccggtaacaggttttgtaaatttgtttgatgtgaagtatgaaagtgttgataaggcaaaaagttttttcagtaagttcgattctatgaggtataatgtggaaagagatatgtttgaatggaaattcaattatggtgaattcacgaaaaaagccgaaggaactaaaactgattggactgtttgttcctacggtaatagaattatcacctttagaaatccggataaaaattctcaatgggataataaagaaataaatcttaccgaaaatattaagctgctgtttgaaaggtttggcatcgacttatcttcaaatctgaaagatgagataatgcaacgtacagaaaaagaattctttatcgaacttatatccctatttaagcttgtgctacagatgcgtaatagttggacaggtactgatatagattatctggtatcacctgtatgcaatgaaaacggtgaatttttcgatagcagaaacgtagatgaaacacttccgcaaaatgcggacgcaaacggagcatataacattgcaagaaaaggaatgatacttcttgataagattaagaaaagtaacggtgagaagaagcttgctctatctataactaatagagaatggctttcatttgctcaaggttgttgcaaaaaatggatgattacatagctatatcattactgaatgactttatcttttgtccgtattccatatacctgcataatgtgtatatggaatcggatgaaagtcagtatcatgctgttccccaaacaatggggcgtattgctcataaaacggttgatgaaaagaaaacaactaatgggaagggtgatttggtttctgtctccgtttgttcggatgagttcagactttttggaaaaatagatttgtatcgatattcttctaaaactcttattgaaagaaagtatcaactgaaaaatatatttcgtggacaaatatatcagctatgggcacaatattattgcttgtgcgaaatggggatgaaggttgagaaacttgctttttatgaaatatctacgaacaaaatgattccagtaccgttgcctggagctaatgatcgggaagagtttgtaagttttctatgtatggtaaggaaatataatccatcttctgatataaatattaatacaaataaatgtcggcattgtatatactgtaatctttgtgacaaaaatagaatagaaaatgtatacatttaaagatcttgatgtcaaaaccgtttttgtgattaattgtattgagcatgaaagaagtcttagggtcatgaatggtgaattgctacttgaagagaaaaacggtgagaaaaataaaacattgactaagataccttttcagaaattattagcgttatttgttattggacatttaacggttactacacctttactggaaaaatgtaagaaatataatgtagctcttgctgtggtgaaacctaatttgcgtcctgtattttattgggcagattatgccgaagcaaatttccttttgagaaagaagcaatatgaatgctctgataatgatataactattgctaagcatatagtttgcaataaaattaaaaatcagctgacagcattgaataaaacaaggaaaaaagatgatttgacaatatttgccgttgatacatgtaaagctgctattgacagtatatgtgatatttcggactataataaattgctgggattggaagggctggtttcaaaaacattcttcaaagcatattataatgctctcgggtggaataaaagattgccaagaacgaaaatggatatacttaatgtaacattagatataggatattctattttgttcaatttcatagagtgttttgtaaggatgtttggttttgatttgtataaaggagtatatcatagatcttggtttaagcgtaaatctttggtttgcgatttgatggaaccattcaggtgtattatagatcataccatattattggcttttaatcgaaatcagtttaaaaaatccgattttgtattattgaagtcagaatatcatttgaagaatgaatgttgtggtgaatattataaattattttattctactcttattagctataaaatggatgtgttcagatacatacaatcttattatcgattttttatgcagagaaaatcagaaacagagttccctttatttaaatattaatggtaatagttagttatgacatatcggatgaccttatccgctctcggtttcagagaatgctgactaaaaatggtgcaattcgtttgcaatattcagtttatgaggttgttaatacaaagagggtgattgagaatataaaattaaagattgtcgcgtattccaaacattttagtgcagatgatagtgtggtcatttttgagataaataatgataccttggtaaaatacgggaatgctattcatcgcgatactgatatagttttcttctaataattataggcattacaaacctaagtcttctatatcaataacatggtttgtaatatgctgatttacaattcgtctattgaattctatagattaaggtggggaaatattccgataaaaatataggcttatttatttgattattaataaaaaatatggatatttgcacagtaagagtctatatgactaagtaatttctactatgtgtagatgtatccaccgcctacgccatctactaccgtctatatgactaagtaatttctactatgtgtagat

SEQ ID NO: 3784 - DNA, 77398 bp, Unknown
  gut microbiota DNA sequence
aagtgaacgggtatgcttcggaatatgtattaatgctaatggttagaaaagagcatagtcagatgctttctttcgttgttaccaacctattaaatctttattatattattttcagccaatgccgatgtgttatcatgaaataaagcaatacagctaaaaatgggtaaaccatccaagagataatgaacgataaacgttggcttttaaacaataaaggtttttctcgtattatctcaattccctttccctttcttacataatatctattaaaaaaataatatagaatataaaatattggaacaaagaaaataaacggcaaatcataattgaaattctcttttatcaatggataaatcaatgcaattatcggtagaaataatattccacagaatagtaatattgttctctcatgtggatcttccaacttaaatttatccctattgtatataaagaactgataatacatcgcatcaaaaaagaatttaatcataaagaattattagttttgttagtgatatttttaccataattcttctgcagagaaatcgcctaagaagaaatatagcaacataattatttgcaacaaaatatacagacctgtcacaaagcatattgttagtattattattttctttacacctttatatttcttctttcttaataaaaagagtagcaacagtgaaaccgctataagtatcatatttattacacatgctatcatatctattttatattttggatttataatgatattgtcaccactaataatctgataataaacgacataagacgtcatcttttctcattaataatatatttataactccttaaaagttatatcatccggtacacctaattctttccgcttgacttcaaaatcctttttactgaatgccccaaacttattttcttgtgcttcccatgctttttgtgtgttgtttacgggaataatataatattcggttgtatccttatcataacggggtaaggaaatgcccatgctgtccttaaaagcacgatatgccttgacaagaataaaattatcatcatatcccactgcataaacactggctcccgttattcccgtatagggtgaatcatttttctgatgataacacacatccatatcctccttggtatctaccgctatcaggtaatagtttcctgtaagatgccgttcatatacgaacccgcagctttgcattatgagtaacagtaaaaaaagcaatgatatgactgttttcatacgttcaattattattaatagttcagcaaggaacgctgtcaaacgttatcccggtttgttagtaatatattctatcgcactcgcttcaaatccccgataaattggagtgacatttctatatacggaatagcttttagaattttgatactatcgattgattctataccacccgatgccaatgctggaacgtatccgtaacattcatccaatgcaggaacacccttttctgattttatcataggatatttatttaaggaaaaccatgattccaaacaacttttgttgaaaattaccacattcaatagtatatcaacattctcggataaaatcttgaatgttccgtatcttacattgatgaatacgacataatttcctatcacgggattcttaacataagcaaaaatatctccaaaaacagttgtcataaatggagttgctgtttcatattcatacaaaggataactatcatctactattgtcttatatttatcggggttaataattctgaacaatccatcacaaaacgttccaagtccaacttctttccaaagttcgattatttgttccgataccgcattagcatattttgcaataaaagtatcatctatcgtttggcgagtgctgtttaggctcttatctaaaaacttatcgtacatattaattgctttctttattactaatggtttggtgagaaacagcgttagctgttatctcgaccttgttagatatatttaaggaatcttgggagataaacagtattcttgaagccattcttcttccaattctttagcgattccatactttgaatactcatcttcataaccttcatgccacatataatagtgagaaccttcatttgcgagaaatatttcttctgctcgtgcaatagtgctacaataagaaatataaagaggaaaaatagaagcaaacatacttatatcttcaaagggagagtaaagaactgattcggtatcagttatgacaaataaagttatatctctattcttatccttactgcaaatacagacttcaccttgattaacctgtggtaaatcacatttctctttaagatataaatagaaagactggatatttgaaatgtactctggtatttcaatatccatctttttaataacgtcctttatactcactattatattaactgtatatcgcatgaatcaattatatctaatggttcagcagggaacggcttgccgttatcctgctttgttagtgaaatattctttctgctattattttgtcagaataaaccttaaagttataccaagacaagccatagacatactataagatagtatataccatataaatagtttccaaaatttctgtttcctgaatttcttgaaataagaaacatatttatcgttcctatctataaaaacatgataagtaaaatatatcattatacaaagaataattattagtaatcccaataccattttgttattgaaaaaatcatattcttctatatctgtttttatagctatagcatccagtattgtaagtaagttaatcagtattgtaaacgagttaatgcaaataaataaaataattcctgtgtctgccatactaagaatcttaaccggcggtttctttttattttctgaaaaccacatcgatttattatacatctgcttaaagttgtttacatatttccagtaaccattgcttttgcagaactttcgtgtacatacattgtccaatatagagaaaacaagccaatcaagacctttttgtaccttatgaaaaatcatataattacaatagtatagcatattcataaacaattctatccgtttcatcttaatatgttttcgctaatggtttggtgagaaacagcgttagctgttatctcaaccttgttatgaacttattttattataaaagattaatatggcatataaaatttatctgccataaacagcaatacaattagaataataaacggtaatattaaaaatagaatagcccatatattggaatatttctcatacgattcgtcctctcgaattttcaaataccgtcgtttataatgataatagacatacagaataatccatataagaggaaaggcaagcagaaaaagtgatcccggattaacacttgtagctgcccaataaatcaaagctatatctactccgtaaaatattattacggtacttaacacacttggaacatgccaagaatacatacttgtatctgaatgtcgggtgaagtactccgtcttataccataaatatcctaatattctatgtatcatatattgctactgtttataatggttagaaaggagcatcgtcagatgctatctttcgttgttactaacttatttataaacttcaatccagtgaataaacaccaaatcccccaaagaggataaataatgccgcataatactgcaagcatattcaatcctcgttcatctcccgtgaaaccatctaaattgacagcttgcaatatgaagtttgtaatttgccaatctaatagactttggtctatacagataaaggcaagccacaaaatgacagagcaacattccaagcccagcaataacattatcactttaggctgcattgcatatagtttatagaccttgtagattagcaatacatctgtaataataagtaaacctaaaaggcaatattccataataccatatatctcgaacagacgactaaaacctaagccaccacaaaataatgttatggctatcagtaaagcactgaaagcagtcaatgatactatggattggacggttttattcatcgttctattgttagtaatggttcagcagggaacggcttgccgttatcctgcttcgttatcaacctattctatattcaccatttatctgcaatttcaaattcgccgattgtttgggtacaaatgtcaatgtacggaatagtcttaactatcttgatgttttcaatgtcttcacttcctcccaaagccaatagtagagaatatccgaaacactcatcataatctggagttccgagtttttcttgtattacaggataattttctaaatcaaaccagcctttcaaaaaactttcatttaccattaccttattaaaaatcgcacgaagattggcaggaagtattaaatatgttccgtatctgacattcagataaacgacgtaattattcagtctcggattctttacataggcaaagagatcgccgaaagccgtacacatgaatggtagaaatgattggtcatcctccttttcaaaacaggagtttatcacatcctgataatcggacggattaatgagcttaaacagcccattacaataacttcccaacccgacctcctgccataaagtattcagttcgggataagacaaatcagcatatttagcaataaaagtatcatctactgcttgcctcttactattgaggcttttttctaaaaattcttcgtacatatttctacgttttatggttgataatggttagaaaggagcatcgccagatgctatctttcgttttaaatatttattatcttttcctacttgagcgtatagaacaaaaattgcctttatgattcgattattacagttaaatggaacataagtcaccttactgtcaatacttaacgtatcacttggatacttcaaacaagaatgttcattttgtagcaaaacttccatttttgaaaagtccacagaactgtatatcggatagaaaccggaaaaacaagtaggcgttatataagcaatttgactttcataatcaaaaaacaaaaaacgatttccgtctgctacattatcgtacacagcaaagctatcaaactttcttacacccatgattgtatagctttgtatgaagtcaatactactatcatctaccgctttcaactcaaaaacaacattctttttaccttgctgattaaaacataacctatatagaatttcagattctgttttttccgtttctatataaagggaatcttgttcagccaaagaatgatattttgcagaactttgttccatacagccattttccgctatgacatagctaagtggaaaaaggagcaagcaatatagtataaatattctcatatctgttatatctaatgatttgcttgaggaacagcattaagctgttatctcaacctagttagcaaaatattatacccattctaatattgggttaggtctatgaacaagatactgtctgttacccggaattgaaaacattattccagtaatgtaatttcatactaaaattcttctttactttccaattccaccttccctctggagtaaaatgcaatggcagccctcaactcccgatggttacagaaataatcatccagaaggattgtctcgttgtagttctggttagtacggagaaacagttctacatgcgtatatctaccatacactaccacatatcggcaatacaagattttattccaaagcaacagctttcttttgggagtagtgattccctgttcactgattcggatgacatggtgccaatgccggatacccttcaccaaaaaataaaaaaataggcctacgggaatcccaaaaaccagtctttcggacagcatgtcccaacagagccatatataagcgatacacaacccggcttccacaaatgtactgattttcttccgtggaatgaccaaaggttcagaaagattgaacggataacgcataccaatcatcatttaaatcattgttctatcattttaaggtaatcaatcattcctaatatatcattttgaatataggtaaagtcgtaatgtagagcataatagttggtatctgccttattcctttttttaggcatataaacatctacattaaaaaaacgatgttcgggtaaagaacaaagttctatgatatttttaaccttttcggatatgcactgttctctttgatatattctctcaaggagaatttcggctgcttttttccaatagttctttctatactcagcagaacttgtgtcctctatttctaatacaaagtattctttgttcatagactttctgtttttgttaatggtttgggtgagagacaacgttaagttgttttttgttataaacttatcttattcctttcaactcctctttcattttctcttttaggtagaagaacaacaaaacatgccaacacaagtcaaaggagaatacggcttcttcctttctccctaatgcctgatagaacttacatacattccgatatgccataaaaacaaatacaagatagataggcgccagcatacaaagacttaacaccaagacacagacagctatcagtgaatttctacaataagctttgtattgtatcaatgcttcttcgtaatcggaattttcccaataaccgaatgttttcaaatcctcaacgctccagcctctttcttccaataaattaatagcataatcacgaatttcatcatcatagccgtaacgcttataatttttcacaacatctattagcttatcattgtcaaatctctttagaatatcaaaatcttccataaaaatttgttttattgtttataatggtttagtggggaacgcagtcaagcgttatcccggtttgttaataacttttttctatttaacaaatacgaaacatttgtaaataagaataagtaaaaaagaatcccctgacaaacaacccataatactataaaatcatctattggtggaggtataagagaatcatatggaggttccggatgaccactacataatttattcagctcctgcatcttaaagtaatgtctaaacgaccatgctaaaaaaataaatattataaattgtgaagatattctgaagttgagcttatgtaaagacaaatcgtaaatcagatatgcaagaacacctgcaaaaagtaaagctgcctgtaaaaaaggagcaaagtccatgcctccacctgtatcagatggacttacaatccacaccaataacaataatagtactcccaatactaaaaagtagatgatgtgaggtaaataagtcaatattcttatcttcatgtttcgttctattgttattaatggtttggtgagcaacagcgtttagctgttatctcgaccttgttaacgattttatttcacaatcataaactcattcccatatggataaaagcctttatttatccatagtttggagtagtctgataatttgtaaatttcaggtttatacagattcaacaccttatccaaaactctctctcggaatattattccatctccatattctatgctattcaaaacaaagaaattctgtttgatggaattgtctttcagtttcatatcaggatatactgtaaaactaattcctaattttttctctacatcattttgaaatgttatgccttttcctaaatggaaagaatcattgtcaaaatgatttatacgtaaagcatagtattttttatccgttagagattcgtttttcttgtttactaccttgacggtagcaatatcatatttatcaacgaacccattttcttgaagtaaagacaaaaactcttccgatacgattttgagttttatgctgtatttatcaagaaaatcaaattgcagaattcccggttttttgttgcatacgaggtataagacaggaggtaaattttctctccatccatccttgtttttccacatccattgcccgtggtattggaatttctgccttttaccttcatcgtaagtatcacagacatcagatttgccgtactccaataatcctttaggcagtttatctttcccatatcgccaaatataaagttcttctatattcataattattatcgttaatggctagcagggaacggcttgccgttaccctgcattgttaccaacttatttcaatctcaaaatttatctgagtctttgaatctgccgattgtttgtgtacttatatctatataaggaagtgtcttgacaatcctgacattttctatactttcacttccgcccaatgccagcagtggagaatatccgaaacactcgtcatagcccggagttcctattacttcttgaattacaggataattttctaaatcaaaccaacctttcaagatacttttgttaaagattattttacccaacaataatacgagattatccggaagaattaaatatgttccgtatcttacattcaaataaacaatgtaatttttcaatcttgaattttttacataggcaaagacatcaccgaaagccgtacacatgaatggcagaaacgatttgtcatagtccataatataacaagagtttagtacatcttggtaatctgacggattaatgattttaagcattccatcacaatagctgcccagtccaacttcttgccatagagtagtcagttccggataagacaaatcggcgtatttagaaataaaggcatcatcaactgtttgcctgatactattgatgttcttttctaaaaaaatctcgtacatacatttatttactttatagttgataatggctagacaagaagctgcgtttagcagctaacttggcatattaataataaataacgatataactgttttcatacgctctatcattaaccggcctttccaacacacaggattattaaaccataattcctattcttcccattccatctccagttttccattgatgtcatagcgtttccatcgtccggtgcgatgaccattgcgatatgtacctatttctcttactttatcgttctttacatatcgtgactcaaaaggaccagtctgtcgaccattgacgtatgtacttatttcccaataatcgaaacggttatcgcgtaccaatgattttgctttaccgttaagacgtccgaactggtaggttgcctcataaataagttctccagtttcagggtcgtattctctataaaatccgtcataacggttattctttttgtaaaattcctttactcgtgatccggtcgctctgtcgaaacgaacctgaagtccttcttcgtttccgttattgtaagtcgttatatgaagcgtatctccactttctgctatctgtatccaggtaccatccttttgaccattattgtaatggccgatagtacgaggctgaccgaacaagtaaagttgctcaaagtcaccatcaagcagtccttgttcattgtaataggatgtttctttcagttcgaatgtaccctttatgtatgaatattgtttgccaatctgtttcccattcttatagttatgttccctccgcagagttccgtcaaattcataatacaaatccttcccatcctgttttccttctttgtagaaacgctccatttccagcttgccgtttgtatagaatgtacgatgtgccccatcaagttttccgtccttgtaggatttttcttctgtcactctgccttcatcatcaaatttcttgaagattccattcttccatccctctttgtatgaacctttggctttcagcttattgtatacatattcctcataatcaccattgtagagaccatccttgaacccggcaagaatgtaagcagaatgataaccgtcaatgatacgatgttcgccattgagaggtttattgccagatatatctctgtgaagaatacgcccgtctcccaaattgattacagtgacacaatctatagagtattctttctgtgcatttagtgatgatacacacagcatggttgccagaagcagcagataatagtttattcgtttcatgtcatttgtttttaaagttgattttattctttaaaccctttaatatcaatcaccgctttcatttgaaacgggtgtgccatccttgttcaaccacacctgcacatatccttcatccggacctttcagcttgtactctaagagaatggaatagtcaagtcctaagacaatggtttcaagcgctccttcctgattttctgtagtacgatgtgcagcccagcgtccgtcatccagtgcatctttcaccattaccagccagtcggcctgtagtttagaaagccccgcctcgttcatcttgaacactacttctaccttgccatgctgcgtctgatagttgaagcggcaatagggtgaattctttacataatcagtaaccagtccgggggtaaatatccgatggaaacgagcaagaccttccggattgactgtcagacaggaaatggtacatctcttatcgtcagcctcttcatccagcccgttaagcaggtcgcggtctgcatccggatttatccagtggaactccatctgttcaagtgaggctcccagctctatctcccggcccaatgtcaggaactcataatcgcccggttcaagtgaaagcccctgctttacggcttccagcgcgcctttcttatcgccgaaataataacggagttttcctacctgaagccatatccagggataatcgggctcttcctttgctccttgctcggcatatttcagggcctcttccaaccgactgcaatacatcagcgcacaagagtaacgataataccatgtggcacatcctttagcattcttttccgaatcgggcatccactgcatggcacggtaataatattcataagaggtcaggttgatacagctatacgaataccacaaggctatctggaggtcagcccgggcctgttcttctgtaaaacggccttccttgacacctttccttacaaaatctacaatgtagctgaacatttttccgaaataaccggtggccccttcatgaaaagcttccagcgcacgaaggtcttctgccgagagcagggaaccggtgtccggatgtatgccctgttgatgagcttcttcttcgactgtacgttcccatattcttaccgtacttacatcacggcggaaagaatggaagtatgcccacggcagattggtgtgtgaaaagacatcggcagcaacctctaatagtttccttaaatcccaggccataaaatccaggtatccgcaatacagtcccgtagctccccccagaaaagctaccacatcatcgccagcctgcttccggattttctcctgcaagtcatccctgagttgctgcatttgtttcgtacgttcctctccttctacagcttcaattgccggataaataaagaatccagccacaatgccatcctgatgaagctcatccatggcatctggttccgcacttaaatagccgttgataagtgcaggcacacaggcactccctgtaaagacatccagacgccagtcggcatttttgtcttcttccgggctcaagttatagttgatacgattgtgaatcaggaattcttctgcatctttgtaatcgggcagattcattgccttcaatgcgtcagaaagtacggacagcttggtgctgattccctttttaggtgtagccgtcaattcgaaactgcgaatcagagacaggtaagcaatttcacccagctcgtgcgacatcaggttggccaccatccaccaagccttgttttcgttttctttcagcagaggaagcagtttctcacaataaagagtaagcaccacctgcttgccttttatctgttctatccacacatccacatcttttccttttacttcatattcatctatacgaattgtggaatgaggatttttctgacggcctactataatgtcccagttcttacgcacggatgccggagcatgttgttggaaataaaccagtggaaacagcttcatccgttctccttcaggactcagcaccagttcatatcggtccttttgacaaccaagttcgaatgccgtgtcactcagggcgatggaaaggacacgctcacaacggctaatcagttctttgctacgctcatggcgtatatcttcgcgcataatcttgcgcagccttgcttcttcccgttcaaaagcagcccacgccttttctgtacgttcacgaaaggtcttgttaaaccggggcaacgacaaatccttacggcatgcttctatcatttgccgggtatcctcatcaccaggacgtgcatccagggcctgccggaaatagtggagcgctcttccctcttgctctaaataataataagcataggctatgcggaaattccagcaatggtcccccttgaaatagttttcatggggtttcagtaaggcaagggatttttgaaaaaggtgcctgtcggtaggttcggccaaattgttataagcacgggccagttcactatcaactccggagtgcgctggtcagctggaatagcttcaatggcatctattattttttgaaactcgtcttgttcattccactgttggcattgttctataaggttcataagttttgattttctgtgttttacatctattttcattcatcaggattcaaggaagttcgtcaggggcaaaaaacgcctttacgtttgtgtgaaaacgctttgacgttttacctgaaacgtacttgcgttttacttgaaacgcaaagggtttgacagcaaatgcacttgcgtttttttcacttcatttgcatggagtgaacacagaccaaggcacagcctccatagtccccatatcaagtaaaccgacttcaagtaattctttcctacctgtttcctccttattttgtctgtaccctgagttttctgtcctaaattctgttacacaaaatttattttgcacacacaccaaccattcatttgctcaaaaataccacaaattgattaccatacctcatttctccacttaatatgtcttaaaaaaacgaccacgcggtcataatttaagttttttatacttttcagtctacaaatgaagttcccaagtatattttcttattaattacatagttttttgcaattattaaaaatatattaaaacttttcgaagaagttgtttttatcaattcatatacctaatttcgtttcgcacgaattaaaacaacctttcataccattaaatgtccgcttccattttattaagcctggacccttctgtaaagcacacaccgaaaagccagcatttgatttgaaacaagaattactacactaaaaaattcaattatggcaatcggatttaaacctaaagcagaaatgacactcagtcttcccggctgtagcccaagcgaaatcctgctggttgcggcagaagcagccagacagttaggctggcgagcgggaggcatgacacgcacagaagctgtattctatactcccatgagcatgaggtcgtgggaggaaaaagtaacacttcgcgaaataaacggacaggttgtggccaccagtgcctgttctaccatacagataatagactgggggaagaacaaatccaatcttaaaaagcttttcaaaaccatgcagcgcttacacgacagccactgcattacaaatgacaaggagagcgtgcatccctacattgcctataccagtgagcagaaagaggcggtacaggcacacatccgcaaatatttcggcagcatcaacgccattctgcgaagcgaagaaacaaactctccggtagaaatacttctcgtagctccaaccaaccgatatgattattacacgctggtcacctgtggagcgggtgccagttccatgaaaatgccacataaggatctcccctcccggtgcgagttctgcatcagccttccaccggaatggaaccccgaaagcaatgaaccggaagacagatggcccgtggagtggctgttccggtgtgctgaacttacccggcagaaagacatctggctgacatgcggacatacggtatccgacggtagcccattgcatgaaaacacagccatggagtcccttttgctcctttcccctgaaaagcgggatgagcaggccggagaatgtacattgcccgatggtgagaaagtagcgttctacgaactgtatcccttatataaagaagaaaccgaattcaagcaggctaacggactggcgaatctacttgacaaactaaaagactgttcacacattgcccgcactgaccgtagaaacacctgtgaaggttacagcgcgtttcattccgcagaaaacgacggagtcatactggacgatagcaacagaatgacattccgttccatactgaccccacgaaaaggcaatatggccacccctattttggtatacatcaacgtatccatcttcctactgatggtgctctgcggagtaaatttcctattcccgacgggtatttccatccttaaatggggagccgacttcggtccgcttaccctctccggcgaatggtggcgcacgtttacctgcaactttatccacatcggggtcattcatctcctgatgaatatgtatgccctgctttatatcggtgcctacctggaacaactcgtgggtaccgaccggctgagtgtggcatacgtgctcaccggactctgttctgcatctgccagtctgatgatacaccctgacagtatcagtgcaggggcttctggagcaatcttcggattatacggtatcttcctttcctaccttctgttccatcgcatagaacgtcaccaacggcggtcgttactgtacagcattggactcttcgtcgtgtacaacctgctcacgggagcccgaacggagggaattgacaatgcagcccatgtaggcggactggtaagcggcctgctgctgggagcaggctacgtgcaggccgaccgcatgcaaacagacagccgggccatttcccgcatcgccgaaggagtgcttctggtgctcttcattctggcatttaccgaacagacacgtcttgccccatcagaatacgaggagatacaggcagcatggaaaagcggagaactggaaaagtatgccactgaagaaacagatggagaagaaactgccaactctgacactcccgtcttgtctcctcccaccacaaccgaccctgacaaatgggaaacttatactgtcgaccagcttggattcagctgttcctatccggcacactggatgacacaaaaatcaaatgaacaatgcattctctatttgctggatgaacaaaacagcatagcaatcaatcacaacaagtttgataccgaagaagaactggacgagatgcaccgaaccatcctgcattccatgcaaggagaaccagttgagaaaataaacgtccagggaaaggagttcgaaaaaatatctgtccctatggactatccggtagctggaggaggcaccatccatgtgcagcagaccctggtattccggctggaccgtgaaacactcgaaggctatctgattatctgcttaaccacagacgacagccatgaggctgaagcccagaagctgatagaatccgtacaattgaaatcctgacagaaatactcaccttaaaaacacatatcttatgaaaaatcaaaatgacatgataaaggaagtgcaggcacttctggaaaaaggacaaatagaagaagccatccgactgatggaatctgttcccgaagcagaacgaggttatgaactcaccggtcttctggcacgtgaatacgcaaactatggtcacagcataaaccatggagaatcttatctgctcaagtcactggatttgttagaatcgaccagaaaagaaggccggaacgacccgaactggcattgcagaatgggatacgcgctgatgcacctggaacgtgaaaaagaagctataccctatttcgacgccgtcatgcaaatgatagatgacgaccccgaaacccaggaattctggagcgatgtgaaagaagcactggaagaatgccggcatgtgaccgacttcctctcctctccttccgaacagcctttatcctattacgaagaaaaatcatacatgctcgccattccctggagcgaccaggaagacacccttttcgaccgcgaagaaaagatcaggcgcatcagccagatggagggagtagaagtattgtccgtggcttccgagaacgacggtgagcagcctttcattaccatcagctatcatggagagacttatgctgtcgacctctctccttatcccgcttacgacagttacaaatcaatacagcgcagacacatcttttctgatgaagaaaatgaagaactggcaaaggctgaattcggcctgatggttatcatgcctttcggaaaagaccataagtcatccttccacttccagctcaagctcattgatgccctgatgccggaaccggtggccatcattgacgaaagtgccgaacagattttctccggacaatgggcccacctggcagctgcttcaaatactcctcccagcccgcagtacatctatcagatacatgccgtgacggatgaaaaggacgaagtctggcttcacacacacggactggcccgatgtggcttgccggaaatagaaattctggatgccggaaagaaaaacctgaacgaaattggagaagtgatgaacaccatggcttgcagtctgcttgacaacgaagaaattccggaaacaggagaaccggtattgctggcgcgatttgctgacaactcaccattagtgggcacactgataccatggcctgaagcactgcaccgataccctcagaaggtaaacggaggactccagcaacgtaaatacggacacaacacccgctcctgcatgctttttgcctacccgagcgaagaagccatgaatcagcatcaatatgtacctattaccgaccttgcggacaaaatggacgataacctgctgtgcatgattaccaatgccgaaacacggcgtatgaaagaaatggccattgagcgccttgactatatgagaagagcttgtgcatccgacccggaatcggctatcgtcaaactggggctgagggtcgatccggaattcgcagaccccgatgaaaaggaacagaaagaacacatctggttccggatgaaaggtttcatcggtcccgacacattccaggcagaagcactgaacgaaccttactatatcagctctttgcattgtggtgacgtaaatgtgtatcacgtctctgaaatcaccgactggcgcatcctgacggaagacggacaaatttctccggatgacatttacctgcttaactacaccatttccgattccaaaagctgacatcccccaatgtacttgcagtcttccacctatttttagtaactttgcaaaagttactaaaatccactcactcatgagaattctgctcgccatcgattcattcaaaggctgcctttcttcagaagaagtagaggcagccttttcccacgctctgacagtccgcggggcagaagtccgttccctccccatgtccgacggaggcgaagggatgcttccggcctttatcaccgccctccacgggcaacttctccaagcgaaagtacacgacccgctgatgcgtcccgtcaccgcttgctacggcattgccccgacggaaccgccgtcattgaaactgcacaagcctgcggactgacatacctgtctgccgaggaacgcaatccgttagtggccaccacctacggcgtaggcgaactcgtggcacacgccgtacgacacggatgccgacgcttccttatcggactaggcggaagcggtacgagcgatgccggaaaaggcatgcttcagggcctcactgagtccctggctcccggcggcacgatagaagacgtattgaacggtcctctgtccgactgccacttcatactggccagcgatgtacgcaatccgctctacggacccgaaggagccgcccaagttttcgccccacagaaaggagccactcccgcgatggtggaaaaactggaccgacgcgcccgtcagtttgccaaggaatctgcccgacgcatgggcagagacgcatccttccaacccggtgccggagctgccggcggactgggatacgccttcctgcagtacctccaggccaccacccaatcgggtgccgacctcctgctcaacctctgcgaattcgacaccctcctgacacataccgacctcgtcattaccggcgaaggacatgccgaccgtcagacactcatgggcaagcttcccgaacgggtgatgcggcgggcacaagcacagcatatccctgtctggctggtagccggaaaagccagcgatgccaaatccctgctgaatgccgggttcagcagagtagacagccttacccccgacggtatgccccttgaagaagccgtccgtccggaagtcgcccgggagaatatccaccggtgggtagaaaccgtatggaatcagctgaaaaagtagtatctttatcccgaaatacacacatccaaattcctaaaaacatgaaagcttattcattactgtatctgtcgctgtgttctttggtaacactctatgcgtgtcagtcgtcacatactacccagatggaaaagaaagaactgaaaatgctggaagattcccagccgaaatctgaagaagaagccttcgagaatttttacactccctcccacgaagctctgattaattgggtactcaccgacaccgccactttctcccatcctttcactcaaagcatcaaaaaggaatacgtcaccattgctacttcagacgacaaatgcctgcgcatctattcatggaatacgggcgaaggcggaaccatgatctgctggggcaacctcatccagtacagaagcggaacggaaataaaagctgtccaccaatcgctcgacatgctgctgcatcccgacggcgagcacgatgaaatcgatttcggcagctacatcgacaccatctatacctatccctgtacagacggcagcaagctgtacatggtcgacgattatttcaggatatccagcaactactccgccaattccctggtggctatgcggataaaagatggaaatctcgtcagtgccccttgcttcgtacgccacggcaaacgctcagacaccataggctttgaacacagcattgctgactggtactttcttgccaatctgggcgaaggatgggactggcttttccaatacgacaagaaagcacaaaacctgtatgtagccaccacagacagcatgaactgcatttccgaccgatacgacatctaccatttcaatggcacagattttgtctatcagaaaaccggagctcctttctggctgcatcctcagttacaccactaccaacgactggaactgtttttcagaacgaaagattacattatccgcatcgacaatctggacggagaaaccatgcgatacgcttcctggaaaagcacacagcagatgtcagatactcccgaactggtgctgaacggcaactatgtagagaaggacaacaccttcctcttctcaaaaggcagctaccgctatgtggtaaccatgggcgacaaagccaccctgaaagtacagcacaacggaaaaaccatcctgcaacaaacgcaagaaacgaaagagttctgatacgcccgctgcagactttataaagcaaacaaccgggaccggcggcacaacttgttacagtcgtccagcaaggccccgttggaaaaatctccacataagataaaaatatcacgttatgttcaccaaatccgcagccaccgttccgacgagtttcccccacaaaggctaagcaaacaacagataataagaacgataactaaggtcatcaaccagatgaccacttcctttttatcgattgatttcattgtctttcctccttttctgcaattatacattaagccacattatctcttgcatttagtgaaaacccgcaacctgaaccggtgtggcagaagcgtctcatccgagtatatcccccatttaccctccgcatcgggcggcagctgtaaaaaacattcgtgcaccacgtccattgcctccgtcgtttccttgtcgtccgaccagtccgcattttctattgagaacacagccatcgccacctcatctgcagacgaatacttcgccggcagcttcttccaccagtccttcacttccttcctcaggaaatccagactaccggtaagcataaaaaagtcgatgcgcttagaaggagtcggaaactgcaggaaagtcctgaaatcattaaagtcgaaggtaatcatgcaacgacgaagcaccatccccaaaagcgaatccgtaaactcgattatcttccggtccgcttcctgatacacttccgtaagcatggcataccgggagtcatcataatccactgtataaagagcgtctgccatcggttccaacgctttcagcaaacctaaagcattcttccgcttttccgctccctccgacgaatgaggaatagttgccaccaaaatgattgccttgtttcctacctctctggccttctgcaggaaagacctgatacacccctctcctgttcctccaccaaggcataccacaaacatcgccacaagtctaccccttaatacactctctatggcagggaaagacttactgcattcatactccgcaagaaaacggtccttaccactacccagtccttcttgtccaatcaggtatttgccgcacaaggacaactcatccatttccttccggttcatgccaaacgcatacagttgcacatcaggcagacagcatttccgcatctggtctaccacacgacctgctcccccgccaatgcccactatagatgcaaaacgtccacttcccggaatcagcgctctgtaatcgaatagcttatctaaattctcttccatacattttttcttttaatgattttcataatgtatggcaaatatacacctgaaggtatgccatataggggaatatgaagaaaaaaacaaaaataatccgtaaataaattcttacttccatcaaaaaacaatagaacgtaaatataatttcgttcctttccccatctcagaaacagctactgaaataaaaagatattaactcagtcagcgggattttataattttttttcctatgtttgtataattcataattctaaatctatcagtatggaaaacaaatacgtattcatcagttattcatcggccaacaaaggcattgccgatgccacctgccatattttggaagaatgtggtattccatgctggattgcaccacgcaacattatccctggcaaaacctgggctggtaacattgtacaagctatccgcgattgtagtctcatggtactgatttattccgaagactctaacagttcctcacaagtggccaacgaggtagacaaagcctttagccacggcaaaatcatcatccctttcatggtcgactctacacctatgaacgacgactttgattattacctctcgcgcaagcactggctggtggcctatcctgattacaaaaaaatgctcatgccactggtagaagcagtagcaaccaatataggaatagagattcaacgtccacaatccaaggtctcaaattcaatatctcgtaaagaagtcactgctgccatcccccaatacgaggttgccatagaaacagctcgaaaattattgttgaactacgaacatgacacagcctttgctgagctaatacgtccggcgctagacgattacaaagaggcacaatttctagtacgcactatcctaaccacttattcacgtatgcaacgactcaatgcattccgtttcaagtatgttaaagaaaaggctgattccgggaatgcttttgcacagtatatgatgtgtcgctactatacacacattgagcgcaatgagggtgaagcttaccgctatgcgaatttgtgcgccgcacaaggaaaaagctatggctacttagaactttcaatggcttatgaatttgccactagtgtagagcgaagttatctgcgcgcacacgaactgctggacaaggctgtaaacatggatgatccatttgcaatgatgcgactggctaaggataacttgtatggctggacgcgtaagcgaaatcccaagcgagcttttatgttactaaaacaatgcatggaaataggtatacccgaaagttttgaagtgatgggtaatatgtataatgaaggagacggtgtggaatgtgacagaaaacgagcgttggaactctaccaacgggcgctggacgaaggatatctggaagcttacaacagcatggcctggtactatctggttaatatggaaacgtttcagtacagagacgatgcagaaatacagcagggtatcagcttgctacgtaagggtatagaatacggagtggcaatgtgcctgtcaactttagcttattgccaccaagaaggtataggagtacttaaaaagactgagcaggccttccgctggtacaaaaaagcagccgaggcaggtgaccctggttcttacttcaatataggatgcatgtactattacggaaacggatgccaggaaaataacgctgaagcctggaaatggtttatccgaggaagccaaatcccctttggcagttgcttttatcagttagggctcatgtgtcaggaagggtatggacaggatggaaagaccgtagctgactgtgtagattattatgaagaatctctccgtttaggaggaggctatgccagcgaatcagcactgagactctacaacatattccgtacgcgaccgctggaaaccaatcctctgatgcgagacgatgaaaacacttactactacgactgggcgcccaaagataaccaccgagcagttaactacttgaagcaggcagctggtatgagcgattactctcccaagatttacttcaaatatggggcaattctctgtaccgaaggacacgggtttaccgatgagttcgagggaatacgctacctgaaactggctgttgaaaaaggcgagccgcgggcagcagtaatgctagcacaaatctacgagaaaggagaactagtagacaaagatctggaaaaggcacgcgaatattatcagctggctgccgataaggattgcggtgacggatatgtcggcttagccaaagggctatgctcacagataatgggtactattgatgagcccgacggcgaactgcctgatatagataaagctaccaaacaaaaacttatcggacaagcttacgaatatgtgtgccaggcagacaaactgggctgtaaggcagtctgcccgctggaagaaaccatatcagccttcatgcttgaagacgaactactgactccagccgagcgtaaccacctggtagagatgaataacaaatatgctcgactgggtaacctacaatgcatagtagaccgtggagtgatgttccacataggaagactgacaaagcccgacgtaaacaaagccatcgaagcctatcaacaagcagcccgtctggacaaggaatgtgcagccaagaacctgggcgacttgtattctggcaaagaagaaagcctgccagccgaacggcaagacaagtccacagccgcctactggtatgaaaaggatagcagcaaagattctcaagcaataagtgcccggttacgggaagaaggacaccaggtggtgataaattctgaacacgttttctacgaaaaaaaacggtcggagcatatcaagtggatattcccttatttatgcgacccagcctttacatccgcttcttccaagttgcgcatcttcgagtgggccaactttgctaaaggaccgttggccgagggaataccccaaaatgccgataccgatgtccgttacttgcctaaggagttaaacgacctttttaaagcctatgtaaaattgtacaatctactttcgaaaacttatggatggagtaattctttgttgccccgacttagcaaggacgattttttcccctatctttccatgccacatctactggaaataacacaaatggtctatcgagcttggaatgcccacgtgaaacacggaaaagacaagtggttacaacagcaagcaaccaaggtggaacaaatcaccttaatgcgacaagattgggaattcatattggactttgcagaaaaatgccccgacaatgatttgcaattacttcttattagtgtagtggacatgtgttacggtctagaagccttagctgaactatattggcaactgattgcgttaaacgatctggtagaaaacgccgagaatgccaatttccatttgcctgaaagttttgtcaaaaagatggcagatctgtttttcgacggtaccgatgtgctcccccggagccggactgttgcacgccgcctttatgcgcaaataccctatttgccgggtgtggaagagaaattgaagcagtaaatattgactcttaaactataaaattaccgtgggtagcaagtcttactatattctttgctacccacaataatttatctcctccttctaaatcgtattattaataactatcctttaactaatcttccccaacttcttcaaacggctgcggatagcccctttagtacgttcaaacatctcggcaagcacacttatgctgttcccttcatcatacagacggcaaagcaactggtcggcctcttcttcccaagggatataagcatttccatgctcgtttctcttctcttcaatggtataagccttctttcgctccgactgtgcaggcgaagaaagcccctcgttggcatcgtagctctgttttgacggaatcacacctcttaccccacctttcggattaagcacatcgcccttgtagcgcggaatcaagtgcatgtgtacatgaaagaccgactgccccgccgcctcattcacattaatgcccacattgtatccgtccggatggtatcgctcgtctaccttctgcttcacgtactgaagcaccacattcatggcctcccgttcgtgattggtcaggtcgaagtaagaagccacatgccgcttggggataatcagtgcatgaccaggcgataccggataaccgtcatagaacgccacacaagtagccgtctcacaaataatttccactcttcgcgacagacggcagaaaggacaaacctctccttccttccggggcaacttattgaaatgctgatactgataaagttcatagctcgcattacgttccaaactctggaaaggcagccgcacattacactgataggtgtactggcgatgaatggcatgcaacctgaacccttcttccgtcaggtcacgacgcacggcaaaaaaggccgttcccgtaggagcaagaaggttcgtgacattcatcatcacttccgcctgtgcgtatggttccagtacattcagcacatagttacacaaaatggtatcaaacttcccgtccggatattcaggacgataataatagtcgtaccccgtgatgtcatacccctgacgtttcaactcgtctgtatcaaagccatacccgcaaccaaagtccagaatacgtcccttcagcagattatgttgaagcaggtaacgggtgggtacagaaagactcgtacgcttgatagcggtgaggtaaggatgatttatcttttcaggttccatagtatttagtatttccaggtttcaaatcccatgttcaaggctatttggtgcattggtccgaaagtacgcctatacacctccaaaaactcttcctcattcatcaggacaaactctttcggtgtatatcctaaagacagaaaatcttccagaatagttggctgataacccgcctgtatagagacttttaaagaatgatgctgcaatttagctaatttaggcagataaatatccaaatccggcagataattacttttggaagaattgatactgccatcagcaggtatcagattccaaagcaaatcatgagaaacaaaactccaaggaataaaatgatccaactcataatcggaaggatacaactcatggcctgtgtaaatgcagcgtacaggccctcctatctgtatcaccttattccaataacgatgctggtttgccagagaactcctgctttccggcctgattagcttactggaaatagccggcacattgggattcctcgcttgcagaaactgcattaagttccaataagtgaaatccatcagaatcttgtaatgcgtatgcagatattcatcccacaccggattaagttcgatataaaaatccgctttctctttatagatggaataaagacatccgttttcaaaactttgagaacgccacataacttcacgactgttatttgtagcatttatccagggatacagaaaacagtaaggtacatacgtagtaagcttacccagtctactctttacctgtttatctctcagcctttcctgaagctgtctgataacctcctcgcaactcgcatcaatcggtatctgtgtctctttctgcaattcggtgacaatatcaaacaaagaatcgtttttcccaaatgacagtctgaaataatgtatcggataccaggcattggccaccatacgaattacaatatcccatacatttatatgtaaattctccgtacgggcatgtatctgcaagatggacaagaaccagaagaacttataagtggccgaagtggtatcaaatatccgactaaggcatcgggtggtaagtgtttgtgattgcggtatttgcatggctctttatatcattagtaaagatctatctaaagcaacaatataaaattgatagttagtatagagtaagattcacatgaaaaactgtaaatatcactatacttcttatatctcaaatctttccaataaatctattctgttaaatatgaaacttaatccaccctcatattccctactatgattttcattacagtaccaatttagagcctcatcaaacaaatctttatcaagaattaatgttgtaaacgtaaattcatttttccgtttttcctcatttcgtataaactctattgtacgttctctcacacctcttccatctattgttgtaatatcataacagtaaataagacttgctattgtataatatatacctctattcctggtttgatatttgtcagtaatcaataatttcttaggcaaaatcctttcaatgtgactcaaaagctcttgatttgacaattcctttgttcgtattttattataaaaatcaggattcattactttccagaaacacagtagaaaataaatattaggaagtacaaaattattttctttgaactgcatcaaggctaatcgagcataagcaaaaaccctttctatctgacgaagatttacttgttctgaattacttatcgctatagtcatcgctttaaaagattctacttctctgtcacctctaaaatatcgcttacgattttcattttcaaagaattcagcaaatccatactcattataaagatgattacaataaacttccatattaggtttggtaagtgtatattcaatatctataaatcttcgaagatattcttctgagttgatatttgttgaaccataatatccttgtattgcattgcataactctttcttgtttatggctaaaataaatatgatatttggtatatcaaataaatgctttatgcgttccaatacggcaacggcatagtgtggattgcatctatccaattcatcgacaaagaatactaccggcttttctgtagcattatccgctacaaaatgttccacttcaactttaaattcttctaccgttgttttttgctcttcaaatttcttcagatattcttctccaatctcttctgtagtatctaaagctgtgtttaaaagatcatcacaatcaacgcctgttgcttttttaactaagcctttagatgctgagataagaactcttcccattatacgaccagctttccctgctatagagtttattttaccactgttgggggacaattctctaagctctgaaaccatagctaataacggatcatcggtataatctgaattccatgcattaaaatataatgttttaaatccattattgattaatgactgtttccacattcttacaaaagtactcttacctgctccccattcaccgttcaaagccataacacaaccgctttgaccataaaatgaaactatatcagtaaggattgttgcagttttttctctttccaacttatcattttcgaacggactcttttctggtacatcaatttcaagtgttctactttttatatatttactattcatatttagtctaataattataatttaaatctacacatagaatttataaaagtcatatatcgctcataaactttatacgtcaatccgagttttctttagaagaattcttataccattttacagaaaatacaaaccctttatatctgagtgcttcagctaatttaatattccacctcgtcttctccaaagcaggacgtttagatttgtctgctatgtctgcatatttatctcccaacaatcttaacaactcaattattttactgttatcataattatattcatttataagcagcaaaataatatataccttagatgattcatcagaagcacttcctactatttttattattgtttcttcatctatgtcttttaaatctgtatatagtattacattcaaaacaatatttgctactttgtcagatctaacaagtaggtcctttggggtgatagtaattattctcttcttttcttcataagtaaatacattcgaagatagcagtttatatacaacgtcactgttagagatatacgaaactgatagattttctaatagttggttatgatattttattaagtaatcagcatatataccagtttccttcaaaacattagtgttcccttcactgaatggtagcatattatgagacaataacaacagtaatctatcttgatccaaagctcttagtccatcgtatccattaaattcaccccaaaaagattttatgatggaagagtacgcattaatagcaagtttgtttgttcccaatagataattcctcaatgacaaatactcattgccttcttctgcaaccatttgttttcccagtttatcagagaagtgtccaatgtattttatcagaatgtgttcgtctttattcccattattatagtatgcaacaacattcctccatgtaggattaatcaggaacaaattatatgcaagtgttttcaattcgtctgtatcaatattgctatcgtcatctaacagctccttttgccctattaaatagttctccttatcatcagtctttatcttctcactattcaaaatgaaaaggagcgaatctttcgtttcatctttacaatctttcgagaagtgcattatagctttatctatattgttttcaatatgttctataaatatgctgtattttgtatccctaattctgcttagatttaaattcccttcttttacctgtaaatcattacatagataatttgccataaggcataaattataactattaatttcgtatgccaggctatctattgagcgtttaagaagttccggatttttatcattaagctccttaaactcagagtctattactaaatccaaactccgttctttaccaatattctcgaatctatcggttaaaaactcataatgacaatttaaccatgttctggcttctttacaaattttcttactatatttaagccaaccctctattaatatatttttttcatcattattgctccatgattctatatttatccatgattgtacctcatcccattttatgtaatgttcataaacttgtttctgagcattgccataaagataatattgagcaaggaaatctaagggagcttgatttgtttccagtatgtacatcattagattaaaataatctttatgaaatgatgatacatagtccaacagatcattatttaaaatagcctttgtttcgaacatatacggaagaagctccttaacaaagttttctaccttatcaatatgataagaatattccttaggtatatctctcttgatagatagcaacaattctctatctgataaagaaaccataccttcataaaaaaaagaaatataatcataatactcttcatctataaatcctcttcggataaatacatccatcatttcggacaattttatactcttataaggttcactattcccttgtttataatagccaataagcctactcaatttatatttatgaacatttagtttttctcgtataagttcggacctttttctttcaaaatcttcttcagatttttttaacaatgccattctagtcttaaaattcattgtttgatttatatcttctagatttacattaattgatgttctatgattgttataatgataattagtgaatgtataattaatagaagacgacgatagaagtgtatcaaaaagtttttcattatcagcaattaactctaaagaatattcatgaccatcaattataaacattcttaaatcattagtacaacggcttttaagcttcaataaatataacaagcgtaaatcttcctcctttaaatgccttacctttaaatattcttgatactcttcctctaatgctttttcttttaattcaatttcattcaaagcgaacttcgcgaataatggctttgcttttatacaactataaactttcccttctctcctatgaagcattgcaaagtctttagggtaatagttcttataaactatcatagccaatagttttgtcagattgagtttttgattatttcctgtacatagtttttctctatattgctgaaattcgttggcaatattagtcaatatacgcatatcttgaataaaaaaagccatatcagccaaatctccatccattatctcattttcatctaatcccctttctttcaacgctactttaagcttatcttttgagttagaaggattaattactggtataactgtggtaatataatcaaagaactttgttctttcttcatttataaaaatatcatcctttacagcataaagaaaaacaaggtttcgaccaactattttcgattcattaataagttgatttaactctctaagtttcaaaaaaatcttagaagtaccaaaacgatctaaatcctcaataatcacaacattatacttcgtaacttgaaaaaaatagagtatttcatctaaatgcttattgaaaatagaattctcttctttaagttctatttcaccatcttttagattaagcttatttagctttgaattactgtatgatttgatgacataacctaatactataaacaagaaatataacatataaccaacagctagaatatcaggtacgatattccagattccaaagtctaacagttgataaatactactaacaataaaccatgatggctcaaatgcaataagtatagctacaaaaaacagtaccccgtgaaatgataatacctttaatcgcttatcatcaatatgaataatacgcctaaatcttgaattaggaactgttgacgctttttccctatatatgagctgttgaagaatactatactctatttttctgttcaaaagctcaatctgttcatcatcaatatttaagccagctttattatccgaatcttcattcgcttgtaaagttgccaaagaaataggaaggtattcaaactccttatatctcttacgcaatgtctgaagaacagaactcttacctgacccaaaaggtccggtaagagcaatgttttttatttctccctcatcgagagctttatcaataacttcatgcaactcttctacagttttaaaagctgcatctttttcagttaaatccttgggtaataacggctccagcatataaatcctctttaaaaaaattgaagcagacgaaatctgggaagggattatgccactccaccatatcgttggctcacgtagttaaacaccgcatcacgataataagtaatactttcatccggataactttcaggtaactcctgccagagcagatcccgtatggttatcacgatggtagctttcgtttcctgcttatcaaatggatgatccattgtttcgagcatagacttaatcttatttaataagtctttggccactttcttcaacttctgaatatcctccttcgacaaatctttcttctctaatatatcatacaatgaaagctgctcatcattttcaaaaccttccctgatatatcgtttctcttcttctgacaacttttcagtcaaacgcatcaagtcttcaaaagttttctcaatactggcccggttttgttctttgttataattgctgataatttcctgatatttctcatagaaatttattctcgaaggattggccgacaacatttgggcgatacgttcctgtaacacctcctgaatatctttcatcaccagattcttgtctcttcttctgccaaactctcttctcaacaaatcaaaatcaatcttactaatatcgaaacgacgattggaatcaatttcctccaattcatttatagtttccacttccaaatgctcatctacaattccattgataaccacactaaggtctgttatatccgcatgcttacgcttcttctgcaatgctttataaatagcctctaacgcatctttttgttgcttcatttccgacgtaatatcatcgcggtctaagaatttccacaatttgagcaaagtagtgagataagtgttataactctttcttatttcaaccgtttcgcacatggcatttgccgcatctctcagcaacgacaattttacaaaagaatccgcctgaatcaagtccttcaattcaaagccatgttctttaagaaatgctacagcactggaaatagtctctatcacacggttgataagctcctttttgtctatcgtagggtctttgccctcttctccctcttccgggcttgccgtataatctgccaaagcttgcctgagtgcttttacaatgcccatataatcaataataaggccgttttcctttccctcggccacccggtttgcccgggctatcgtctgcatcaatgtatgggccttcataggcttatctatatacaggcatgacaaggatttcacatcaaaccctgtcaaccacatcgcacacacaaataccactcgtagcggattatctgtatctttaaaatcctcatcaagtttacagtcctccatcttcttacgatgcgtcaatatatcaagtccccacttctggaatgtctgtatttcattctgttcttgtgaaacgaccacagccatttccgttttttgcatccattccagttttcgtttctgttcctgaacttcctgctgataaggactggcagcaatctgctttttcaatgcttcaatctctttctgccaatattcctgtacataatcatacatgcgcacacaagttatcttgttgtaacacacaaccatggcctttccagatgtccacaggtcactataatgacgcacaaaatcctgcgctacaattctcaggcgtttcggagccgtcagtaaatgtacctctttagcaaattcacgttccaacttagccaattgcgaggcatccatttctccagcctgctccaatgccgcagcaatctccgcgtttatttccggattctttaaatccttcaatttttctccccggttctcataatacaatggaacagtcgccttatcatccacagcccgcttgaaatcatatatgctgacatatcctccaaacgtacgggctgtaatattgtcatcccgcaaaagaggtgtacccgtaaatccaattcggctggcagtagggagtaagtgtaccagattatcagcaaacaatccattttgtgtgcgatgcgcctcgtcactcattacaataatatcatgatccggataaatcggtgtcgctttaggatcattgaatttctgaatcaaagagaaaataaaagaaggattaccccctaatctttttatcaaatctttgccacttttcgcaataaattcttctgttttcgttttacccagcgccccacagttttcaaatgtatcactaatctgtttgttcaactcctcacggtctgtcaaaacaacaatagtgggagaaccctcaaatttccgcctgattttacgggccataaacagcatcgaatagctctttccactgccttgcgtatgccagaatactcctaactttccattcacatattcccgacggcgatacatatctacggccaagttcactcccaaatactggtggttacgcgccataatcttcaccgttctcccgtctgaatggtcataaagaataaagttttccagtaaatcaataaaattctctttctcgcagataccacgtaacatagtgggcaattcgatatttcccttgtccatttccgtcaagcgtttccactcgtggaagaactcccatttggaatctatcgtacctacacgtgcctccagcccattactgaaaataataaaagcattgtgatagaagagttgtggaatcgtgtccagataatctctataattttgattgaaagcatcttccacttccacattgtgatttttcaattccatgaacagcaaaggaataccgttcacaaatcctacaatatcagctctacgacgataaagtgagccatacactttcagttctctgacacaaagaaaatcattatcggcacccttctcaaaatttataattcttgcctttacttctttcgtttctccgttaggcaatactcgggtcacaggcaccccgtcacggatatattgatacttctgctcgttaatctgcataagtgtctggctactcatgtgttctgtcatccgttctaccgcctcagccatctgcttgtcattaatccacggattcaattttttcaaggccttgcggaagcgttgcaccaagaatacttcatgataacttttccgtcccaaagtgccattttctcccagcacttctttatcataagcatacacaagagtccagccaagttctttttccaaaaattcagctgtacttttctgtatgagtttatcttcgccgtagtctgttgacatagtttgattcaaattagttttaacctaaagtacgtagttttttctgaataaaccaagtgacaataccacaataggaataatatttttcttttactccttcttcatcttcctcaaaatgcttctcactgtatttctttaaataaagtttcaacgtcttcttatcccagctttttccttttttacaagcaacattaatctgggaaatcacctgatttaacattgcctttctatttactttaagcaattttgtattcagatttagtatatcattgatttccgtattatataattcgttggtagaaattatagttccgtcagaattgtatttgattgtatctataaactgttggtcaagtggagtaaatgaaatatcctttgcccccttcagtctatcacaatgatcatcttccccaatatgaccaggacaacaaattaccatatttctatattccagttttaaatcatcatgcagttctctacatttcacatgttctacccgatgatcttcttgtgtcaaaacatagtttttcctgtccttcttatataatttgtcttgcttaggaattctacgcatacaataagcacatatatacccctgctctttcaaaagtgattgaactaattctggaatagcctgataatctaccccaggagtatttctgtactcggtccactctttcggttctttattttttgtaatcagaatcataggcttgttttattccataaatgatattaaggcttccattcttgttaattcagggtcaccaccggcaacattttgctctaattccttcaataattttcttgccgtttgaatatcatctttatctattaattctaatatagttttaatatcggtattgacttttaaatctctggatggttgccccatatatgtttcaataattgtggaagcatccattccatatatattcagttccttatgcgaatattttccgtctgaatattccaatttatacactacattaatgtcattaccgttttcatcctttcttggctcaagtgatgacatcaccaacggagcatgagtacttacaataaactgaatcttagggaaagtatcttgcaaagccttcagtacacgaatctgtaaagccggatgcaaatgttcatcaatctcgtcaatgattacagtgccatgtgtatatttgtaacattggtcaccaaacatagatttgttgagtaatgcacaacggaaagcaatatccatcacgatgtttaccaagcgacgataaccatcagacaataatgtagcctctgattctcgcccatcaacaaataagaaatataccttaccttcattatggcgtatatccataccattaataatatcacaacctttaggacctaatgcatcaataatggcatttcttacggtattaatttcttcatctcctctttgggcttcctttaatactagtaatcgttttatccaacattcaaacaagcctctacagtcataacattcataatacccgaaagaaggcttttgtacataagtcttaaatttatccttattaaatttacgaatagaatgaatatcttctgtagtaaaacaagcataaaccggtaaaatgttattttgttgaatacttttattttcaagtaatatatgagaatagtgcttaagcacagtagcataatcccttaataattttatgcctgtaacaagattgcgggaattttttttagagttttttcctatagtaaatctttctctatagttaaaaaagtaaacattgttctttatagttgttactggtaaaaaatctttaaatccaagatgaaacataatttcaataggctgctccataatacctgtattcctaaaatcattttcatctgcacttatccatacagtattctcatcgctgtagccggaaaagaacgtatttataaccaaattacaggcatacaataacgatgttttaccgacagagttgtctccaatcaacaaattcactccgctacgaaattccatacttgtttcttcgtagcatcgaaagttttttattgtaatatcacgcataatcttttaatttaaggttttatacttctatttcaccattcatcaatttgggaagcaaacgatcacgagcttcaataatatcttcaattataaaaaaataatcccttattgtattaaatataggatttattctctttctaaattctattaatatagactcatcaggaagcataataaaataatcacttactatatctttatttatatgttgttgtgctcctcctgttgccttgtttatcatagaatgaatattattataaatattcaaatataggaattcattagtggtattttcttcatcaataatacctacaaccgattgattagcacaagtctctatttcagtataactaacttgtcctaacgtcgcacctgttattgctaaaattgttgtatgaatcggcattaactttgtagaagagttcttataaccatcttgggttattttttctgaaggtttgataattcttaatttatttatttcacccgaatttatccaagaaatatctcctccccaataactatttataaatctagaaggtgtacctcctaatactgttttatacctatctttaattcgtataaaagaccatccttccggcagcccatccactatcttcgttttttcatatcctgggaaacgtaaatccacaaaccattctttataaagacgctgtgcagcttcttccaataacttaatctgtttttggtagttttctatcaaagaatcgtaacgagaaagaacttcagcaatacgacattgaatttttaaaggtggggcaggaaattttatagttgaaagtttttcccatgataaattatcctgtgcagtaccctgagaaatctgtttacattttctttgtagaatatcaaaacaatatttaataaaacgtacatcagaaataccgtcataaggtataaatcccataatactatcagggaaacacgcaggcatacttaatattcctgtatcagcaatatttgcagcaatagtaatacataatgttccagcatcccataatttactttgagctaatcctatctcattatatgtttcagaatattcatatatatagaaattagctttcttcacatctgctgtttgaatgaaaggatatattcctccaaaaagccttttatcatttcgtggacgatgtttagattttcctcttgcaactttacctaattcatctaatgttttaaaatcccaactcatactttcccctcctttctattctctgaaattaccacttcccaatgtcctgttttattactacccacacgcacaatcatccctgcttttctcaactcagctaagcgacgtttgattgtagcttccgatacacccaataatgctccatacccggcataattcaggttattattctcttgaatagcctgatacaaacgtgccgttatcgggtcagccgaattttcttttatcgggtcaggaatcatatttatcgggtcagttgtaggtcttatcaggtcagcatcctgcgatttcttgtaggcttctatctctttacggatattccggatatgttcgtcgaacataaactcatagaaaggaagcagcgtttcctgctcacgtgaatcaatgagcgattgaatatattctgccttatcttctttcactacttttgaaggaaccaagccaaattcatattgcaaatgattcatgaccaatctcgacatacgtccgttaccatctacccacgggtgaatggtgacaagctgaaaatgcgcatcaaaactggctttatactttgcaatgacatcatccgtattcaaaagttctgctctttgttggttcaggtactgacacaactcttttaacttgtcaggcactttgcgaaagttcatataagaacttccccctacgcccgctgtgacaccgagtaaacgaaggtctcctttagatgagtcaaagctgccacctgctgtgtggtattcgccacccgtgtttttcatgaccaaagccgaaagccctttcagcatcttaacagaaaattccgtatgcgctttggcttgtttcatggactgttcgtatgccgccttcaagtccaggttcatcatctgttcctgaatgctgcggccttttgccgtaatgccttcatcaaaaagtagctgattctctatctccgtaaccgtgctaccttcaatagctgtagaatgggtaataagagaatagagatagaatttgttataatctatctgctcggcaatccctaatgctttgtattcatccagcagggaaagcaaggttttcgtcttgtcatccaggctcatttcagtgtctcccaatcctttagaatcacgtccattaatgcattggcttccttgttcaattttgccaattctgcatgaatctcattcatacgctcgtgaaaatccactccatcgtcttccacctctgccacacctacgtatgcaccgggagtaagcgaatagttcttctctgctatttcatcaagtgtagcaatcttgcaaagtcctgcaatatcgtgatactcacctttaccaaacttttccgtcaaccagttatattcaccgattactatcagaatactttcaagtactttacaaaattcgtcaccagccagacgcatgggtttcacttcacgctttttcaacttttcttcagcggacttcacacaagccttggtctgttctatctgttcattgagctttttgctcaatgcatcgtaattctcccaggagcctccgagccaggtaagtgaacgcttaaactgagtttccgtttctgcatccaataattctgcaaacggtttggcttgctccatcatctcacttacagcttcctgtatggcactgttatatttttctatcagcacttggtatttctctgtttctccacgatagagatgtacgatggcctgaagattgcacaactgccattcagtccattcgttaagtgtacggtctactaccgtataatatttacgggcatcaataaacaataccttatcctgattttcctctcgtttggctttgtcaaagaaccacaacgagcaaggcaaagaaagcgtatagaaaaagttgtttcctacactgaccatgacatccacatgtccggtttttaccagtttttctctgatgtcacggtctttattcgagctgtcggttgccgaactggccattacaaagcctgcacgtccgtggtcattgagataggcatagaaatagttaatccaaagataattggcgttacccacttctttacttttggtgtttacaccaggcaagccaaatgggagtcgcccagcacttgaagccgactcagccttaactttatcgacattgaaaggaggattggcaatcacatagtcacacttccctgccagattgaacgcatcgtgatagaatgaattggcttcatctccagaaacaatgcgaccattaagcccatgtaccgccatattcatcaaacaaagttgagcattgtactccactttttcctgtccatagaatgtcatttgtgtgttggcattcatacccgctgcatttacaaaatcgccagtctgcacaaacatacctcccgagccacaagccgggtcaagcattacgccctgttccggctccagcacatttaccaacattttcaccaaggactttggcgtaaagaaaacgccatcatcgctggctaccgccttggcaaacttggaaaggaagtattcatagatgcgtccaataatatcgccccctacttcatcgatggtcttgttattgaaaattcgaagtaattcgcgcaacaagtcatccgagaacatggtgtacgactttggcaggacacccgtcagttgctcactttgttcttccaacaactgcatggcattattgactgcctcacctaaagaattaaggggctgtccttccttattcttcaaaccgacggatgcaatatcttcgggcagattaacaagaaaatcaaactgggcttcacgcggaagataaagcgcactttttgccgcaaaatcgctttgttctaccggcattacgcgtcctcctcgcgaggggcgatttttcagaatttcagcttccaccagtttataacggctataagcatagcgtaaaaacaacaatgccagcactggcatgcaatattgactgcttgtcagtttactaccttgtcgtaataaatcagctgattcccacagttctccttccagttttcttatattaatcatatcttttgtctaattattccaatacaaagatagcgattatttttatttaatcccccaccacatacaccggctgaaacttcgtccccgcattcttcaacaccccatccttcaccagctcccgaatcacccgcgtagacttcgacgaattaaacccagtgagccgttcaaaatcgcggcgttgcagaaaagagtgattcttaaaatactccgctaatttttgtttcacctcttcctcgtccagcttggcagaatgatgcgcctcgtccaccttgcgctccagatacacactctggaaacggtcgattaagtccttgtcgggcgtaaacttgatgcttctcacctgtacatcgtcatcctttatatacttcggattaatgtccggcgcacacttcagactcagactgaaatagccgattccttccagatgcaccgcatatccgttgctcaggttctcatagagttcatcgttcagggccgtgatgacggctgccacatcggccggagaggcggtacatttcttgcgtatcgcttcacggatttcacgggtggtcaccacgtctttagtaatcacttttgcatgcaacttcggtgcggagactccctcctttaccggattctcaaacaggtcaaattttatagccataatcgttttagttatattgtaattatacttctttcgaaacgcttatacaaaaatacctcgacacgtagctgtcaaggtctcgacacgaacgtgacgagacatcagcacgaacgtgtcaagacctcgtcacgtacgtgtcgaggtaaatttaactcaatttttaaaaaaaagcaaggatttgccttctaaatttcaagaagctcgtcccctatttttataccactttcaggtattgcggcatcacaggtttctccagtttccaggtgatgttcatggggaaatcaccatgcgaagaaacatagtccacaaggccgaaacaatggaaaggacaggtgtttccaaagccgtctttcttttcctcacgcacaaaaagcacaatcttgttatgccgctgaggttgctcggtgtaaatccgtcctccacggttgtgatgggagtcggtattcttggactgccaatggaagtaatccttattgatgacataatcgtcgtattgcgtagaaggtgaaaaatctttgtcggatttgttcagggtgacaaagagcaaggtggcatcgtattctggcaaattgaacacaccagacaccgaacctgacattcttttctcttcagtttgccgtccaaccaaagtgaatatctcctcacgggtatagcatccataaagttcaatgcaaggtaatacctcagggccaagcggtgtggtggtaatttccaaatgtgacaacaagtaagacacgatttcagcagcttcttgcttgaaataccgataacggtcatcatgcagtaaagccaacgcctgatacatacccatttctttcagctcggttttgtcgattcgctcctgatagagattatagtaaagcatagtggcatacagccgcttgtcttcgtccatataacgtttactgcccgacaggaaatcggccacgaaatgcaagtaagaggcggtgttatgatgtatcagattgcccatgcctttctccaggcgtcgagtaatcgcatcatcggtataagagatacgccctgcggcccgtttgagagacgtccaacaattgtttcccacatataccacacggatgtcttgtccgttattttccaggaattgagtaagcgtgggcagcgtggtataggaattgatttctttcaccaggcgatttttgttgtagatggcttgctgaatgttctctaagatatattgtcgggcctgcttttccatgatgatgctgcacccggtaggcaaaagggtgaaaccgtttgctatctgctgggcaatgttcttttcgggacgcagagtcagggcacggaattttgaggcgaaatcatactttttatgagcttgtgccacaaagtcgaggacggtgagttcggtcttccctggagaaagacggagaccacggcccaactgttgcaagaagatggtcaaactgtctgtaggacggaggaaaagtaccgtatctacttcgggtatatcaactccttcattgaagatgtcgaccacacacaggtaatgcaccagcccgttacggaggtcttctgccaattgcttacgttgcggttgcggtgtatcggaagtcaggctttttgcattgaatccgtatttctgaagctgaagggccataaagtcggcatgtttcttattgacgcagaagcacagagcgcgacaggtgtattcatcggccaggtaacggtgtaaggcatctacgatatgttgtgcccgttcggatacgcacagtttgtcggccagtcggtcgataacgtaacgttgtccgttccaaagggaatcatcggtcaggtcggtgtcatcggtcacgcacaggtattggaagggagtcagcaatccggcctgaagggcttgcggaaggcgtatctcggcactgatgcgtccgccaaaatccgggcgaaggtcttttccgtccatacgttccggggtggcggtgagtccaatcaacagttgaggatggaaatgcgaaaagagtttccgatagctgtcggcctggctatgatgagcttcgtcgatgacgatgtagtcgtaataatcggccgggagctgcgaaaacagggcttcaaaccgtgagttgaacatggagatggagacaaacagatgggcatagtcggcctcagtttgaggatcttcattaccgacccacaacgtgccgaaattggcgtcttgcaacacgctgcggtaggtgtgcaaggactggcgaaggatttcttcacggtgggcggtgaacaggatgcgactggttcgccctactcctgtctgctgttggcagaaggactgataatcgaaagcggaaatcacggtctttcccgtaccagtggccgccacaaccaagttacggaagttaccacactcctcacgctctactttcagtttatctaaaatctgcttctggtgtgggagcaaggaataacgttggtacacgaaagtatccggttttcctttgaaggtgttgcgatgcaattcctgttggaacttttcaatacctcccagccggaaatcttcaaagttcgggctgttccagtacaagtcgaaggtggccagcgcggtcttgatgatgtgcggattttctacactcgtcacgcgcatgttccattccaatccgtcggtctgtgccgacttagacaggttggatgaaccgatataggcagtgtgcatgccggaattacgcacaaagatgtaagccttggcatggaggcgttcgatgtcggtttgataagaaatatgaatttccgtatgaggtagttcggcaagttgctgcacggccttggtctcggtcgctccgcaataggttgtggtgatgatacgcaaacgggtaccttcgcgttggcagaactttttcaagtcatccagcagcaagcgcacaccggagagcttcagaaaagaaacaataaaataaatctcgtcggcactggcaatttcccgtcgaatttcctcgcccaatgaaaggacactgtttccacccgtaaacaggttgctcacccggaaaccggattgtgggcggacggtttctgaatgactgtgcttttgcaggaggttcttttgctgggtcatcacctccatcaagaggttggaagtgtcggctatctgcacttcttccacaagcccgtactcggccaatatccggttaaccagtgtcatccggtcgtgcatatcttccgtgtcttccagtttctgccggatggcttttgccagataatccgctaatatcttaggggattcggccgcgtctatctgttcacgcaggcaaaccaattgctgggattcagcctcttgtatatctcgttcaacttcctgattgataatattctcgtagattcctttctttaacatcgcttgctgatttcagaatttcatgctgaaagtacaaaataaaatgaaactaactgacatatttttagaaagaatcccgaaaaactttatctttgtgaatataaatcattgaatattatgaactcattcatacccatcttttcagccttcttcatcctgctcggactcctcgtctggagattccccaagctcattgcaggatacaataccatgacgcccgagcaacagaaaaaagtcgacgtcaaagggctcaaagccttcatgtgccgtgtgttctgtgcaatcggcatactggttttcgtgagctacctgctcctgcggctgttcatggacgaagcgtcggctatcaacatcagctccataatagtacccataataggggtaatctatctgctggccggtggccaacggtacgaccacaactaacgggatgtctgggcgataatctccttcaccacctccacatcggccggaagccacgccacgctgtccagttcttccagcctcagccaggcagcactctcatgctctttcagcaccagactgccggaaacgaccgaacagcggtagcaatgcatcgtgaggtggaacgacggatactcgcagtttaccgtggtgaggaaggcatccacccggatgtcggtgtccagttcctcgcggatttcacgcaccagggcctcttccctgctctcgcccggctctacctttccgccgggaaattcccaatagtctttgaactcgccatagccgcgctgggtggcgaagtactttccgtcgcgcaccatcaccgctgccactacctcgatgtgtttcttcacttcgcagcactctccttcccgacggatacaccagaatgggacggacttggcatcagtaaactctttcatccgccaggctgattcgaaaccgctggccacgaagtgcatgggcacgaacaggccggtacggaacacatcgagaaactgacgggctccgcgggtgtagccgttgccgatgcgcccgtctacagggaacatcaccacgtcgaaactgtccgtgagcttgcggatgtctttcaactcgcccaggaaacgcttttcttccttggcagggtcaatgtcgatgccgaagtcggggctgtagaccagtcccccgtgatagtcgtcggtcaggaagcgggcgtaccagttgttcaggtcgccggcatggaagatacgctcgccgtcggcctctatcacccacgacacgccgctgtcattacttccggtggccgtcacgcggaggagttcgtcttcccacgtggcacctttccccagccaggcgtcggcttcttccttctgcgcccgacggtgttttaggatgtcttttgaaaggatgtagcgcacgtttgctttccgggtccgccaggagaagatgtcgcggttgaaatggtcttcatggaaatgactggagaaaacgtacaggggcttgagcgactgcaacagacggggcatcacgccggcagggtccatccagtagtcaaacacgaggatgcagcggtcggtctcgagggcaaagccgctgtggaagatataggtgagttgcataggctgcttgaatagtttgtacaaagatagcgtttttgccggaaaggagcagccagccccggggattaaggggctgtgccctccactttataacggatggagcgctcgctgcgttgcaggcagtcggtgaacacgcgcaggtcgttggtgtagttcatcagttcccacacgagttgcacttcttcgtcagtccaggctgctctgtggcgcggatattttttccggatttcctgcaaaggttccggattggaatcttccggaaggttcagccggctggcccgttcacgaagatgtgtcagcacgctgttccaataattgtgatagagaggctgacagaagaagtctgcacagagaatcttctgcttcggcggacagtagaaaagagcctccctgtcaatggcttccagttcttgcatcagctggtcgatacatgcagcggcggccggagcctgcaccaggatggagcattcatggcgagcatcgtccttgttccgtcgggccgaaagccagttgaacgagccttccaccagcaggcggtcgtccaccaccaaggtcttgttgtggatgcctttcaacacccgcagactgacatggtgttctaccagtgcacgacgggcttgcagactttcttccttccacaagccgtttttcttatccaggtaatggtcggtatacaccaccacttctaccccacgttccactgcttcctgaatgaggggcagcaagtggtcgctttcaagggcgcggatggacaggaagggcgacactatcaccactttccgacgggcggtctgaagagcctgacgcaagatgtccgtatgggcctcaagggtggacagacggcagactgcggccgactgacggggcacgtcgagcgactggctcaggaggggttcctcgtcctggtagagaaagtgggaggagatttcgctctgctgactgtcgaacagccacttggccagattgcccgacggggtgtcccggtcgggatggaagatgttcatgtggccgaacaccagaaagtggtattgcgcacgcgacacggccacattgagcatattgtactttccgcctgcttccataaagtaggaagtgtcttcgggtgaattgacgggcgagaatatcaccagcgggtactgggctccttgcagcgagtggacggtgccgacggtcatcgtaacgaagtctgcagcatcgggcagtccggacagcagcttgcgcaaaaggcgttcctgtgccttgaacggggtaacaatggcagctacctgaggaataggctttccgtaggcttcttccagttttcttttctcgcgcgacagccatttcacaatggcagcagcttcggcttcattgaatcggcttccggtctttcccttctggctgtatccgttcacatggacatagcctttggagggaagagccgcgtatttcggacggtcgcctttcaagggaagcagtcgcccgtggtacacataatcgttgcaataggcgataatggagtccaggcaacggcggtgctcgcgcaggaaggccccgcgttcaccgtccacctgatagctgccactcttgcgggccattttcatcaggtttccggaagaggacaggaaaccgtgttcgctcaggaaagcatacaacggatcttttgacgaggtaaccaccccggagcggcggagattgatgaaagaatattgtccggtcacgggccagatgggttctatctgttcgatgtcgcccacgaggatggcttgccgggccagactgaacgagggtacggccagctcgggcgacacctgcccagactcatcgacgataagcaggtcgatggtattgtagaggggcacggagggattaccctcgctgctgcaggtcatatagcgcggaagagaatggaaggtggagatgaacaccggcatcacgcaggccagccgtctcagacgctcgaggtagacggcacggtccgaacggttcaggtttccggagcaacggctcagacgacggatgaactcggcctcacggtagtggatggcataccagaacatctggtagcggtaactgatgtccaggcgcacggccatgtcttccatgcagggcaggttcctgtactcctctccttccgtcagccgggtgtagcgtgccctgaaatcgtcgttctcctcccagcgggccatggtttcttcgtaggcggaagaagtcttgcggaagtgttgcatcatccggacaagcagattctttcctccatttacaccaccggattctttctgtgcagcagcctccaagcccgtttcaatccagtccctcagcagggccatctgtccacgaaggtagtgctgacactctgtttcatccttgcacgaggtgtggaagtaacggttgaacagctccaagtagtacgtgcggtactcgtccacccgctccggattgtcgtacgtttcgggaaagccctttcctcgggtgttcagcatcatggcatagcgttcggtaagctcttcctttccggacaggtacaagcctaacgtatccaattctggcaaccagcgtgccgccaggcctacctcggccgcatctgtctcagcgacttccatctcgaaatccttaaggatgttggtaatggcctggttgttgaccgaactggccacaataagctcaggttctctgtccgtcagcacggaatgcaccagccggttggcaatgaccgtctgcaggaaagtggtctttcccgttcccggaggaccgttgaccgcaaaaatccggctgccacggggatgggtgtacatggcgagcgtttcacgctgggaaacggataaggggaaatcactgctcatctgggccaggtgccgcttgttggcataaatctcccgacgggcaggaagcggaagcgacggttcgcactcgcagcgcgtcaggcactccagcagcgggaggtcttccttgcagtccagcagcttgtcgtacaaccgcaggatattctgtgccatccccgtgacgggcgccttcgtgataaccatctccggctggtcggggtaattcatttcggcaaacgtcatcccggtagccttccggaagagggcttcgcatgccttccagtattcctcttcggtagccacatcggtcttgaacgcactcagcaggctgtccacctcgtcgagggaagcaagggtacggtcgtccttggcattgggcgaaaggaacttgcggacgaacatcggcacacggtccatcgggttttcaggcaactgtaaggaaccgtcgggtcctagtgtcgccgtaatgaagaaagggtattcaggaaacatcttaccaataggtttgccattctcatattcgggaagcagcacacagggggcaatgcgcaccttacacttcttcccgtcttcccttccgtcggggaaaagcagttcgatgtcttcttccggtattgactccggcatacggtcttcaaacgccagcgtcacacgcggctctttatagaacatgctgttactccactcagcatccagcaggcagtttttccagtatttaagcagtttcttgttcataggtacacaataagggacaaaaatagacgcattccaccacaatcgaaacaatgcggcggtaataaagcgtaattttacctaaaaacaattgaagagatatatccttcctgctcgtaaacccgatgataacggtgaatcatctctaccagcggaatgaggcgtacatcctccggcaccaaatggcagaagcgtgcatactggcggtcgtacagggtggcatttccattcttcagctttatttcaatatcgtccggcacaaagaaagaagcccggttgcccaggtatttatagaattcggtgagatagatatgaatgccggccaggtcgaaatcgccaaaatgcaggtaatcattgggaaccgaaaggagccagttgcgcaagtcatccgactgaggataacgtgacacaaggagtactttccgggccttgaacaaatgtcgctgacggtgaagcagacgaaagttgtcgccgttctccacacccaccacaagcacatcggagggtatgcggaatttctccggttcctgcacaaaaaaagccataccttccagcggagagagggtgaaagatttctctcccatcgtcacctccaatggctcgcaacaatttaccagaaagccgcggaaggtccgcacacgaacaagcttggagtcgccggtttcatttaccagtacactccggtccagatcagggttatgtccatcggtcagctctatccaccgggacaattcggccccacccgtatacttgttcttcacataacggatgcttgcctctacatccagcaaccgataagagttacggcttccatgagtgatgacagaaagcaacccttcttctttcagttcatcggcaaaccagcgcgggaaaaggctggaaggaagtgtctctccctgtataagacgaagtaccttacggcatattgacggagtaaattttttctgttccataaactattgcttgcgtgtgagtaaaggtaccacctgcgtaaaactctgagcatccttactcaaaagataagtataacgataatcctccacattgtaggtggtaggagaactgttgaccagtacgatattccggcagttggcaaaagccagaatacctttgacattgttgggatgaagcttgccgatttcgtccatcatgcaatgaatccggaaatctccgaacttacgcgaagctttctccttgaacacgttaatcagcatgatgttaaccatggctttcaccagaatatccgttccgtccgaccccacattggctatcttttcggtccatccggtatcgttatcattctctttcacacggaactgcagattgaacgtgtcagacaataccaggcttttgcgagacggattgtctctcagctgccggctgaatgaataaagatacttcaccgccttttcgttcacttccatacgcgagtcctgcgagaaaagatcaagggctcccatgttaaactgatgttcttcattgaactgcttgatttctaccagaagctgcatcagcttgtcatcgctggcctgagtccgcagctcgatgccacggatgactccggcaaagttccgccttacaaagtcttcgtttatggcacgaatggttttctgtatctcactttcatgctgggtcaaatcgcccgtctccttcgagattcgctggataatgttggtgtagcgctcactgatacgtgtctgatattccacaattttgttatcttccacaaactcacaaagatttgccgcaaaatcatagaaatcagagtcgcttaccaacgtttcggggaaatggaaggtgttcttagccgtaaaattgccatggaatgcattgaccgcccgcttgaactggtccagctctctatgaatggaaataataagcgacttcaagtctccgataatggttccacaagacttccgggtaggacgtatttccgaggtatacgactcggacggacagaggtcttcgtctgcacggaaagctttcaggctggccaaatctttatgaatgtctgtatgctcttttctcctggcttccagtatcttatcctcctcactctgctggcttagcagacgctccatacgaagcttgtacttattttccaaatcttccagctgcgtatcgtttgtttttttctcgttgcgcagttgcggctcccagtcgaaatactcgcgtttgtctttctcaaaatcggataccaaagaacgtttacggacaatgtattccagctcctgacggatgtcggccatacgtttctcgtaactggtaatgacagacatatccgccccgcttccttcaagttccttggcctgtgagcgccgcagctctgcctttttcgtttccatttcaattcgctgacgagtaatctcttcatggataacgccagtttcctgccgaacaacctcctcttcagccttttccgttttccgcagttcttcggccaattgcttcagacgtttctccttttccgcccgtaaacgcttgtcttcatcttcccaacgcacctgttcctgcgacttctgagctaactgcaattctacctgctctgtttgctcccgtttccattcggcctctttccgctgccaggaggtaagttcagcctgcaagtatttccgtctggcaggaatctgctgcaactgggcctccaaaaggtactgtttgtcggctacctcccgaatctgccggttatatttcttctttatctgcccgagtgtttcctcccgacgtccgttcaactgagccaactcgcggacatacgactcacgggcagcttccttttcggccagttcttcctttaaacgggctggcgtacgcaattctttcgccactcccgaaagttcaactcgtacgccgaacagcgtattgtcactgtccccagccaataccggatgcaaatcctgtgcatacagaatcaactcttcatctgccactttcccgattgtttcctgccaccccggcttgtgcgcgtccagccattcacagaaggaacctttccaacggccaagaagactggtaagggtttgaatttcttcgtccaatgccgtacgacggcgcaccagttcctcagcttcttgcttgaactgccactcactctctttcatctcatcgctacatttctgtcgcaactggtcgcacgtgagtttcaggccggctacctgccagcttgtctgcctttcttcatctttcaatgcatccaactgttcctgatagtccccggtttctttctcaaaatggcaagtcagctgaatgcgaatcttctgctgacgaagtgcggaaatttcttcggtgagccgtatccggttttcattccacgttttttgtctctcctcatacatattccgcacgtgtacctcttgttcccgatagcgggcatacaattcatttctccagacgttcaattcattttcacgggccagcacagcctttcgccgttcattctcaaatgcggtaaaagccgcctctacctttccgaccagcaaatcatatttctgcaacacatccctataagtagcggtcaattctgcatacgtctgtttcaaactatcctgctcatgcagcaaggctgcttcacctgccacacgccgcatcacctcttctatgccttctttctcataatacaagcgcttttcgcggatacgcttcaaatcgtcggctatcgccccttcccggcgcaccagcttgtcacgttcggcagaatacttgcctctttcttctcctacaagtcgcaccaaccgtgcccgcttctcttctgcttcctgaatctgttcctcgagcaccggcaacatgtcatgagctgctttctctgcataattcaattcagctctaccttcttccagctgcttttgagaataaagtaagctccggtagcgctgaatgacttgttccgcctgcttgcgcaccacaatctccccattcttgttgggacgcagccatcgcatgacatcatcatattcctgctcaaaagcttctatctggctccggtaataagtcaggtcgatagacacatcttcctcattcatggactggatgatggtatctttcacaaaatcggcatccaaacgggaattcaagaatacatgctgaatagtacgaggaatgttctgatacttactactttctacaatggcaaacttacgataagacaccatatcgggcttgcggttgtttccaaagatgatgtcacgaaacatttcatagctcgtaacaagcggagtaatcgtacaacgggcatccgactcaagaatacgtgtacgcacctcactccaatcggcagatacctcgtgacggtcgttcacaaaccatgctttccgataaggagcatctatcaggcggaaagcagcccgtcccatagatttggacaccactacggaatatgcgctattctcacgtaccacctcgtacacgatatacgagttggcatagggcaaataaaaagcgtcgaaattctgcttttctttcggaatgcccagatgcagtttgtcggcattatagaaaaacaagatagctcgcagaagggtactctttcccactccctgcgtaccaatgaaatgcacattgccgtccatccggatttcggcataaggaatatgcgcactattcaggaatatgactttattcaggtatctcatcgcttgtatcctccaatatcgtgatgcagtccaccatttcttccatatagtggaatgcggttagtactttataggtttcatcgtgctcgttctccagttcaatcatcccagccttttccagctctgccaccagtttctctacaacctctccgaatttcttcttgtcggaaaacaagcgggaagccttttccttcagttccatgttacatcctatctgcacctcaatatctgcccgtcggaacaggaatccgggaccaaaagccgaatgatacgttttcaggaagctcaggtaatcaatccatttgcctacagcttccagctttcgttccaaatcgacccgggtttcctgacgtgtaaaaaggtaatatccgttacccgcttccaaatagaagccgatgcctttataataatcgtaatactccgtaaaatcttcttcaagcgcatcatagtaccgcttgacggttgacgagacactattggcggaaataaatcctcccctgctcagaatattgaatatttcttccgtgtatttcatcgttttatcaagtatgattaagggttttgtcgtaaataaatcaaagggtactccacctcagaggttgactcataacggtcggtaaaatccagctcatccgcatactgtgaagccagctggcagaaaaaaagcagcttgtcttcttccgccaccgacttgccataggaatagttcattacgaaccggaacaaatgtgtaccagaggcagcaaaggcattgaatacttcctgcaagttgaccctgtccattacctcacctgcctgtgacagataactttccggaatagctccggctacattccgcggaccacgtgagtcctgcttccgccgcgacatcaccttacgaatcaactccaatgccacttcagaagtatgcagatttgacagagacaacttgatgcgatagttgggctgcggttccatccacaccggattcttttcgccaatgacccggcgaatatctgtattctcttcaagcaggaactgatcgcgcaggtacttcaatcgccttaccttttcaaaaatacgattctggtaggctatcaagttcaagtaatgaataatctgtttttctatttcaatcagattatgatacgaatcgttcagctgaagctttacatcactcaccacagcccgcatctgtacatccatagccacacggaaaaaggtaggctgctgtgagtctatcacttcttcactccgagttataagcaaagctatgttacgccgtttttcatccagttttttcaatttggccagtttcacctgataatttggttccgttttataagttacatccaaattacgtttcaagtccatcacattacgtacggtagccagtgcaatgtttttcaaacaacgtctcacctctcgctgatacgcatacttccgctgttcattgttctccttcaggaaataatcgatgttatcattcaaatgattcagataatcttgcacgaacgacacattgatttcctcgtttatttgcagaacctcttcgaaaaacttcaagtacaagtcttccatttccaggaaatcaccgctttctcgcagcacaccgtattcaataagaaaacgaatacgctcttccttgtattcagttaattcaagggcataatcataacggaatgagagctgtttacgtttgtaaaacatttccttgagcaacactttttcacgctcaaacattttcacaagttcatctatagaacggaatgtattcatcgtatcaaatataatgtcattaaagcaaaggcgtttttagcaaagatagggattatccggaaatctccaccaaatatcgttatcttttcataagacgggatgcggttcagcatcgtcttttctcaaaagcgggcttcgggtttgacactgcattcacctttttgtatctttgcgccaaactagctgctacatgaaaagtacgaaacaagacataaaacgcatgcagtgggaaaacgacccactttaccggctgataagaaccatcaagaatgtaatggaccgatactacctcgaccctctcattggattgctttttccaacggcgggcgacattttctcttcggccatgacactgccctttctcacggtgtcgctgttcaaaatcaagtccattcccctcaccctggccatcctctacaacatgctggtggacatgatgctgggtatcattccgctctggattggcgacctgctggatattttcagccgttcgtacgcgaaaaactaccggttgattgtgggtttcgtggaaggtgacaaagaggtgattcaagaggtaaaccgcaaagccctgctgacagccgtgggcatcctggtgctgtgcgtaattatctactgggtggccaaactggcagtctacctgactacggcgctatggacatggataagcggactgttttaagtatcccggaaaatacgtacctttacgccaaaatcattcataatgggaaagaaagaatacatgcaggccaacaaggactggctggccgaaaaggcaaaggaagagggagtgatgccgctcccgaagggtatttactacaaggtgctggcatcgggcaagaacgacggcaagcatcccacaccgcggagcatcgtcaccgcgcactacacgggatggactattaacggcaagaagtttgacagcagccgcagcggtgcgcccgtagccttccgcctgagcgacctgattgagggatggattatcgccatgcagcaaatgtgtgtgggcgacaaatgggaggtgtacattccgtcggaaatgggatacggcaagttctcacagcccggcatccccggcggctctaccctgatttttgagattgaactgttcggaatagcctgagtgcaggctattccaatactaaaagggttatcgaatattacttattctctgagaagtaggctttggcaaaatcacattctgtcttcgaaaaacattacacatttctgcacaacttgccaagcaattctttatcttgcgcaatcatttcattcatctcgatatgcgtgcacgcttcctcacgtaaaagtcgcgcactggaagactgttccgacagattccacgtaagtaacaccacgtgaatcttcagcgatttcaacttcttgaccagcatttcgtggtcggcatctcccgtaatcagcactacataatcaaattcgcggaacacggaaagctcataggcctccaaagcaaaccacacatctatccccttttctacgaccgtaatatctccatctctctgtacttcccgcaggtgcttgtaatggaaaattacatcattttcaatcagactgtcttcaaactttcgctcggaaaacaacagatgtttgctattggcatcattcacccgataacgcccccggaaataatggctttctgtaatgtaacaattggttatttccaacccactccgacgcgcaatctccgcacgaataaaatcaaacaaggatttgattttaatatttaaagacaattgatcggacaaggcctcatttatctttgaaaaatagcccccatctatgaaaataccgattgattttgattctgttatcattgttgttatatgtttttgatagtaatatcgcaaggtaggacatctttcaatagcaggcaactgaaaataaaagaaaaatcgcagacatgtatctaaaacatatttttcatgcagttcctttaaattcctttctcttctttgaaaagattatcagagcaacctgatgggcctgcttcttcgaacagccgttccatccttttccaatggggttacaagctcatagtccccggtgtcatcatttaattgcaagatgaccagctgaccgtttttaggcgaacgcatctgttcaaactcttccacggtgagatgaaaccagcgcatgacgaacaagcgtatggccagtgaatgggttatcagcacacaattttgtggataatcttcacgcaagaagtcacgatgaagcgaacctaagaggtcattgatacggtcgtacacatccgtgccggcttctcctcccggaaagcggaagtagaaaatgccatagtccctgcgctctttcttcaactgttgcaactcggcatatgtacgaaggtatccccattcctgttcacgcagacgaggctcctcgctgtattcaaactggtttctcgggaagctgagggctatgttctcaaaggtggaacgagtacgccaaaagggagagacataaaaatacatggactcctcgcccaccagttccttcaacttttgtccggcttcacgggcctgagctactcctttttctgtcagttcgatggtatagtccggttccgtggcaaacttgctttcgtcggtattggcatggcattctccatgacgtataagaataattcgatgtggtttcataaaagattttttattttatcattctttttcatctttctaaatatgtacgatgtataaaatgcaatatagaaattttttcttacatttgaccataagatgtgatgaaacgattcatatacatatttatcatgctgctttggatgatttcttatgccacggcacaagagtctcttccctgcaggggaaccgcaaccaccgtattgaacgtgcgttccggacccggcatcagctatgcgcgcgtcggacagctcagtcgcggacaggaggtcaatgtcattcagaaatcaagcaacaactgggtacagattgagttcggttcacaaaggggatatgcctactccaaatacctgaaattctctcctttgccccaaaaggcaaactctccgcctgccaaatcgtcttccggttcttcctcatggagtttctggtcaatagtatggaacatcattacctggggactaggtatttatttgggactggtggtgctgtactggctgctgaaaatactcattatctcctatttcatcgtatcggccagccttacctttacgttcaggctgttgagtcttcctttcttctttctcaatgccctgcagcgatacctggcaaagccctggtttatcttcttcaagaaaaaccgtttcagcaacgccaccaatgagaacctgcgtttcattttctatttcctgcaattcccgttctatgtcctgctgtttccattgagaattgtcaatgctgtctttttcaatctcctggtacattgttccttcgaaatgttcaattatgtgatggaagtaattttaccctcagaagacaaggaagggcatgacgattttatccgatggattttgttcttaccctacagaatcatcaaatacgtggtatggcatggctcgctgaccatcattgaaagcgcgatatggacggtaatagaagtctttttacctactctgaccctctttcacggtacctccaatgacgcagccgaatccatcgtagcgtgccctaaccggggaagctaccggggacgggatgtaggcatctggcgcgtaggcggaggaaattatgctggaaacggcatttattttgcaccggcacgcagtacggcccgacattattccgcaggagccatcatcgtctgtcgcgtaacactgggaagtacgctcgaccttggcatggcgccttatcatgtgtattatcaatgcgggaaacccaacgcactggaagccacccgctggggactggagaataattatgtgacgggagaatggtggcgtcccgacgaaggatggtgggaatactgcatgtacgactggcagaaccgctacaactacagctggcgcatacgtccgctttatgtaatcgatcttgatagcggctacatacagcgcatccctggtggcatgtgccactggcttttccggaaaatggtcattatggacctgctaaattccatgctcggcgattaaaaaaatgcggggaacggcttgtctaccattccccgcattttcatattgtttacagtgcagccttcagaatggaaaggatgtcctgctcgttcagtggagcaaacgtgcccggtgcgtccagcccctcattcacggcaatgtggtgtgccatttcttccagacgggaatcgtcgatgcctacctcacgcaaagtcatcggcatgcccaagctcttgaagaactgtgcggtacgtgcgatggtctgctcggcaatttccgacggagcctgatcggcagccagtccgaagacgttcacaccaaatttcacgatgcgttcctgtgtgcgctcgttgagcacgtggcgcatccagtgtggtgtaatgatggccagaccttctccatgcgtaatgtcataatatcccgacaaggcatgttcgatgccgtgcatgggccagggagaaccgccggtaccgagagccagcaggccgttgcagccaaaggtgcaggcatacatgatttcggcacgtgcttcgtaatcgtccggtttctccagtgcaatcggagcatattgcatcagggtttttaccagtgtttcacagaaaccgtcggccacggaattggaggcatgagtgaaatactgttccatcacatggttgatggcatcggccactcctgccaccgtgtgcttggcattgaccgtaaaggtgtaggtcgggtcaaggaaagagcaggccgggaacagatgcggatcaatgtaggccaccttgtcgttggtctctgtgcgggaaatgactcctccggcatcgtactcactgcctgtagcggccagggtaaggatgtccacaataggcagtgcagccagcgtaggagccttgccgataatcaagtcccaggtctcgccgtcgtatttggcacctccggcaatggctttcgaacagtcgagtaccgaaccgccacccacagaaagaatcacgtcaatctgctgttccttgcagatgcgtacgccttccactacactggtagagtatttggggttcggctcgataccacccagttcaaaaatctcaaagtctttcaacaattctttcacgcggtcgtacaggccgatacgcttaatgcttccgccaccgtatgtcaacagaatgcgacgtccgaacgggcgcatcacctctggcagtccagacactacatcccggccaaaaatcagacgggtcggggtttgatagtcaaagttcttcattgtttgttcctttttgtcgttttaattatggatgtggcaaaattacgcaaaagaaaccatagacaatgatacaaattaccgatgtttctaccccaatgctcgattttacatttgttttatatctgccattctataacacggatataggtattcccgagaataagtattacatttgcccgaaaataaaattgacagatgatgaaagaagaagtgatagaactggacacagtggataaatacaacaaattcttcaaagtggagacgtatcatcccatggttaccgtggtagacctttcaaagattactcagcctgcacagccatttaccataaattatggcatctatgccttgtttctgaaagatacgctctgcggagacattacctacggccggcagccttacgactaccaggaaggaaccattgtctgttttgcaccgggacaggtggcttccatccacgcacaggaaggaacgcgtcccaccggatacggactgctcttccatccggacttgattcatggtacccaactgggacacgatatccggaattattctttcttctcttacgaagcccgcgaagccttgcacctctcggaagaagaacggcacacggtgatagactgcctgcataaaatcgatacggagctgagacgtcctgccgacaagcacagccggcggctgattacggccaacatcggactgctgctggattactgcatgcgtttctatgagcggcagttcaccacacgcgaagcctccaacaaggacatcatcgtacgctttgagcagctgttggatgagtacttcgacggccagacacctcaggaagaaggattgcctacggtgaaatattttgctgaacgggtattcctctcgcccaactatttcggcgacatgatcagtaagcagacgggaaagacggcttccgaatacatccagtcaaaggtaatggaaagagccaaggacatgctgctttctaccaccaagcccatgagtgagattgcctacagcctgggcttccagtatccgcagcacatgagccgcatgttcaagcggctggtaggtcacagtcccaatgaatacagaacgcagcaaaggggctgaaccgtctttttacttgttcttctgattatcctccgcatacttggaaggagacacgccaaacatatccgtaaaatgcttgcggaacgtgggcagatcattgaagcccacgcgctcggctacctccgtgaccgggagactggtttccatcagcaggaatgcggcctgcgtcatgcggatgtggcgaatcagttccacagccgacaggtcggtgtgctgtttcagtttgcggtagagcgtagcctgactcatgtggagttctccggccagcactttgacattaaactcgggattgctggcatggccctcgatgcacgacagcacctgttgcatgaactcactttcggtgccttcgggtttctctgccgatacggaagaagtatgtagcagcgtacgggtgtaaatctgcttcaagcgacgacgcatgtcgagcagatgggccaccttggccagcagcacttccggattgaacggtttacgcacataatcgtcggctccacgataagaagcttccacactgtccttatcctctgccttggccgtgagcagcagaatgggaatgtgagccgtttccttccgcttgcgcaactcggcacagcaggtaaagccgtccatcaccggcatcattacatccgacagtaccaggtcgggcacttgttctacggccaccttcactccctcttccccgttctccgcttccagtacccgatagtatttcttcatcaggtcgcgcaggtaacggcgcatgtcggtattgtcttctatgataagcaccgtctggcgggcggcggtacgttcttcctccgttttctgtgaggtttcttccgcttccggcaacagcatcaggtctgagatattttctcttcccttttctttatcatccgcgtccggagtttcatcccacgtgcagtcgtcttcttcgaaatgcgattttccttcgggcaggtacacagcgaacgatgttccttttcccggttcactctccacgttcactcgtccgtgatgcatctccacgatgtgcttcacgattttcagtcccactcccatgcgggtagaaactgacggatctgcatcgccggttacgaaaggctcaaaaatatgctgcagcaatccggcatctattccttttccggtatccgtcaccgaaatgcagcagaaaggtttctgatcgaactccttccgttctaccgagagactgatttttcctccttcgggtgtgtatttaaaggcattcgaaatcagattctgaatgactgatgaaagtttctccctgtcggcccatatcgtaatatactccgccccctgcacccattcatacgttatccggcgttcagctgccagtggctgaaaaccttctgccacatccctcatcagggatagcacgtccactgcagacagacgcagtttcaccataccggcttctgctttctggatatacagcaaacggtcggtcagagtatgcagtccttcggcatacttaaacatgacggacagacgactataaaacggatgtgcgggtgtaatttttgagagcagttcacgtagcggagacaagataagggtaagcggagtgcgcagttcatgggctgccatcgtgaagaaagcctcacgctccttgcgaagttccacttccttgttacgctccatattgaccgtaaacagttcatgttccagacgcagttcgtattgtatccgcttttgcttcaatcgcacgcgatgcaggtaaatcagcacgatactaatcagcccagccgccacaagcagacggaaccaaagagtttcactccagtgaggagcaatcaccaccttcagggtactgacatccccttcactctggtcctggaaaatggtcttcacctggaaagtataggtaccggccggcagacggtcgtacgagattttttctccttcatcggccataatccattcctcctgataaggatacaggcggaaaaggtatttctggagtttggtcagatagagcagattggtaaacagcagggagaaactgcggttctcatgcgtcaggtgcagttcagaggtataaaggagcgactggggcaacaccacctgcccgttgaccttctgcccgatttgtacgggggtgtggttcacttccaggtcggtaaaaatcacccttcccttttctttcggataattaaagcgaaggtcggaaggacggaaataggtcagcatactgtggtttccccagaaaagaaagtccttgccgaaaaagacggagcggttactacccgaaatgtaatagttataaaatgactgcaagtgacggctcaaacgggaaatgccggagttggaacctacccaaagagagtgatcgttgtcttcggacagtgtggtcacgaaattgctgcacagcccctgggcggtagtataacgggtcaggatactgtctccttccggcgaacaggccaccagaccgcttccggcgtatcctgcccacagcttcttgtctgtcccatacagcagggcacggacttcgatttccgtatccggcataccggccctggcttcgtatccggcatgtgtccgcagcaccttggtaccgctcatccacagccgaagcaagcctcttccggttcccagccataaagtctgattatcaccggccgccaacgcacgtatatggatatgatccgggatttgcggattactccagccgatgtgcgttgaagttccccgctgaaaatccacccagtacaggccgtcgctggtacccgcccagcactgttcgtccgaaaccataagcaggctccataccactggagaaggctgtccgagagtgccaatccgcatgtcatcccatttccggtcttttccgtaacgaagcacccgtccgtcctgcgtaccgaaccaaaaacctccattcttgtccggcgaactgcaaagcacggttttcaggcccggaatgccggtatcaaacgattcaaacgacagcgaatgtgatacgtcaaaaggctgcgtgctccgcaacactcccttgtgaaacgtagccagccagacgtaaccatcttcgtccatctggatgccacagatttcattggaacgggtctgtgcatactggtgataaaacagctggcgcaagtcggaaaacagcacccctcctccttcggtgccaatccacaacaatccttcctcgtcgtaatagcccgaaatcatgcgtgtctcgaaatattgttttccgttatgaatgaaagactgaaaatcgcgcaacttgattgcccgttccggcgtaagactcaacaaagtatatccgttccatgtaacggccaggtaccgggaattccctatcgggagcaaacgaaagacatcgttatgcgacagctgctcccccattctttctgaaatatactgccagtgatgcaactttccgtttgtcaggtcgtaaccatacaatccgtcacccacggtaggaatccagatgaacgaatcatcgttcagcaaagaagatacccacctgccggacgacaactgcccgtcacagactttcttcaactgcctttgtccgggcgtaaaacgatagacagttccattccggcttgcacaatacagcatcttcccgtcttctcccatacacagcaccacaaacggatcactttgtgaattgttcaccacatgacgcacagagacaaacgctgtgtcctgcacaaaggaggacgggaaattcacttccgacaattcaccggaagatacgccccagcaactgccgtcagaatcggccacaaaatcggcgaacatcacaggctgtttgctcaccgaatcgcacacgggaagaaagcgttcgtatttcttgtcgaacaagaacaggttctgttccgaacggagaagcaggtaatccgtatccagcgatactaccctgtctattctccggtaagagattcccggcatccggaacactttgaaggtacgtccgtcgtaacggttcagtccgctgccggttccgaaccacatgaatccctccgtatcctttgccacggaatgaatgtcattgtccgacaatccgtcgttcatgttcaatacctgaaaatccttctcggaaagtgtctgtgcacccgccggaagaagcgagaaaatacaaagaaaagatacaatgagcaggcagtatatatttttcatttctcagattaagctatgtaatggttgcgcaaagaaacaaaaatcttgtctaaaaagtcagaataccggtaaaaaaaacagtttttacccccataaaaacgcagataagaagaataccgactgttaatgcaacgtttacccactgcccttacaccatttatttcggagatttgcaacaggaaaacctgaaaacttgtttaaccatctatatataaactttaatcttaaaaccatgagtcacatgaaaacacaattcatctctctgctcatagctttgctggcgggactattaccactgcaagcgcaacaggtgagcatctccggaattgttacagacaagaaactgaatgagcccatcatcggagcttcagtagtagttaaaggtacaagcaacggttgtatcaccgacctggacggaaacttccagctgaacaacgttgcctcaggaagtacattagtagtttcctacatcggttatcaaacccaggaaatccccgtacaaaaaggaaagacttcttatcaggtcactttgtcggaagatactcagacactcgatgaagtggtagtagtaggtttcggtacacagaagaaagtgaacctgaccggtgccgtggccacagtcgacaccaaggctttggaatcaagacctgtgtcacaagtgggacaggcattgcagggtaccgtgccgggactaaacttatcaactgctgacctgggtggacagctcggacaatccatgaaagtaaacatccgtggaacaggaacaatcggtaccggttcaaagggtgaacctcttatcttgattgacggtatggaaggaaatatgaatactctgaacccggaagatattgaaagcatctccgtactgaaagacgctgcatcttcttctatctacggttcacgtgctgccttcggtgtaatcttgatcactaccaagaaaggtaaagctggaaaaatgaccatcaactacaacaacagtttccgttattccggtccgaccaacctgccgaatcagctcgattcttaccgctttgccaacttcttcaacgaagcagccgtaaaccagggtgataaaattattttcgacgaagaaactatcggacgtattcaggactacatggcaggtaaaatcactaccactaccattcctaacggcagcaactggcatttccatgaaaaagccaatgacaacgtcaactggtacaaaacacatttcacctgggcctggagtcaggaacacaacctcagcatgagcggaggaaccgaaaaactacaatattatgtatcgggaagttatctgaaccagaacggtaacctgcgctacggtaatgataacatgaaacgttacaatctgagtgcaaaaatcaacacaaaaattaataaatatattgatttcaacctgagcacaaaattcatccgctacgaccttgacaacccaatttatctggaagaaggcggcttgctgtatcatgacattgcccgtatgtggccgacaatgccatttaaagatccgaacggacactatatgcgcaacggaaagctggcacagctgactgacggcggtcgttccaaaacacacaacgatgacatctatctgcaaggacaggtgatactccacccgctcaagaactggaatatctatgcagaagctggcatgcgcgtcattaaccagaacaagcaagtgaacctgaacaagatttatgaatatgacatcaacgacaatcctgtagaactggcattcagcggtagctatgcaccgggagccacttttgcccgcatgaactacctgaatagcaacttctacaccacttctttctatactgattataccctcgagaagaatgaccattacctgaaagtaatgctgggtatgaacacagaagaatacattgtacgttctctgtcggcacagcgcagtgatgtcatttcaggactgattccggaaatcagcgcttcggtaggtgaagataaaatcaacaatgacgacaataatcctacccaatacagaaactgggctaccgccgggttcttcggacgtatcaactactcttataaagaacgctatttgtttgaagccaacctccgttacgacggttcttcacgtttccttcgcgaccagcgctggaacctcttcccgtcattctctttcggatggaacatggcacacgaatcattctttgctccgctgaccaaagttatcaatacgttcaaaccacgtgtatcatggggtatgctgggtaaccagaacaccgatgagttctatccgttctatctgacacaaaatgtagtagccaatggcggaagctggctgatgggcggtgtacgtcctactatttccggtgtgccaggactggtcagcagtacacttacctgggaaaagatttacaataccaatattggttttgacttcggattgcttaacaaccgcttgacaggttcatttgaatatttcatccgccgtaccaaaggtatggtaggtcctccggctgaaatcggtgctgcactgggtactacactgcctaataccaataatgccgaactggaaaacaagggatgggacttgaacatctcctggagagaccgtatcggacaagtaaactacgatttgggcttcaacctttccgacaatcgtgcaaaagtgaaaaaatatccgaatgcatcaaaagctatctatcaggccgacggtgtaacctatgcttactacgatggaaagactatcggtgaaatctggggatatgaaactcagggtattgcacagagcgaccagcagatgcaggaatggcaggctgcaaacgatcagagcaaactgggttctcagtggggcgctggtgatatcatgtacaaggatttgaacggtgacaaagtggttgacgatggttccaagacagtagacgaccacggtgatttgagagttatcggtaacagcgaacctcgtttcaactttggtcttcaccttggtgccgactggaaaggcttcgatgtacagatgttcttccagggtgtattgaaacgcgatctctggctcagcggtccgttattctggggagctgacggaggagaatggcagtctgtaggttacgaagaacacctcgattactggcgtccgcaaaacacaacttctatcttcggtccgaacgcagatgcctactacccgaaagcttatatcggcgacaaaggagataaaaacaaactaacacagaccggttacctgcaaaacggagcttacatgcgtatgaagaacctgcaagtgggttacaccttcccgaaagcatggaccagcaaagtcaatatcgaaaaagtacgcgtgtacttcagtgcagaaaacctgtttaccatcagcggtattgctgatatgttcgaccctgaggccattgcagccaacggatggtccagcggaaaaacttatccgctttcacagaccttctcattcggtatcaacgtgacactctaacccttaaacatttgaacgaaccatgaaaaaaaatatattattcgccattggaatgacagccctggcctgctcctgcaacgattttctggacagagagccaatggatgcagtacctgtagaaaaatatttgctcagtgaaaatgacctggcagcctatacggccaacctatataactcactgccttcgcataaacccggagtgtacgacatcggtgtcttcgcaaccgataacaacagtgacaaccaggcagcttccaacccggaaaaactgttcgtaaaaggtgaaaaccgtgtagcacaatcaggaggtgcctggaacttcagcgaaatccgttcggccaactacttcatcaaccgcgtacgtccgttgcttgaagccggtgagctaggtggcaatgaagccaacaacaaacattatctgggtgaagcctatttcttccgtgcattctattatgccaacaagctggactcactgggcgacttccccattatcaagacaaccattgccgacaattatgaagcagtaaaacaagccagccagcgccgtccgcgcaacgaagtggcccgcttcatcattgaagaccttgactcagcttactactttatgtcgaacactcctccggccagtaaccgtctgaccaaggattgtgcagccttgctgaagagccgtgtagccctgttcgaaggtacatgggaaaaataccataaaggtacggcacgcgttccgggcggaccgggatggccaggtgcacagaaagactatctaaaaaactttaccatcgacattgatgcggaaatcagctattttctgaacgaggccaaaaaagccgcccagattgtagccgataactatccactttacaatgactatccggctttgttcaacagcaactcattgagttccatgcccgaagtcttactgtggagagcttacgatgccaacctgacaccagctgtgaaccacttcgtagtgggctatctgcaacgtaacggaggcggaaacagtggctacacccgcagcatgattaatacctacctgatgcaaaacggacttcctatctatgctgctggtacagattacaaaggcgaccgcacttatcaggatgtagcagaaggacgtgacccgcgtctgacttacaataccctgatgccgggcgacatgctgactgaaaaggctgccatgaccgaagccatcattgacggagccggatattactatcgtgccccgattacagaaatggctgaaaaccgcagcacaaccggttattccattaagaaaggtttgaataccgagccttcacaaggtcctaccttgccgtctactaccgcatgtgtcatcttccgcgcagctgaagcttatcttaactacatggaagcagactatgaactgaaccactcgcttgatgcgaaaagtaaaggatactgggaagccatccgcagacgtgccggtatggataccgactacgaaaagactaaccgcaatacagatttgacgaaagaaatcgacctggcacgctactcaggcaataatctggtagacgttacgctctacaatatccgtcgtgaacgccgcgtggaactggctgccgaaggattccgcctgcgtgacctccgccgctggtgtgcactcgacaagatgcagaactatcaggtagaaggattcaacctgtgggcagagaactacaagcgctatgccactccggatgccggcatcaacggacagaatttcgacaaagcactgactgttatcgacttgaaagaagccggtacagaaggagccaacgtttctgccaagagcgatggagactacctgcttccgtaccgtgtcatttccagcaacattgcctataacggttacaactggaacccgaaccgttacctcttccccattgctttcgatcatttccgtctgacaaccgaagtggaaggttcaggtgactatacttcctctcctatctatcagaatccgggatggaagattgaaacaaacagtttgcccgaaggcgaataataatatcccaaccttgtaaaccccaaaggagaagttcttatgaagatcactttttcccctgtaatcttcttaaaaacttctccttttccgatttttctcctacctttacctccattgatatgaaactgacactactcgtttatacctctgccttaggcgccgtgcttccgttctcggcatgttcccgcccggaatccaagccctcacgtcctaatctggtcttcatcatggccgaccagttcaggggcgatgccatgggatgcatagaaaaggaacccgtacagactccgaacctcgaccgcctggcttccgaaggaatcctcttcaccgatgccgtgagcagctatccggtatcatcgcccgcacgggccatgctgatgacggggatgtatccggcaaccaacggtgtgacgggcaactgcaactcgcagaataccccctacggcgtggagctttcgaaagaggctgtatgctggagcgacgtgctgaaggaagaaggatatcgcacggcctacatcggcaagtggcatctcgatgccccgtaccgcccctacgtggatacgtacaacaacaagggagaagtggcctggaacgaatggtgtccgcctgaacgtcgccacgggttcgacaaatggattgcttacggcacgtacgacaatcacctgaaaccgatgtactgggatacgaaatccggacgggaggagttctactacgtcaaccagtggggaccagcctacgaggccgaccgcgccatcgagttcatccgtacggaaggcacaaaaaccgaccctccctttgccatggtggtgtctatgaatcccccacatacgggctacgaactggtgcccgaaacctacaaacggctgtacgactcgctcgatgtggaagcactggcccgacagttgccctacattccggaaaagggcactcctgaaggcgactacttccgcgaaaacatccgcaactactacgcctgcatcaccggagtggacgaacatgtgggacgcatcgtccaggccctgaaagactgcggtgtgtacgacaataccctcatcgtcttcacctccgaccacggcgtctgcatgggcggacacggagtagaaggcaagaacgtgttctacgaagaatccatgcgcatccccatgatttgctgctggaaggacaagctgcatccgcagaagagtgacctgcccatggcgtttgccgacctgtatcccaccctgctctcgctcatgggaatggaagcacagataccggcatccgtacagacacacaactgggggccactgttgctaaacgaggaaatacaaacgcctgaggaggctttccagccttattacttctgcgtgccttcggattctacttccggccgacgcggcatccgcaccgcacgctacacgtatgtgacagaggtggaagaaggccagcccacgcacgtatggctgtatgaccggcttcacgacccgagccagctgcacaaccttgcggaaagccagccggctctttgtgattcactgaaacgaactctttcttcatggctcgaacagacccatgacccatttgaaaaatacttgaaaccatgaatatgaaaaagacattactgacactactgacactgttcgccctctgcgcgaccactaccgcagcccgtaataccgactacgaaggtccccgcccggctcctcaccagcttaaatggcacgaagccgacctgggcgtggtgttccactacgacctgcacgtattcgacggactggtgtacggacagggtaacaaccgcatcaacccgattgaggactataacattttccatcccgaccagctcaacaccgaccagtggattcagtcggccaaggctgccggagccaagtttgccatcctcactgccacccacgaaaccggcttcggactgtggcagagcgacgtgaatccttactgcatgaaggccctgaaatggcgcgacggaaagggtgacatcgtgcgcgacttcgtgaactcctgccgcaagtacggtgtgcagccgggcatctacatcggcatccgctggaactccctgctgggtatccacaacttcaaggcagaaggcgaaggcgagtttgcccgcaaccgccaggagtggtacaagcgcctgtgcgaaaagatggtgacggaactctgcacccgctacggcgaactcttcatgatttggtttgacggcggtgccgacgacccgaaaggaatgggtcccgatgtagaacccatcgtgaacaagtaccagcccaactgcctgttctatcacaacgtgaaccgtgccgacctgcgctggggcggttcagaaagcggtaccgtaggctacccctgctggtcgagcttcccctacccgtacagtcacagcaacgccactgacggagtgaccgaccacaacaagctgctggcacacggcgatcccaacggcaagttctgggtgcctgccatggccgacacacctctgcgcggatacaacggacgccacgaatggttctgggaaccgggtgatgacaacaaggccgtctatccgttagccaacctgatggaaatgtacgaaaagtcagtcggccgcaatgccacgctgatggtgggacttaccccgaatcccgacggattgattccggaaggtgacgtgcgccgcctgcaggaatggggtgccgaaatccaccgccgtttcggccagccgctagcaaaaacttcagccaccggcaagaagaaagtatcgctctcgctcggcaaggcacagcccgtcaactattaccagattcaggaagacattaccggcggtgaacgcatccgtgcctatcggatagaagcccaggtgaacggcaagtggactaccgtggccaaaggtacttccgtggggcacaagcgcattgaatccttccctgccgtagaggctaaatccttccgtctggtagtagaagaatgcacggctgagcccctcatccgaaactttagtgtttatcacgtaaatccttaatctaaagaaagatattatgaacaaaaatcttttagcacttctggggatagcccctgtgctcaccccgttgcataccctggctaacgaccgtcccgacccacgtccgaacatcattttcttcctggtggacgacatgggatggcaggacacttcactgcctttctggacagagaaaaccatgtacaacgaacgttacgaaacccctaacatggagcgtctggcccgtcagggaatgatgttcacgcaggcctacgcctccagcatcagctcgcccacccgctgcagtctgatgaccggagccaatgcggcccgccaccgggtgaccaactggaccttgcagaagaacaagaccaccgatgcccaaagcgaggtgctgcaacttcccgactggaactacaacggcattgcgcaggtggaaggtacaaaccacaccttcgtggccaagtcgttcgtgcaatacctgaaagacagcggctaccacaccatccactgcggaaaggcacactggggagccatcgacactccgggagagaatccctgccacttcggctttgaaacgaacattgccggccatgcagcaggcggactggctacctacctgagtgaactgaactacggacacgacgagaaaggcaaccccacctcgctcatgtcaattccgggactggagaaatactggaaaacaggtaccttcgtcaccgaggccctgacacaggaagccctgaaagccctcgacaaggccaaggaatacaaccagccgttctacctctacatggctcactatgccatccacatccctatcgacaaggatatgcgtttctatgacaagtacaagaagaaaggcatgtcggacaaggaagcggcctacgcctccctcatcgaaggcatggacaagagtctgggcgacatcatggactggctggaaaagaacggagaagccgacaataccatcatcctgttctgtggtgacaacggaggatatgccaccggtaaggaatggagagatgaaccgctctacacacagaatgcaccgcttacctgcggaaaaggctcggcctacgaaggcggtatccgcgaaccgatgattgtgagctggccgggcgtagctcaacccaatacccgctgcgacaagtatgtcatcgtggaagactatttccccagcatcctcgaaatggccggcattaccgactggaaggcaccgcagaccgtggacggcgtaagcttcgtgcccctgctcaagcagaccggcgacccgtcggaaggcagaagcctttactggaactgtccgaacctgtggggcgaacaaggcccgggcatcggcgcaacctgcaccgtacgtcagggaaaatggaagctgatttatttttacgaaacgggcaagaaggaactgtatgacattccggccgacatcagcgagaagcacaacctagccgaacgctatccggacgtagtaaaatccctctcggccaacctcggcgagttcctccgcagctccggtgcacagcgcccatcgttcaaaaagaccggaaaaccgtgcccctggccggacgaaatctgaccctcgaaaaacgcctttgcgtttcaatgataacgcaaggacgttttactgaaaactcctttacgttttatttcaagcgtaaaggagtttgaagtgtactgaaaatagttgtcagtttgaagattaattcctgacaaagt

SEQ ID NO: 3785 - DNA, 11965 bp, Unknown
  gut microbiota DNA sequence
actggttatcaatcaattatcaaacaaaaaaagtttgccgatcggcaggatttttttattgaataggctgggatagttcgcttaatgtttttccttcataatcacagatagcttgtttatatgccatcggaatttccatgggttctttggtcagtatatcatatcccaccaatacggtacggcactggcacttcaatacaccgctggccttattgaaggctcgttgtagcatggttaaactcttatgcccgaggtggatcacagtcgtttcaatcatgagttcgtcagaaaagaatacaggtgctaaaaagtctgcattgatattgactactaccacattgaatttgtcgcgttcttcttccccaaacacatcgcggaaataggatgttttagccaggtcgtacaacgaaaaatacacggaattattcatgtgaccgtactggtctacatcgctgaaacggatttgtactgggatttcgtgcttgaattggaattctgcgttcatagtaatgcttttaagttttcgccaaatgtacatctttttttcataaatctgctatcaatggtggaatatttcttacttttgtccgtcagaatgatttgtagataaataatattatataagatggaacagaaattcaacaaagagacactttgtgtacaggctggatggactccgaaaaaaggagaaccccgtgtattgcctatttatcaaagtacaacgtttaagtatgataccagtgaacagatggctcgtctttttgatttggaagacagcggctatttttatactcgcttgcagaacccgacgaatgatgccgtagctgccaagattgcggcattggaaggaggggtaggagctatgctgacttcatcgggtcaggcagctaacttctatgccgtatttaatatttgcgaggcaggcgaccattttgtctgctcgtctaccatttatggaggtacattcaatctgttcgctgtaacgatgaagaaactgggtattgagtgtacctttattgatgcagatgctccggaagaagaaatagaaaaggctttccgtccgaataccaaatgtttgttcggagaaacaatctctaatccgggtatcaatgtgatcgatattgagaaatttgcccgtattgcccataaacacggagtgcctttgattgtggataatacttttgctactccgattaactgccgtccttttgaatggggagcagatatcgtgacacattctactacgaaatacatggatggacatgctacttgtgtgggaggtgccattgtagatagcggtaattttgactgggatgcacatgccgacaaattcccgggattgacgcagcccgatgagtcttatcatggacttacttacacaaaagcttttggaaagatggcttatatgacgaaggctactgctcagctgatgcgcgatttgggttctatacagtcaccggagaatgcgttcctgttgaacctgggactggaaacattgcatttgcgtgtaccgcgtcactgtgaaaatgcgcagaaaatagcggaatggctggaagcaaatccgaaagtgaaatgggtaaactattgcggattgaagagcaacaagtattatgaactggctcagaaatatatgcctaacggttcttgtggcgtgattgctttcggcttggaaggaactcgtgaagaggctatcaaatttatggatagtctgaagctggcttgtattgtgactcacgtggcagatgcacgtacttgtgtgttgcatccggccagccatacacatcgtcagttgacagatgaacagctgattgaagcgggtgtggcccctgatttgattcgcttgtctgtcggtattgaaaatgtcaacgatattattgccgacctggaacaggctatggcacaggtttaaaagttttaaaactgagatacaaaaaaaggaggaacaaacattcctcctttttttgtatctgactccggtatttatcggaaagatttctgataaatctgtaacacttcttcgtcggtcaacggacgcgggtcgagggtaaacaatgaacccatggtgtcgcgtgcattttgtaccatgagagggagttcttcttctttcactccccagtcgctcagcttcaattggtatacgttgcattctttctgcatgcgtaccagtgcatcaataaaatcgctgggacggttactcttctgctgagtcatgatttcggccattttcatgtaacgtttcatgcagtcgttacggaatgtttcgaaatatgcttcgctgatggcaatcagtccggatccgtgcggcagttctggatggaaggcactcatggcatgttccattgagtgctcggaaatgcagcaggaagtggcttctactagtccggccaatgtgctggcccatgctactttggcgcgtgccttgaggttacgtccgtcttttacagctaccggaaggtatttgtacaataaacgaatggcttcaagggcatacaagtcgctgataggagtggcgcagtttgctaagaaaccttcggctgcatggaagaaggcatcaaatccctgataagctgtaagatgcggagggatggaaaccatcaattccggatcgataatagaaagtacagggaaagtcagtgtgcttccgaagccgattttttcttttgcttcttcattggtaatcacgctccacgggtcagcttccgtacctgttcctgcagtggtaggaatggcaattacgggcagtgccttggttacaggacgtccttttccgctgcctgccgggatgtaatcccagtaatctccgtcgttgcaggccatgacggcaatggctttcgcagagtcaatgctgcttcctccgccaagtccaacgatgaaatcgcatttctgttcacgacagacagatgcagcttccattacgtgagatttaatcgggttgggcagaatcttgtcatagacaatagattctgtattgttttcttgcaacagttcaacgactttgtctaggtagccgtatttcttcatggaggttcctgacgagatgacaatcagggctttcttgccgggtaacttttctgtcgccaactttcttaactctccgcatccgaacaaaattttggtcgggatgtgcaaactgaatacaggatttgcgttcataatatagctatttaaagttcatttacccaaaagtacgaaaataaaaacagaatggttcaggagggatgttaaaaatgtctttttgtgtgtggtggtatcaaataaaaaaggctgccggtgagggcagcctttggggttaaaggatatataagtagattattctttatccttgtggttgttctgcggacgacgttcgcgcttcggatgattttcagtcattccttccggtttcggaagcaataccttgtgtgacaacttgaacttaccagttttcgggtcgatgtccagcaacttcacttcaatttcatcaccttctttcaatccggtttcttcgattgtttcaaagcgtttccagtcgatttcagagatgtgcaacaatccgtcttttcccggcaggaattctacgaatgcaccgtaaggcatgatagaacgaaccttaccagtgtatacttcacctacttcaggaacagctacgatagccttgatcatacgcattgcatcgtcgatgcatttcttgtttgttcctgcaatttcgatgcggcctgcaccgtctacttcttcaatagtgatagtagcaccggtttcttcctgcataccctggataatctttccgcccgggccgattacagctccgatgaattctttcggaatagtcagagtttcaatgcgtggagcatgaggcttgagttctgcacgaggttctgcaatgcattcagtcagtttgccgaggatgtattcacgtccttgtttagcctgcatcaatgctttttccagaatatcgtaagtcagaccgtcacacttgatatccatctgagtggctgtgataccgtcgcgtgtacctgtaaccttgaagtccatgtcacccaggtggtcttcgtctcccaaaatatctgacaatacagcgtatttatcttcgccggcattcttgatcaatcccatcgcaatacctgaaaccggcttcttgataggtacacctgcatccatcaaagccaatgttccggcacaaactgtagccatagaagaagaaccgttagattcaagaatatcagaaactacgcgtacgcagtaaggataatctgcaggaatttgtcctttcaatgcacgccatgccaggtgaccgtgaccaatttcacgacggcctacgccacgctgtgcttttgcttctcctgtagagaaaggagggaagttgtagtgaagcaggaagcgttctttgtgctggtcgagtacatcgtctacaatcttttcgtccatctttgtacccagtgtaacagtactcagagactgagtttcaccacgagtaaagatagaagaaccgtgaggacctggcagcggactggtttcgcaccagataggacggatttctgtagtagcacgaccgtccagacgtttgccttcatcaaggatacaacgacgcattgcttctttttctacgtcgtgatagtagcggtcaatcatcggacccttttcttccagttcttcttcagagaactgagccttgaattcttcgcaaacagcatcaaaagcatctcctctttcgtgtttgttcttgttgcctgattttgcaatggcgtatgctttttcgtagcaagcatcgtgtacagccttgcgcaggtcttcgtcattttcttcgtgacagtattcacgttttacagtcttgccgacttcttccatcagttccatctgagctttgcagtgaaccttgattgcttcgtgagcaaacttcatggcttccagcaagtcttgttctgaaacttccttcatttcgccttccaccatcatgatgttttcataagtagcggcaaccatgatgtccatgtcagcacgttctagtgcttcgaatgtcgggttgatgacaaactgaccgtcgatacgtgctacacgtacttcagaaatcggacctccgaacggaatgtcagaaacagccagtgcggcagaagcagccagaccagccagtgcatccggcatatctacgccatcagcagaataaagtatgatatttacgtaaacttcagcatgataattgtccgggaacagagggcgcaatgcgcggtctaccagacggcaagtgaggatttcgtaatctgaagcctttccttcacgtttggtaaagccaccggggaaacgtccgaatgcggagtatttttctctgtactctacctggagaggcataaaatctgtaccgggaactgcatcttttgctgcacaaacagtagccagcaacatggtgttacccatgcgtagcataacagtaccatctgcctgttttgccagctttcccgtttcgagtgtgatggttcttccatcattcagctcgatcgtcttaacaataggattgatcataaaaattgatttaatattatttcatctaaaaaagcgtacaaagataatgttttattatggataaaagcgggtatttatgtaaaagtttcagtatgaagtgctttttatataataatttgtcgtaaaaacaacggttttcgtcggttggatgatggatttatcttttaaaaactttgtgacgtcatgaaaagccgtatctttgcaccttgaatttacataagaatgtgagattaaagaaaatcaggtatgagaagaaatacttatctgttaatggcattgctgtcggccggactgatggcatgtcacaatgagcctgctttcaaggtagagggaacggtatcgggtgcagccgacaagatgctgtatctggagcataccagcctggaaggtatagtaaaagtcgattctgtcaaattggacgagagtggaacgtttcacttttcgggtgctcgtccggattctcctgatttttatcggcttcgactggataatcaggtgattaatttctctgttgactctactgaaacagtgacggtgaaagccgataattccggttttgctaccgcttatcaggtggagggttcagaaaataaccagaagataaaggaactggtactgcttcaggcaaatttgcaggagcaggtgaataaattaggacagtccggacttcctgccggagtagctcaagacagtctgttttcattggtgaatgcatataaagatcaggtaaaacgcaattatatttttgcagctcctaacaaggcatacgcttattttgctttgttccagcagttgaacggctatatgatttttgatccgttgaccagtaaggaagatgtgaaatgctttgcggcagtagctaccagtttgaacaacttgtatcctcatgccgaccgttcacgcaacctttataatatggtaataaaaggtatgaagaatacccgtacgccccaggtaaaagatgtgacacttccggctgacaagattcaggaagcttctatcattgatattgagctgaaggacttgaacggtaagacacatcgcctgacagacttgaaaggtaaagttgtcttgattgattttacagcctattcttctgccgcttcgggtgtgcgtaacttagctttgcgtgaattgtataacaaatatgcttctcagggactggtgatttatcagatttctttggatgcagacgaacatttctggaagacagctgcagataatcttccttggatatgtgtccgcgacccgcaaggaccttattctacctatcttagcttgtacggtgtaacccagttgcctactgcattcctggttaaccgtaataatgagttgagcttgcgtgtggaggaaaagacaaatatggaagaagccatcaagaatttgttgtaacatgttgaaaagcatgtacggataaacttgactggtattgtaaaaagatttatctttgtcgcaagatataagactctgagaaagagaggctgtatcaaaataaaaattgatttgtcagattgtcattctgaacaaagtgaagaacccgtttgtttcccatcctgtggagggttcactcttcgttcagaatgactttacttttgtgataaacggttcttattttgaacagccctttacttttgttgaaaataaataatttaataacgaatatttaaggagaaaaattatggcttacatgtcagaagaaggctatcagaaactggtagctgaattgaaacatttggaatcggtggaacgtccgaagattgtggctgctattgcagaagcacgtgataaaggcgatttgtcagagaatgcagaatacgatgccgcaaaagaggcacaaggcttgctggaaatgaaaatcaaccagttgaaggcaaccatcggtgatgccaagattattgatacatctaaactgaagaccgacactgttcagattctgagccgtgtggaactgaaaaatgtgaaaacaggtatgaagatggcttacactatcgtatcagaaagtgaagctaacttgaagcagggtaagatttcagtgaatacaccgattgcgcagggcctgttaggaaagaaggtaggcgatgtagcagaaatcactattccacagggaaagatctctttggaaattatgggtatatcattttaatgtataaggcaggtccgctttggcgggcttgccttatttaatatctaaacaatatggcaacaatattcagtaaaatcattgcgggcgaaattccgagctacaaggtagccgaagatgccaatttttatgcgtttcttgacatcaatcctttggtgaaaggacatacgctggtagttcccaagcgggaagtagactatatctacgatttaagcgatgaggagctggctcagatgcatgtgtttgccaagcatgtggcgctggctatccagaaagctttcccttgcaagaaagtaggtgaagctgtgattggtctggaagttcctcatgcacacattcacctgattcctatccagaaagaatcagacatgttgttctctaatccgaaacttaaactttctcaggaagaatttactgaagtcgccaatgcaataaattctgcttggaaagctgaaagcaaataattttcttctcaaaaatacctttgatataaaggattcttcgtattttcaggcgtggttttcagttgggcagattccatgaaaaccatgcctgttttcttttagaattgtagcctatgcgtattagacgaatttctttcttcattcttctttgctgtctgtgctggaatgtttttgcagctgaatatcagataaaaggagtagtgattgacaagtctacccgtcagccgttggagtttgtgaatgtgctcgtagtgggactgggtatcggggcttctaccgatgccaacggaaattttctcatcactcaggtgccaccgggtatttaccgtctgcaagcttctttccttgggtataaaacagaattgactccggaatatcgggtgaaccacgtgacaccttatgtacagattgaactggaggaagaaaatgcgtcgttgaatgaggtgattgtgacagcttctccttttcagaaggtaccagagagccctgtcagccttcgggtgattggcttgcaggagattgaaaaagctccgggtgccaaccgggatatttcaaaagttgtacaaaactatccgggggtagccttttctcctataggctatcgcaatgacctgattgtgcggggaggtggtccttccgaaaaccgtttctacctggatggggtagagattccgaatatcaatcacttcagtacacaaggagcttccggaggtcctgtcggactgattgatgccgatttgattcgtagtgtgaagttttatagtggggcattcccagccgacaaaggtaatgcgttgagtagtgtgctcgactttagtctgcgtgatggagacatggagcgcaattccctgaaagcaactttaggtgcctcagaggtctcactcagttccaacggacatattggcaacaagacttcttatttggtgtcggtacgccggtcttatttgcaggcattgtttaaaatcttgggtctgcctttccttccggcctataccgatgcttcctttaaaattaaaacccgttttgacagccacaacgaactgactttgcttggtcttggaggaattgaccgcatgaaactcaatttgggaattgaaggagaagatgctgaatatatgctcagttaccttcccgaaatcaatcaggaaacctataccgtaggaggtgtgtaccgtcattattcccagcggcatgtgcagtcaatcgtattaagtcaaagctatctgaacaaccgtaatgtaaaatatcgtgacaatgacgaaagtagcgaagaaaatctgacgctgcggctgggctctatcgagcaggaaaccaaattgcgtatggaaaacacctcttcatggagcgtgtggaaagtaaaagccgggttcgacctgaattactcccgttacaaaagcaatgaataccgtaaggtctttaccaatgccctgcgggaatatgattaccataccgatttgtctctctggcgttggggaatgtttgcctcagtcgattatgccgctcctgataaaagtttcacggcttccatgggcgtacgtaccgacggaaataactatagcgataaaatgaaggaattgtggcgtcagctttccccccgtttgtcagtatcctaccggttgattgaggggcttactttgagtggtcatgtgggactgtattatcagcttccttcttataccgccttaggcttcaaaggggaagaaggagagtatgtcaaccgtcacttggattacatctccgtgtcacaggaaagtctgggattgtcatggacacccaacgaaaatatggagctgtcagtggaaggcttctataaattatacgggcacatgcttttctccttgtccgaccagataccactctcctgcaaaggaaatgattatggaaccatcggaaatgaagcactctcttccgaagcaaaaggtcgctcgtacggggtggaactgatgttcaagtggctgctggcacaaaagctgaatctctcttcctcgctgaccattttcaagagtgaattcaaggatggcgagcaaggaagctatgtaccttccgcctgggataatcgttttattctgaatatgagtggaacctataacttccccaaacattggagtttaggagctaaagtcagttgcataggtggttctccttatacgccttacgatgtggaaaaatcttcgctggtggaagcttggaatgtgcagagacgtgcttactatgattatagccgctataatcaggagcgtttgccggtcttcggacaactggatgtgcgggtagataaaaccttctatctgaaaaaatgtatgttaggcttttatctcgacatccagaacattacggccagtaagctgcgtcagcccgatgccctgatgagtacgggacagattgaaaatccttccgcaccgctgagtgagcagcgatatgtcatgaaatccatccggcaggagagtggcacgttactccctacgttgggaattacctttgagtattaagtctggtcgctataaaaagaatggcctgtctctctgtttgtggaaagacaagccattctttttatgtgtgagaaggtttaccgtaactcatgaatacaactcaccaaatttcatttctgcatcgttgacaaatttccggatggcattctgatcatcctttttgcagatgagcagggcattcccctgttctgccaccagatacccttccaagtcttgtacaaccactaatttatctttgggagtcatgatgatattgtccttacagttatatagcaacgcattactgtgcgtcgtcacattctgattttcgtctttgggagaagcatcatacaatgcgttccatgtacctatgtctgcccacccgaagtcacaaagcagtacatatacattgtctgccttttccatgatgctataatcaatggagctgttggggcaggtactgaatttcggcatgtcacattccacttgcggacatacttccgccatcatttcatggaatgccttcattatcgttttgacgtgccatacaaagatgccggaattccagtagaactcattgctttgtacaaatacctcggcaaattcccgtaacggcttctcgatgaatgtcttgactttgtagaaatcttcttctttttcttcggaaacctgaatatagccataacccgtttccggatagctgggtttaatacccaatgtcaggagcttgtccgagtgggatgcaaattccagcgatttcagaatatcctgtttgaactcgtccatttttaggatcaggtgatcagaaggagctaccacgatgctggcatccggattgattttttgaatgacatacgatgcgtatgcaatggcaggtgccgtattccggtgttcttcttccacaatcaggttagattcgctgaaaccgggaagcgagtttagtaccagttccttataatgctggttagtcgtaatgaaaatattctcagcaggaagaatctgcctatatctttcgtaagtttgctgcaagagtgtctggccagttccaaaaaagtctagaaattgtttgggtaaggctttccggctgtatggccagaaccgacgcccggttcctccggccatgatgatgcaataaaaatttttactgtccatggttaatgctggcattaaagtttgatgctaagatagggtttattttgtaagaaacccccgaaaaggattctaaatagtgttagaaaactttttttcaacttttttgtccgtattccttgcactattgaaaaatatgtgtacttttgcactcgcaatcagaaatgatgcccagatggcggaatcggtagacgcgctggtctcaaacaccagtggagtaacatccatcccggttcgaccccgggtctggg

SEQ ID NO: 3786 - DNA, 5865 bp, Unknown
  gut microbiota DNA sequence
ggaaagtgaacgggtatgcttcggaatatgtatcatattcattttaaatcaatgtagtatggtaacaaaattcaaaaatcatttagcaagaactaatcttgctagaaacactattaactcgtatgtgtggactatagagtattttctcaaccattatggggaagtgaacaaaaggaaccttttagcatacaaggggtatttagtcgaaaacttcaaacctcaaactgtcaatcttcgtttgcagggaattaacaagtatctggagtttacaaagcaagaaaaattgaaagtgaagtttgtaaaggtacaacagaaaaattttttggaaaacgtaatcagtgatgcagattataaatttctcaaagccagacttaagacagatggttatgatgaatggtattttatagtgtggtttatggctgctaccggagcacgagttagtgaattgctccatatcaaagcggaacatatcggtgtaggttatcttgacctatatagtaaaggtggaaagattcgtaggttatatatacctaagactctacgaacagaggcagataaatggttaaaaggccaaggcttaacatctggatatatctttctaaatcgttttgggcagcgtattaccactcgtggtatagcatcacaactcaaacattttgcagaaaaatatggaatgaacaaagaagtggtttaccctcattcattccgtcatcgttttgccaaaaactttcttgaccgtttcaatgatctcgctctacttgccgaccttatggggcatgaaagtattgaaacaacccgcatttatcttcgccgtacagcaagtgaacagcaaaaaattgtagataaggtagtaaattggtaaaattactttagaagcgtgttttcacgcttctaaggctttttggatattatcaaaataagaatataattcttctatcttttgaacgatgcgtttttgttccataagaggtggaagtagaaactgaagttcacatataatttttgaacttatattaggctgtgctcctccatatgctaacttaaggattttttcaatttgtgagaacatataataattcctatattctggtagtaatacatttttcttaatctttaaatttcctactcgctgatttaggtatgctatattctcattttcgtaaactcccatttttcctgttgtagctccagacaatgctataagtaaatctccatttttaactataaatctatcatctacctcttttttaacaaagacacatccattcaaattaatagtattatctgaaatattggagattcttactaatggtataccttgttgtttataatcatcgctgctaaatgcataaccattctccaacgcacaaatctcacctaatttacacataatccatcctgtaggaactttaaacgtataatgcgcgttatcacaagtaattttagtactcggattgatgcgcttgagcagttctgatgcgggttcgtcatttggatcttgtggtacgagtttaccatgaatggcaaggtctagtatcttgcttttggcttgcttgatgattgtctgtaagtctgatttattttggtctatttggttaatgagagaaaaccaccgttttatttcttttattatccgtttttgctctgtaagaggtggtaaaggaattggtatcgattttattaaatctgtattaagatttggttgggctgcaccttggtctatttttctaaaactatctgtctttgatttaagaaaccaatataaatacagctgtatttctttatttatataaagaaaagcagcaataccatcgttaaaagtcgttgaaaaagtagtaattttaggtacgcctaaagttgctccactatttgtcaataataatgttccttcattaaccaatctagtttttttcaggccggcctcttttattgtatattctgctttatatacatatatctcatcatctttagttaaatctgctacttttaaaaaaggaattgctccattataatatttttcatctcctgcaggacgtggagatcctcctctaacaacatcacataattcatctactgtcgtccatacccaattattgggcatctcaaatgatacgttctcataatggggcgtatcggaagttttagctgtttttttactacgctttatttttccctcttttatcaaacgttccttctctgctttaatgcgttcaagcaatacagatgcaggttcgtcattcggatcttgaggaacaagtttaccacgaatggcgagatctaatattttttgacgtaatttctttgtatccatttcggctagtctttgtttaagaatagattgcaaaactcattcagctgttgctgcatgcgttcttgcggaatgagaatgcgtttgtattcagcaatcatggtaggactcatgcttcgactcatagcatattctactactacccggtctgcttcagggcagagaatgataccaatagacggattttcgtttgaacgttttacatcccgatcgagtgcttccaaataaaattctagttgcccaaggtcacgaggatgaaacttcgtcttttttaattccacagcaaccaatgcctgtaaaccacgatgaaagaacagtaagtcagccttgaatgtagatgttccaatattaagacgatattcctgatccatgaatataaaatcctttcccagttcaagaataaactgtttcatgtgttctaccaagccatttcttagtattgattcgctatgctttttcggcaaattaagaaaatctacaaacagagtatctttaaacatgattggtgcattaggatatctttcgagtaatccttttgacatattgtccttattacctaataaacctacataagtctgattggaaatgcaacgttgcatttctttataagaaagatgttccttgttggcgtaaagaatgtaaaatatacgttcctcattacttttgcagcggcatagaatttctatatgattggacaatgtagttatttccaatattttaggcatttgtccagctgttgactgaacaatttgtgtaaccattgactgcacaattgtagctgattcttgtacatggttgcccacttcaatttgtgcagatgctgtctgcacaaattctgtattcaaatattgttttattgccgctataaatgtttccgatgaatactcatcataaaacattaccatattataaatacttctcttgctatatccttttaggtcaggtcgttgagaacgtatatattcggataattgtgaaacgactttacttccccattcttcgctcctcagtttggccgatacatatccgcctacatgccatgcagtaagcagcaattcttcgttgactactcttgaagcattgcttttatgttggagaataatatctacgatttctccaaattgctgttctattgatattgcgatgtcggtattcttcatacgcttaatcttcatttatgtttgcaagcagtttttcaagttctgctactgctgcactaatagttttacttttctcttttatatcagccatcaactctgccaaggagcggtcatccgactctcctccttgttttatccaggttatatcaaggcttgtcttgtcacgagtgagaatatcatctactggatatttacgccaacgaccttgaggattattgactgcatcatacgtttctttgcgtccttctaaatttcctgcattatagcatgtgacaaaatcatccaaatggtgtctttccaatttattagtagccagcgtatgtttgatatcagtacgataatcatagaaccagatctcttttgtcggttgtccttttgtgaaaaacaatacattggcctttacaccttgcgcatagaatataccagtgggcaaacgaagtatcgtatgtaagttgaagtccgaaagtaatttcttgcggattgtttctccggcaccgccttcaaaaagtacgttgtcaggtaatactatagctgcacggcctccgttttttagcatcaacatcatgtgttgaagaaaattcaactgattgttcttcgtttctacatagaaatccggacggttaatatccacagaacccgccggacgagtgccgaaaggagggttggcaagtattacatccacgagagtagagggctctttttccaaagaatcctcgcaaacaatcggactacgatctgttcccaccccatgcaaatataggttcatggaagcaagcgttacaaccaatggtgtgttatctacgccatgcagtgccttgttacgcaagaaatcgtgcttctccttactcgaagactgctctttcatataatcgtatgccgtcaagagaaaacctccggtaccgcaggctgggtcacaaaccgtttccccaatttgtggggctatgcaatctaccattgctttgatgagtgggcgtggagtaaagtattgaccggcaccacttttcttgtcctgcccattcttttcaaggatactttcgtagatagcacctttcacgtctccatccatgatcagccattgctcttcatcaatcatggtaatgacttttttcaaatagactggcttgtcaatcttgttttgtgcttttgtataaattgtaccgataagattttcctgttcactcaacaatttcagggtatcttcatattgccttaccaaatccaaaccgtcaagagatattaaatcactccattgataaccagatggtattgctgattcttctccaaacatttctacattctctgcgtccatctttaaaaataaaagataggtgagctgtgtaatataatctgtaaaaccgataccttgtccggcaagagttgttgccagattccaaacttttttggtgagagattgctccgttatgttatttgttgccatatatttatgctgcttttcttaaaactataaatgtatataaagactgtaaggcctcatcagctttttgcatactgccgaatgcacgaatcatctgcgcagcttgagtcacatcatcctcacgaatctctttaattgtacaagcaccgttcgatgcgatataatccacaatacgactgatgacttcacgttgtttatctgttatttcacgttgattttgccctatccatagattaaaatactgtttagaggtagaaactacactatccaatcgttctatttggtgtaaagcaaagcgtacaagctgtatgatattagtcaaagcatcactctcttctttcgtagaagaacgtcgaacgctatttggattcagaatggcgtatgagttccataattgcttggaagtaaaatgattgttagccatcttgagtttgttttccaaatcttttagcattgaataggtaattggctcaccttcattattataaattatacgtagagcttctatttcatcactatgttctttgcagaaattttcaaaggcttctgctgtacttttagcttcttctattgaaaatcctttagaaataagcgtgtcctcaccaggcatcagggtatttacaaatccggctgcaagaataagtaaatatcggcgtgcatctgcatgattagcaagtggtgatactaagccctttcgttcattgttaggctcatttgtatttacaaacggaggaagaatgttgttttccaatgcctcataaatccttgaagcaagttctttcatgtcgtcattagccaaacgtacgaactcattccgctgtgaattatctgctttgttgtatattctggaaagtgttgcagcaaggcgtttcagatgctcatcaggaaggtaaccatgagtaatctgttccagcagttctttaaaagtgataatctttgtagtaggctcatcggttatcgta

SEQ ID NO: 3787 - DNA, 31030 bp, Unknown
  gut microbiota DNA sequence
tgttaaccttaaatctaatactatgaaaaacacaatgcaaaagtatttattttatttgaaacagcaaaacgaaagagctaaaaaagaatgctttacaacatacattaaccaccaaggcaaaatattcaaagcagttaacagaattcataaaataaaaaaaagaggcccctcatcactgagaaaccccttcaaaatgcaaattaaaagagagacatatattatttattcaatacttctgattcgataaagtcaaagcactcagaataatattttctattgttttccacacctttaattccatggcccaaacctgggaacttaacaaagcgataagtcttacccaactcttttaatttatcagccataaactgagaaccaccaatatcgactctattatcatgatcaccgtgaatcaataataatggacctgttattttatcagcatgtgttattggagatcgatctaccaattttaaagaatccttcactggatcaccggcctcaagagcagtccagtctggaatgttagaatgatgatgctgccaaataatatcacaaaaacctgctgtttctattccaaatccaaatgggaacttagccttatatccatttacctcaccagggaaagtcatcagacgcattgtttcatatcctccatgactcatgccaaatactccaactctttgagatggaatatttagtttgtctgccacataacgagaaacgtaaatcatatccaatgtttcattacctcccaaatcatggtcattcatagctgcaaaatcacgaccaaagccagcacttccacgaggagaagcgctcaacacataaataccagcctgattaagtatctgatactcggaagaataccggttctcacctccataaaaagattcgaccatcaataaacttttattttctggcaacggatttttgggtttgaaaagataagcatgcaaaatacgctgcttacctgttaaagagtccacatcaaaagttggtatttctaatctttcaactgtagaatgcactaacttttctttcaagtcatctggaatatccattactgtttccatttttatttgagaaggatccacaacagcttttacaacttggaacagagtagtagttccacccgccaacatggtaaccgtattccccgtaacacctccaagttgtaaattcaatgatgactcttgagtatagacaaccttttccgattgcggatcaaacaaaatcatattagtatgcacgggattgctttgaagagcaaaaaccatctttttatctttcaacgaaagtaaacagacattatccaaattcatggtataatgagtaagctgttttacttctccagttgataaagtaaatgaatataagttattatacccatcctgatcagaaataaacaaagctttatctgatgaaacccattcaggcaacaccatcgtaccagaaagacttccttctttagatggatcagtcaacacttttgatgcctttgtcgccaaatctatgtacaagacattagtataagtacgatccatgtcttttaaagccagcaacataacccccttaccttcaggctgccaactaatatctccccaagtatatcgaaaatcaacttcatcagtcctcaacagactatcctgcaaagttttcaaatccaaaatatgcaattcatccaaccgattttcattttgtcccattctggaaacataagcaattttagttccatcaggattaaaatcccacgcatatatatagggaacatctgttagcttctctacctgattagacccaggcacagtacgataaatatttatgatttcttcattatgttcatcgccaatccaataaaccataccatcatttgagttatattgggcatgccatccatttcttgtagcaaaatctacatctaccacatctttagcctcacacaaatctgctcccttagctatgtccatccactgaagagtctgtttttctcccgttttgaaaaacaacaatttacttccatccttactaattgtaaatatagaataaggaaaatctttaaaataaggcgcaatatctatagaacggccttcaaaattaagcactaagctattatcggcttgtttcgttccacacccccacaagcctaatactagacaaactattaccgctatatttttcatatacttctacttccttaaaaaaccaatcataattatctccaatattcattttgatcatctgatgtggcactcttattataatccagttcatcagcaggaatcgggaacatcattcttgggctatttgccggcagagtaatcacatcactccaatgttcttctccaaccctctccaaaggtttctgcaaacgtttaatatcagacaaagcaaatccttcaccatataattcacgccgacgttctttccatatttcatcagatgtaaactgagcagaagtaagttgtgattcccctctcttcacacgcaatgcgtttaatatctgcaaaccttttacgacatctggttgactgcctttcaacaaacactctgcttctattaaatacgcctcagctaaacgacacattggatagtcagctatacccaatgacaccttagaggtaaatttagaagtgatataaccatctttgctatccaaataaaatgggaacaattttctacaatcattattctcaaatatatctacaaatgatttggcaactcttacagttccataacctactaaataatctacaccgtttttcaataaataatcatagtcaacttgagtaccataactaggtgttccgtaacctgaatctttatctttagctgttgctacctgataaaaagaaggtatagaagcatagatattggttgtttccgaagtaaaattaaatccccataaccactccgagttgatagtgttaaaaccggattgatattcttctttggtcattaaatcagaaccatcaaacggactacctacagcttctgcatacattcttgcattatcatactctcccatatccaaataagttctggccaacagcaaagctgcagcacgcttatttataaaataactatctgttcccgtagaatttttatatacataagtaaaatcatcaataatacgcttcatagatgtagccaaatcagaccttggagcattatctccgcttgcatcagctggagtcaaacgcaaaaacaagccttgccctgaaggacctgcagaagtatatgaagcacaatataaatgatacaagttcaggaaattccaccctctaattccataagcttgtgccaacaggtcgtcacaaccttcaggaagcttgtctgcattaacaataatctgattacattcatctatcgccttataagccttttcccacatgtaaggagaataagcgctccaccatccatcaaactcacgaggatactgctgataagcatacgaatacatcagccagttataggtagagtaatggtaattaccatttgaaattttcaaatcatttcccattacatcaagtgaaatttgcccaatagtcaaataatgaaaatgtccagtccaagaatatgcacccatcaaaacagccttaacattttctgcactttccaatacactttcatctgttaaagaagtggatggttcttggtaaagcaaatcatccgaacaagatgaaaatgaaaataaaaataatagaacatataaatatttagccttcatatcaatatctgtttagattaaattttaaaaagtcaagttcgcaccaatagagaatgttcgtggagtagggaatgaatacggataagttttatacccttgcacaccatatatatcgatgtcatcatatcccttatatcctttatcagcgaaccatgtacacaaattatcagcagatacccaaagttttgcccctgaaataacttttgaaaagactcccagattcttaggtaaagtatatgataaagtaattgttttcagcttaacatttgtcgcatcatagaggaaacgagaagacagacttgctgaatttgtagcgttattaatcgcatatttaggaacatttgtctgttgccctggggttgtccacgcttccaatgcatccacatgcatattttgagcagttgttgctccgtcgtgcatcataccagcataaatattatcataaattttaccacccaaagaataattcaattgaatcgtcaaatcaaagttcttataagaaaaagtatttataaaaccaccataagccaacggagttgatcgtccttgtctctcataagttgcttcactataaacagaggtagtggtacgtgttccatcgtcattaaccttataccaaagaggattcccattatcggggtctactcctgcccaagtaggcatataaaactcatattgactacctccaactgaccatattttctgataatctgtcatacgaacatcattttcaccattcaaatctttaattttatctttaatgaatgaagcattcaagtccatattccaaaccaatggccctcttaatatattagctcccaaaacaatctcaaatcctgtattggaagtctttgcagcattcattgtaattgaacttaatccattttgcaaagccaatgggacatcatacaacaaaccatctgacgttttattgaagaagtctacagacccataaaaacgattccagaaactaaaatcaacccccacattaaacattccttgcttttcccagcccaataaagcatttaccaactgttcatgtccaactccgatattggaaccatataaataatcagccgaagtcgtccataagcctaaagaagcatagcgagccaatccacttttattacctgaagtaccataactcaatcggagtttcagattatcaatccactcaatatcttttaaaaaatcttcttggttaattcgccaagacgctcctaaactccagaatgttccccatttagtatcagccccaaaaatagaagaaccatcagcacgaagacttgcagaaaagttatacttatccttatatgcatactcagcacgtccaaaatatgaaatcaacgtttctttagttgtatcagaagaaggagagaaagaacctgaagctcctgccaactcctgcatatctccaagcaaacctctaccaccagcatataatgtttcataggtactttgccaatactccatacctgccattacatttaaactatgaacatctttaaacacatttgtataattaaatgtattagtagatgtatacatcaaatctacatgatgatatttatccaaacgtccattataggttggaccattcccatgttctttattccaataacggtgttcatctgttgacacataatccggagagaaaacagttttaaaggagagccctttaaagaaagttatctcagcataaccagatgccagcaaacgataaaatttactccgattgacatccattaaaggtattgctaaaggattaaaatcacgcgaaacgggattggtaaaattatattgtttattaccattttcatcaagaactggattaccttcattatctacaatatataccggtaccgcattagggaaagataaagcattgtacaaaggacttgcacctgcagagctctctaccgtcgtattttgaatagaatgtgagaaagtaacatttaaaccagcattaaaccatctattaactttggtattaatattagctttagctgaataacgtttaaagtcactcgccggagttataccgccttgttttgtatatcctattgaaaagaagtaatttgttttatcattctttccacttacattcatattataatcttgtgagggagctgtacggaacacttctttctgccaatctgtatccacaaccaatttagcaccatcaactacatttccattttcatctaatggattttctacattataagggttatgcgttaatgcaccttgcgcactcgcattagcttcctccatagtttcacctttagcacgatacccctgataaatcattttatacatatcagcagaactcatcatatcatacgccttgcccaatttagaccatgagaactgtgcattaaaattaacacgagcttttccttcttttccactttttgtagtaattacaactacgccattagccgcacgcgatccatacaaagctgcagctgctgcatctttcaagaccgtaatcgattcaatatcattaggattaatagaagacaaaatattcgagctagattcattttcttccgcaatagaactgtattcagtagaagttgtagcaaccccatctatcacataaagaggctcgtttgaagctttcaatgaaccagatccacgaatacgaaatgaagttccagatccaggctgcccagaattcgacataacctgcacaccagaaacctgtccagccaaagatttatcgaaagatacagcaggagattttattttatcctgatccacaactgtagcagaaccggtaaaagctgatttttttactgttccgtatgcaacaaccattacctcatccaaaacttctgcatctgatttcattacaatcttaagttcacctttttttatcgctacttccttgcttttcattcccacaaatgaaacaatcaaggtcttactgtcagctttcacccctgaaatcataaagttaccatccacatccgtaatggttccctgggtagtaccctttaccaatactgaagccccgacaatgggcaatccatcttcttcggaagttactacaccttttacagttactccttgcgaccatgctacacccgtccatacaaacagcagggccagcatcaatgttagttttcttttcataaatccctcctttgattaaacataaaaataaatctcattcagttgataatacttcataaatacatattaaaacctattaacaacatcgcaaagatatatattccttcaaataaacaacaaaatattactgaaaagtagaatcaaaaagcaaaaagatataacaaaatcgaatatcaattcatttttaattcataaaattaaagaaatatgaaatattcaatcaggaataaaagataaaccgaaagaaaaacgcatcgattaatttaaataattcagaaataaacatacaaaaagaacagatagaatgattaactcaataaggataatacggaaggtttgtcaaatcagaatttaacagaatgaaaataaaaaaagccgccccaaagggacggctttcaaaaaatatgtcaacaaaaaaattagtcgatataacgttcgattgtctgtgcacggtcaggacctacagacacaatctttatcggagtacccaattgttcttccaggaatgtgatatatgcattgaattcttccgggaattcatcttcgcttgtcatcttcgtcatatctgttttccaacctggaagctcagcatatacaggttctactccttctgtaatatcatacgggaaatagtcgatttcttctccgtttactttgtatgctacacaagccttgatggtatcaaatccatccagcacgtcgctcttcatcaaaatcagctgagttacaccattgaccataattgcataacgcaaagcaaccaagtcaacccagccacaacggcgttcacgtcctgttacagctccatactcatgacctaaatcacgaattgtcttacctgtttcatcaaaaagttctgtagggaacggacctgaacctacgcgtgtacaatatgctttcataataccatacacttcaccaatcttgttaggacctaatcccaatccggtgcaggcacctgcacaaatggtgttagatgaagtcacaaaaggatatgaaccgaaatctacatcaagcatagttccctgagcaccttcgcaaagtactgacttgccttcgttcagcagacgattgatttcatgctcactgtctaccagagggaactgacggaggtattcgataccttccatccattgcttttccagttcagtaatgtcatattcataattaaggctcttcagaatagcttcatgacgagctttggcagcagcatatttttcctcaaagttatgcagaatatcacctacgcgcaatccattacggctcaccttatcggtataagtcggaccaataccttttccggtagttcctacttttgaatctcccttggctgcttcgtatgctgcatccagaatacgatgcgtaggaagaatcagatgagctttcttagagatgtgcaaacgttctttcaacggatgtccgcttgcttccaacgcttcagcttctgccttgaacaaagaaggatcaagtaccactccattaccaatgatgttcaccttatcgccctggaagattccagaaggaatagaacggagcacatatttctgaccttcaaactcaagagtatgtccggcattcgggcctccttgaaaacgagcaaccacatcgtaacggggagtcaatacatcgacgactttaccttttccttcgtcgccccactgtaaacctaacaaaacatctactttcatgattctttatgttttatatattccttatactatttctttttccgcttggccgccatacacttactgcacagtccatagatataaagggaataatgcgaaacataaaatcccttcaactttgtctgcgcaatagcctgcttcaggttgtcgtcctcaaattccgacacctttccgcaacaggtacaaatcatgtgatggtgggtttcattattatatgatcgttcatactgggaagtattgccaaactgatgtttgatgaccagccctgcatctataaggagaatgatggtattgtacaaagtagcccggctcacccggaacttttccttctccgccatatagctgtacaactcgtctacatcaaaatgccccttgatggaatagatagtatcaagtatagcataccgttcaggcgtctttcgatgtccgttcttctgcaaatactctgtaaggatttgtttgactgtatcttttatattctcttccatcccaataatcgttcagcggtcaaagttatatttttttgagtaatttagaaagattacaagccatattctatctcattttttatttcttctgccaccattttgatttccggcttagaagatttcaacaaattccctaacatacgaagtacggtacgagaatttgtctttgattgcaaggcgaatttacacactgctctggctgctactttacgcatttctgttcctccttccaatacggtaaaggcctgatccaagaactccgcttctgctctttcattcagtgtccatcccttcatcaacaaacgagtcatcaacagatacccgcacagctggaaatattcccgttcatcggctatccatggaaagaccacttctgaagcgtatggcaagcgctggaacagattcataaccgtatattccgccagttccggatagcgcatgtcttctatccatatttctgcgatttcccgacagaatccatctacgggctggagcaatccggccataatcttacattcgcggatgttttctttccatagagcctgtgccagctcatgactacacggataatctgccgcaatttctttaatgcggggatattcaataccaaagttcagtttatagtcaatacctttttcacgcatactttgggaaaccattccattcataaacaagcggaatttcgactttatttccctgattgtatcttgtatttctgccataatcaaatagtcaaattagaataatcacgaccataacgaagcatctgttcggtatagccttctgtataatcaagttttacatccataatacgcccctcggcatcatattgaggtaaatataccggattgacaaatcctttataaggtgcgagatgcagtgaacggtaacggttcaggatttcctcatgaagcgttgcatccagtttcacggcatatttttctacaagagcacgggcagcttcataatctccctcactctttatacgctgaatctcactcaacaatgcggcaaaaagtctacgaagctggagatagtcgttgattttcacataagtcttcccttctttcttcaccagttctaccacattctttgatttaccgttctccaaagcccagcgagcaatcaactgacggttacgcatgtgagcttcttccaaatcacagcccggttcgatgcgtaccatctgcgtaagaagtccgttcatcatgtaagcataatattcagccttgtatgcttctttatcgggagtcaatcccagttccaccagtttttcatcaggcaaataatacaagccaaacaaatctgcacgtgcttcttcaatcgtagagccatacgctttcaacgcatccggatcaactccgggaagtaattttcctgagccatgtcctacacattcatgcaagtctgtatggaggtcacctgtaatgtcggcatatttttccagcaagtctttttcttcctgactgtacacaaattcttcacggaagccattgcctttagccgccttgttataagcgtctgtcagatttccgatagtcaccgattttgacccatgcagactacgaatccagtttgaattaggcaaattaattcctatcgccgaacttggatataaatcaccacccagcatagccgctgtaatcactttagcagaaactcctcgcaccacctctttcttgaaggaaggagacaccggagagtggtcttcaaaccattgtgcatgctggctaataatttccgtacggtgagtagcttcttcatccttaaagtttacaattgattcccaacttgccttcatgcctaacggatcaccatagctttcaataaagccattaacaaaatctacttttgagtctgtatcctttaaccaggcaatagagtaagtatcaaatgtcttcaaatcgcccgtacgatagaagtctatcaacagacggatgacttcacgctgtgcctcattttcagccactgtttccgctttttccaaccagaaaataattttttgaattgcctctccatacatgccgtccaatttccagacttcttcttgcagaactccatctttctttaccaatcggctattcattccatacattaccgggtgaggatcagctgctactttttgcatggcataaaacttctcagcctcatcctgagttactccttcataataattggcagcagatgtcataaccaaatcttccccatcggcctgatttacccgcttgggcatcactttagggtcaaacatgacagggaacaatttgtcacacatcgcctgaactgactcaccatccttcagaggaagagaagcgacatctacctgctctatgcactcacgcaaaaattccggtgagaaagctggcacaaacttatcacacgcataatggtgatatatgccactggagaaccaaacgcgtttcagataaacctccagtccctgaaattccggattattacggtcgcccgaataagacacataaaccgcctccagcagttttcgaatctgtagattatactttccgttctggtcaaaaagaatatctcttccttccaaagcggcctctgagaggtaataaatcaattctttctgccacaaagacaagttttcaaaacctgccacacgataacgcaacagctgcaaatcggcaaactgttctactatataattaaaattttctgacatactcatttcagctcattttaggcgttattacaacataattatacaaaaatcgtagaagtttttcgatttcacaacaatagttccgaaaactttatcaaaaacctttacatccgcacaaaaacacgataaaacggtaactctttatttttttatatatctttgtgagcaaaattaaaaaacatgagagaacaaatgctgaaaacactcaaatcttattttgggtacacttctttccgtccgcttcaagaaaaaatcatttctgcaattcttcaaaagaaagacgcattggtgctcatgccgaccggaggaggaaaatccatgtgttatcagctaccagctctgctgatggaagggacgaccgttgtggtttctccattgatttctctcatgaaagaccaggtggagtctctacaggccaatggtatcgtagcccgcgctttaaatagcacgaacgatgatgctaccaacgcccagctccattttgaatgtgtgcaaggaagagtaaaacttctttatatatctcccgaaagactgatgtcggaaataaactacctgttacgcgacatccacatttctctatttgccattgacgaggctcactgtatttctcattggggacacgactttcgtcctgaatatacacagctgaaagccatacggcaacattttcccaatgtacctgtagtagctttgactgccactgccgataaaataacccgtgaagacatcatacggcaattggacatgcgcaacccggaagtattcatttcttctttcgaccgtccaaacctgagtctggaagtgaaaagagggtatcagcaaaaggaaaaaatcagggccattgtcaaattcctgcgcagacaccgtaatgaaagcggcatcatctactgtatgagccgcaacggtacggagaaagtagcccagctattggaaaatgaagggttcgatgtaggtgtttaccatgccggtatgtcaaatgagcaacgggaaatgacgcaggatgatttcatcaatgaccgggtacagattatctgcgcaaccattgcattcggtatgggaattgataagtctaatgtcaggtgggtaatccattacaacctgcccaaaagtattgagaacttttaccaggaaatcggacgtgccggccgtgacggacttcccagtgaaacgttacttttttactcttttggcgatattgtcctgctgtcgaaatttgccgctgaaagtaatcagcagggaatcaacctggaaaagctaaaccgcatgcagcaatatgcagaatcggacatttgccgccgaagaattcttttgaattatttcggagaaaccatgaatcatgactgcggaaactgtgacgtatgtaaaaatcctcctgaacgcttcgatggtaccatcatcgtacaaaaggccttaagtgccatcgcccgcgccaacgaacaaatcggtacccgcaccctgattgatattctgaaaggatatgccagccaggaggtgattgaaaaagggtacgacaaactcaagacatacggtgccggaagagatgttcccggaaaagactggcaggactacttgctccagatgctaaacttaggttattttgagatagcctacaacgaaaataatcacctgaaaattacggaagccggaaaaaaagttttattcggcaaggaacgtgcacagctgatagtcattaaaagagaagaaagttacggaaagaaaggctctgccaaagaaaacaaaacagcctctcctgcccccttattcactccgaccgtatttgaaaatgaagatgagggcttgtttgaagcacttcgccaactacgcaaaaagctggccgatcagctggctatccctgcctatattgtgctgtccgataaaaccttgcacttgcttgccctgaaaaagcccggtgatatggaggcatttggtgaaatcagtggaatcggcgaattcaagaaagaaaaatacgggaaggatttcctggctgtcatcaacgaatacctaggtagaaactaatgagacaaacggcttccggtccataccggacgggcaaacgactgcccggaaaatgcagcacgtgtataacttgctacaggcaacatttccggaagatgcgctttgtcaaatgtcacaaagtcctcatacagtacctgctctgtatccatgcctattttcatcaccttttcataaagcgacttacgggaaggtgcattaaaagcacaggtattcgagttcatcatactatcttctgaaggacgataagcccctttcggataagtgcaagctccttcatacacccctaaatgttcgttctggtaacgagaatctgtcaaaaaggaagcccatagtacggtatctttcgatgcggtaaaatctacattctgtaaccatccgttagcctgcattgtacgtatccgctgtatttccaatgtagaaatgcttcctttgtccgaatatacatactcgtcttccagcttacctaagccatgtccaatcgcctcatgtactaacacctgacgaaaatgttcgctatcaaggttatcaatcaccggacaataagctatagcaaattccaccaatttattattcttaccctgatacccccaataagtagttcctgcgtatgctgacgtgttcagtatcactacagccagactgttttcttttttcttttctttatccagtactttacccacataaatttgtacagatgtatcatctcctataattgtcgtactgtttccacctgccagcttacaactgaatgccgttttataccccataccaaaatcattattttcggaaacggcattaatcataaatacatcaaaatattctcgcaaagacttcacaggttcttcagtaaacaggttttccatagccttttccattacacgccggtaggttccatcggccaactcctggtctacaaagccatctcccatcaatacgatgggaatcccctctccttttacatgctgttgcaatgtatcaatcttaccatcttccgagaaatcaaccgactccagcacctggcccccctgctgagatattttcaccgtcgccaactctttttgcgacccatcttcttcctttacaaagagtaaataagccgaacgcgacattccgcctttattcgaagttgcatgcaatgatacttcatgcgtttctgaggctgcagaacgggaagtcgtttcctgtctcaaccaacttccaggctcggaggaagtatacacttttagtttttctacatctacatttgtttcaaaataaatagtaaacactcctccttccactcctatgaggtattcctctttctccggaagcacataatctcccacctcctgaaaaactgaaatttcacaagcctcatcgccagatgtcagttttacctttgcctcccgcacttgatttgaattgttttcaaaaacggcagtcactttcacttggctctcaccagcatcacccgacaaaggagataggcttaaccatgttgcatcggtggtgacattccatgtacccaaactggtaaatgaaatgaatgcctcatccccgacaactgattgtaaagtcacactttccgtcacattctcaaatgcaacagattccatttctttgtgacaagaagtcaataacatcagaaaagccaaacacagattgaataatgtcgttttcatacagcacgatgagagcattcaaaagttcataattgtttaccggaagaagttcatagaaacaaaaacaggattacaaagagaattctatcctgcatactgacagtgttctctttgtaatcctgtctgaagaaagcaagcgtccgttacttatccaaggaatgaaataagtacaccggcagcaactgctgatccgattacacccgaaatattacttgccatacaatattgcaacacgtggttcttcgggtcatatttcaacgcaatttcattggctacacgactggccatcggcacagcactaagaccggttgctccaatcaacggattaattttctttttcgtaaacagattgaatatcttcacgaagaaaataccacctgagattgaaagtgcaaaagctaagaaaccacctattacgataccgatagtcgtccagttcaggaaagcatcggtagtcatggttgcaccaactgaaatacccaggaaaatagtagccgcattcataatgctgttagatgcggcatcaaacaagcgagaagtattgctaccgatttccttcaccaagttaccgaacatcagcataccaatcaaaggcactgcactcggcacgaacaaggctacgatggtagtacatgcaatcgggaaaataattttcaaaacacgcagattcttgatttccgtttttgaagggtatttcttttcctgttccttcatgttgatggacagctctttctttgtacaccataaacgtacgacgagcggcacgataaccggtaccaacgccatataagaataggcagcaatggcaatcggacctaataaatgcggagccagcttgatagtagtgaagatagctgtcggaccgtcggcacctccgatgatacccaaagaagcagcttccttgggagtaaagcccatcaaaatagataccagcaatacggcaaagatacccagctgagcagccgcaccgaaaatagacagacgaagattacgcagcatcggaccaaaatcggtcagtgcacctactcccatgaatataatcggcggaaggaatcccgtcttaatcaacatataataaatgaagttcatcagtcccaattcatgagcaatttcatgaagcggcatttcccagatgttcttcatcacaccgttcaccatgaccattccgttttcatcggcctgcactactcccatatcaccgcccgggaagttggccagcaacaccccgaaagcgatgggtaccagcagcaacggttcgtactgcttcttgatacccagatagagcaagacgaaagcaatggcatacatgatgagaaaccgcgggtcagcagcaatgttgctgaaagcggtcatatcatataatctttctaatatctcttccattacaaaatcttcattaatacatcatcttctgatacggagtcaccggaatttgcacagatagcagtgatggttccactaaactcagcacggatggcattgtaagtcttcatggcctctacatagcaaattacatctcccttgttcaccttgtcacccactttcaccggagtttcctgcgcactcttcgtcaggaagaatttaccttccagcggagaaagcacttcttttccttcaccagccggagcttgggcagccggagcagctacagcgggctgattctgtgcagaaagtttagacggattgacatcgccaaaggctactgttacacgataagcctgaccgtttacgtctactgtcaagactttagtctggtcattggccatgtgtacctcttccttagcttcacgacgtttcttcacatcttccaggaagtcagcttttgcctttccgctcttataggcttcatactgagctgggtgcatggcatattcaaagagttcttcatcatcctgtccagtttcccatttcttttcccacatcatctgacggtatttttccagctgatcaggatagttgtcctgtgggttgcctgtgaagaacttacggccttcacgttcagctttttccacaatttcaggagccagtttgccaggcaattgtccggcttttcctaaaatcatgtcccaaatatcgtcggcaatcataccccagcgttccttgcctttttcaagctggatgacattcatcatggccaggttcttcacatactggctgaacggagttaccaggcacggataacccacacgcggccatacgtatgctacctcatcaaacagtttaatcagcagttcatcctgagtcatgaacggcaagttacgttttgccttatacttattgatagattccaggttggtatccaaatcggccatcaagctacccatcataccacccggaagtcccggtccaatcagcaaagaattcatcagacggttcttcggactgatatacaatcccaggaaatcatccataaattcctgaatcagagaacgcaccttcatataggcctgcatattgatttcaggcaccttgaatccggcatctttcagcatggcctgcacactgattacgtctgcatgtccggtaccccatgacaacgggtccatacctacatccacataatcacatccggccttgcacacttccagaatagaagccatgttgaagcccggacctgcatgagagtgatactgaatcgtaatatccttgattttcttgatacctgccaccagcttacctaagaataccggacgaccaatacctgccatatccttgatacagatttcatcgcatcctgcatcaatcagtttcttggccatatccaaataatattccacggtatgaatcggagaataagtgatgcagagacagcactgagaaatcatgccggcatcatgtgcataaccgatggaaggaataatatttcgcacatcgttcaatccgcagaatgtacgggtaatatctgtaccctgagccttctttactttatagaataatttacgtacgtcggccggtaccggactcattcgcaaaccgttcagcgcacggtcgagcatgtgtgtctgaattcctgcttcatgaaaaggcttcgtccactcgcggacagccttgttcggattttcaccaaacaacaggttaacttgttcaaaacctcccccgtttgtttctacacgggcaaaacaccccatttcgataatggctggggctaccttcaccaactggtctactcgtggtacgtatttcccggcactctgccacatatcacgaaaaaccaaactaaatttgacttctttctgttccatgactaatacatgcgtgtttttctaacagattactgcagtttttctacttttattacctgaccttttccggctgtcaatatatccacagccgccttaatggcatccattgcaccggcatcggtagatgcgcccgtagcagccaccttctttttaggagcctcttctggagcaactttatttacaatggaaatcagaagctggcttaaccagataacaatgagcagaattacaaagactgtgaccattccgaccaccatcagcaataatcctaattcaatgttttccatttctcaattaattagaatatacataaaaggcgctccctgaaaaaggattcagagagcgtcccaaaagtaggaaattccataaagaactactactaaaactcgttaaatatttgatattttatttaggttatcgccttattactatcaaaataatatttcatcaagcgatttgcgtttcttagttggcacttcttgttcttttgcataacccacaggaatcatcactaccggctccatggaatcaggcagacaaagcacttccctacaaagcggtacatcaaagttgcatacccagcaagtgcctaatccctgctccgttgcagccaggcaaagatgctctacggctatagccacatcaacatctgcatggtcttttccgtccgacttgcgatgccaggattcctcatgattagcacaagccacgataatgcagggcacattttccatccagtttctgggatacgcttttttcagttgtgacaagcgggcctcatcagtgactacggcaaatttccaaggctgaaaattcacggccgaaggagacaagcgtacacattccagcacataatccaatttttctttttccaccgcacgcgtttcataattccgtacggaatgacgcatgtttactaaatccaagaaattcatattattttcaatattatagttttatctctaaattaagtcccaaaatattcaggcagcgctttacgtcatattggcggcaataatatacatccaatgccgttttacgggaaaaaggccatcgcactcccggacgataacggacgcgtggcaaggagaagaaagccttgtcacccaccggctgaaatgcttccaccgagaaataaggatataccacccagtttcccgattcataagctatcctcaagcgtgaacgcagctgcgcttcatttgttccaccaataaatgtatgttgcagaagttcccgccagcccaactttatatttcgtttggttcctgaaacgataaaaccggcctgatagcgatgtccaattttccatccggcagccccgcggtcacggtattgtaactcgtaatatcctttcagctgcaataacggtaatacacgataattcaaccccacattcaaccgttcccgttccatctccttcaaaccgttttgggtacgggcctgaaatgtacctctaaatttcaccttcggattaaattgccagtctacccgtactcccgtccaggtggcaaattcaccttctggcacggcataagcagagaatgacaccaaacacattcccaacacaagtagtaatgttccccatctattttgtttttgattcataagtacctattccaactaaattgactgtgcaaggtatcaagaaaatcctgaatttgcaaattcaaagaatacctcttcttcatttcacatttgaatctattccccagctctagatatcatcaagcatcctaaaaaggaatagtttaacactttacacctcccattcgtagtttttttcgcctattcatagattttattttcgaatcaatagacttctcaatagttttgcacagattcatcaactcatcgccatgaaacaaaacatattattattcattctcatcctattaatttcaggatgcagtcagaaagaaatagaaccaagtttctcactgcaagaagagactagttcaattactttagcctctgcagccagttcccaaactgtaatcaggtttaccagtacacgggaatggaaagcaagcacttccagcgaatggctgctgatttctcctacttcaggagaagccggcacttatcagatggctctgacggcttccagtaagaataatagcaaaaactcacgtacggctacggtaaatttagtttctgccggcctcacccaatcgtttaccgttacacaatcgcctgcagaatatgtggaactggaacaaacaacgtattatacagaagttcaaggaggctcactacaagtcaagttcaccaccaatctcagcactgacgaactagctatttatggcacggccagctggctaacacaacctgccaacagtcgcacagatcaggcctatgtagtcaacctgaccgttctgccgaacgaagatgaaaaggaaagaacggcctatctttgtttttgtaaaacaaacggcgaagaagaggaagtacttaatagtgtcactattttacaagaaggcaccagcacaagcacgtctactgattattctgccgacaagacagtacgtgtacttcagcgtgccacacagggaagcggactccctatcgtactgatgggagatggatttctggacactgacattgtaaacgggacatacgatgaggttatgaacaaagccatggaaaacctgtttacagaagaaccgctgaaatcgctgcaaagctatttcaacgtatattccgtaacggcagtctcccgcagtaacagattcgatggttataacactgcttttggatgccaaatggaaggaggaatgagtaccttgataaccggaaacgatgaaaatgtaatagactatatacaatgtgtagaagggattgatgtgtccgaaacactggctgtagtcgtactaaattctccctcgtatgccggaacgacctactttggctactacagcgagaaccaggtaaccgaattagccatagcctattgcccgattatctacaaccttgaaaacgatagcttcaggcaagtattggtacatgaggcagtgggacatggattcgccaagttagaagatgaatacagctacgaagaaaacggaaagatgccttcggatgaaataaacgacgtaaaagtgctgcaaagctatggatgggcacaaaatgtggatttcactcaggatgaaaataccatcttatggtcatcttttctgaaagacagtcgctatagttcagaaggcatcggcatttatgaaggaggctgtacctacatgcgcggtgtgtatcgtcctacggaagacagtatgatgaataccaatacatgtggatttaatgcaccgtcacgaaaagccatctacgacatggtgatgagaagaggagaaaaccgggaaaccacctacgaagagtttgcggactttgatagccagaatgtttcacaggtacaaacccttacccggacttcgaataccattagccgcccgtttacacgtccgcacttcgtccacaaatccattaataaataaagcctcaaaagccaagaggataataaatgaattgaccgaatatatctacgtttccgctggctgagacgtacgtttctctatcggaaaacctacgtttcgcgtaaaggaaacctacgtttcccgacagagagacataaaaattacttcggcaaaacaataatcacataaggatatttaagaaagacctgttataaataatatcagaagtaatttacttcaaacaaaaacgccctgagtctgtgacagatacagggcgttgcttttttatttttcgtttttatttttatccagccatcagcaagacaagcagctgagccgtcaggatacgcaaaaacatggtcaacggataaacggttgagtaacctacagccggcgcatcatttcctgcaatctgattggcgtatgccaaggcaggagggtcagtattactaccggcaatcaaacccatcaacgtgaaatagttcacccgatgatgccagcgagcaacaataccggtaattaccaacggtatgaaagtaatcaggaaaccgagtcccacatacaatacgccatcaccttcgactaccatctgcacaaagttctcgccggctttgattcccacactcgccaagaagagcaccagtcccacttcacgaagcatcagattggcactcattgtggtgtaggttaccagtttcactttatgtccgaaacgtccaatcaaaatagagataatcagcggaccaccagccaaacccagttttaccggagtcggcatacccggaatggcaataggcaaacttccgaaaaggataccgcaaagaataccgacaaaaatagttacgatgttcggatgatccagacgacgcaactggttacccagcaagttagccacacgttcgatggcatcctgtggaccaactaccatcacacggtcgcccacctgcaagcgaagctgacgggctgcaaacaagtccatacccgaacgattgacacgtgtcacgttaactccatacatactgctgaaatgaagttctcccagcgtttttccgttgatattcggctgtgtcaccaaaatacggcgagacaccatcggtttgtcctgctggttagtggcatcccagtcttgttcgattttcggaccgatgaaggccatgatagcttctgagtcatcttccgcacaaaccaggaacatacggtcacccagacgaagcaccgtattggcattcggcgtaatcatgtggccgtcctgaataatacgcgtacatacaaagtcacgtgccaggaagttctgcacctgtgacaaggtcttaccgctcagcgcctcattctgcaccttcagtgagatagtataaggcttcatgtgaggattggcttcttcttctttctgaatctcgtcactatcacgctgcacatctacccggcagatataacggataataatcatggaaagaatgatacccatcacacccaacggataagcacaggcatatcccatggcaatttcaggaccctgatagtgcaactgctgcaaagcttcatttgccgcaccaagccccggagtattggtaaccgctccacacaggatacctaccatcatcggaatgtctactctaccctgcaaagcaaagtacagaatcaatgctacggcaatgttcaggaatacaattcccactgccagcaggtttaatgtaatacctccccgtttaaaagaagaaaagaatgaaggaccgacctgaagtccgatacagaagacaaaaagaatcagtccgaagtcttgcacgaaagaaaggatggcaggatttccagtaaaaccgaagtgtccagccaagattcccacgaacaagacgaatgtaactcccagcgatatgccgaagaatttaatttttcccaacagtacccccgccgcaattacaaaggcatacaatgccactatatgcgctatcgagttgggattcgtcaataaatcttgtagccagttcatagatattaaattagtttattcaggaggcaaatgtaaccaattaaaaataatagggcaaacttttctttcttttttcatcccaaccttctttctgatgtattccatacactcttttcctgtccaaaagccctcagcccccttgcacacgtttaatgtttttagctttctatagctataaaaaaggggtaatgtggaataaacaagcggaaaatttgtatatttgcccatgcaggctacaacctgtgtgataattttaaatctgaatatcaacccaaaaacactaattcactatggcagatagtaaagaaaaactcttttcagatttttcgcccgtgtccacacaagaatggatggacaagattacggtagatttgaaaggagccgattttgagaagaagttagtatggagaaccaacgaaggtttcaaagtgaaaccattctaccgtcaggaagatttggaaggattgaaaaccacagagggacttcccggacaatatccctacatcagaggcatcaaaaaagacgataacacctggtttatccgtcaggacattaacgtaaacgatgcggctgaagccaacgccaaagcccttgatatattaaataaaggtgtagactcactcggattccatatcaaagccaaagaactcaatgcagaatacctcgatactttgctgaaagacatctgctgcgaatgtgtggaactgaacttctctacctgccagcgtcacacgctgcaactggcacaactgctggtagcctatttccagaaaaaaggatatgcacctgaaaagctgaaaggctcgctcaatttcgaccctatcagcaaaatgatgcaaaaaggaaaagacgtaagcgctgtcattgccacagggaaggaactggtggaaacactggctgcatacccgcatttccgttgcattgccgtgaactctgtacagttgaacaacgccggagcctacatttatcaggaattaggatacgcactggcatggggaaatgaatacctcaaccagttggtagaagcaggcgttcctgccgcactggctgccaagaaaatcaaatttaactttggtatcagttccaactatttcatggaaattgccaaattccgtgccgcacgtatgctgtgggctgacatcgtaaaacaatacgcaccgaaatgtccgcgcacggactgcaagaatacaggagccgacggcacttgttactgtgcctgcaagatggtagcccatgcagagacatctaatttcaaccttactttgttcgatgcacacgtgaatttactccgtacgcaaactgaggccatgagtgctgccattgccggagtcaactccatcacggtatctccattcgacaaagcttatcagacaccggacgatttctctgaaagaattgcccgcaaccagcagttgctgttgaaagaagaatcacacctgaaccgtatcgttgatccggctgcaggttcttattatattgaaaatctgactgtagccattgccaaacaggcttgggacctcttcctttctgtagaagaagcaggaggtatgttgcaggctgtcaaggctggaagcattcaggaagctgtaaaccaaagcaacaaagcccgtcatgaagcggtttccaaacgtaaagaaatcctgttgggaactaaccagtatccgaatttcaatgaactggcaggagacaaacgtccgctggatggatgcaagaaatgcggttgcggtggagaagcacacgaagaagaaggcactctggccaaactggaaaccgcacgtgcagccagcgaattcgaagctctccgtctggagactgaaaattcaggcaaacgtccgaaagctttcatgctgaccatcggtaacctggccatgcgtcaggctcgtgcacagttctcatgcaacttcctggcttgtgcaggctaccaggtaattgacaacttaggatttgccagcgtagaagaaggaattgaagctgccatgaaagcacaggcagacatcgtggtcatctgctccagcgatgatgaatatgcagaatatgctatcccggccttcaaggcactcaacggacgcgctatgtttatcgtagccggtgctccggcctgcatggaagaactgaaagctgccggcattgaaaacttcattcatgtgcgttgcaacgtactggaaaccttacgcgaatacaacagcaaactcttatcctgaattgaactatgagacagaatttcaaacaaatcgatatatttgccggtttccatccgcagaatggcatggaatggcagaaagaaaatggcatcactgccaactggaaaacgcctgaacagattcaggtgaaacctgtatacacgaaagaagacctggagggtatggaacacctgaactatgcagccggtattcctccttatcttcgtggcccatactctatgatgtacaccttccgcccgtggactatccgtcagtatgctggattctctaccgccgaagagtcaaacgcattctaccgtcgtaacttggcttccggtcagaaaggattgtcagtagctttcgaccttccgacacaccgtggatacgaccctgaccatccgcgtgtagtgggcgacgtaggtaaagccggagtatctatctgttcactggaaaacatgaaagtgcttttcgacggtattccattgaacaaaatgtctgtttccatgaccatgaacggtgcggtacttcctgtcatggcattctatattaatgccggactggaacagggtgccaaactggaagaaatggccggaaccatccagaacgatattctgaaagagttcatggtgcgtaacacctatatttatccgcctgccttctccatgaagattatttctgacatctttgaatatacttctcagaagatgccgaaattcaactctatctctatttcgggataccacatgcaggaagcgggggccactgccgacattgaactggcttatacactggccgacggattggaatacctccgtgcaggagtggctgccggtattgacattgatgcttttgctccgcgtctgtcgttcttctgggccatcggtatgaaccactttatggaaatagccaagatgcgtgccgcacgtatgctgtgggccaagattgtaaaacagttcaatccgaagaacccgaaatcactggcactgcgtacacactcacagacttcaggatggtcactgaccgaacaggatccgttcaacaacgtaggacgtacctgtatcgaagccatggctgccgcattgggacatacgcagtcactgcataccaacgcattggacgaagcgattgcccttccgaccgacttctcggcacgtattgcacgtaatactcagatttacattcaggaagaaacgcagatttgtaagaacgtagacccgtggggcggttcttactacgtagaagcattgaccaacgaactggctcacaaggcttgggaacacattcaggaaatcgagaaactaggcggtatggccaaagccatcgaaaccggtattccgaaaatgcgtatcgaagaagctgctgcacgtactcaggctcgtatcgactcgggtgaacagactatcgtgggtacaaacaaatatcgtctggaaaaagaagacccgattgatattctggaagtggacaacacagccgtacgccaggaacagattgaaaacctgcgccgcctgaaagaaggccgtaaccaggctgaagtggacaaggcattggaggctattaccgaatgcgtacgcacaggcaagggcaacttactggaactagccgtagaagctgctcgcgtacgtgccacactgggagaaatatctgacgcctgcgaaaaagtcgtaggacgttataaagcaattatcagaacaatatcaggcgtgtattcatcagaaagtaaaaaggatgcagatttcgcacgggcttgcgaactgaccgaagaatttgcgaagaaagaaggccgtcgtccgcgtgtcatgattgccaagatgggacaggacggacacgaccgtggtgccaaggtagtagctaccggatttgcggactgtggtttcgacgtggatatgggcccgttgttccagactccggaagaagccgctcgcgaagctgtagaaaacgacgttcatgcagtgggagtttcttcattggctgccggacacaagactttgattccgcaaatcattgccgaattgaaacgtctgggccgcgaagatattctggtctttgcaggtggtgtcatcccggcacaggactacgatttcttgtataaagccggtgtaatggctatctttggtccgggtacttccgtagctaaatcggcctgccaggtaatggaactgttgttagaggcagaagaggaataaaaataattttcaccataaaaaagcgttccggatttcgaatccggaacgcttttttatgataattactataacttacttatacgtaatccagcgaatcatttccttgaaagaaggtttctttccatacatcaggatacctacccgataaatctttccggctatccaaatcatgccgaaagcggcaacgtacagaataactacagacagcatcgtttcccacaccggtacatcgaaaggcagacgcaccatcatgacaataggtgaagtaaacggaatcatggaacaccagatagccaacggtccgtcggggttatcggagctgtaaatacctgcatagagggcaaaaatcaacagaagaacaatcggcatcataaactgctgagagtcttcctgcccgttgatggccgcaccgatagctgcaaatatggaagcatacaccaggtaccctccgataaagttcaagacaaagagtcctcccatcttggccagattcagtccctgaagagttgccagcaaaccagatgctcctcccatcagttcgggcgaactaccagagattcccccggctacagccaacaatactataatcaacaccgcccagatagccagctgtgccacaccgaccagtccgataccgataatttttccaatcatcaactgaaagggcttaacagaagaaacaatcacttctacaatgcggttggtcttttcttccatcacactttgcataaccatacctccgtatgacatcacaaacatgtaaatcagaaaagtcagcaccataccggctgccatagccgctcctgcgttggattcactctcactcccgtcttctccccattttaccgtgcggatattcaacttgcggttcacatcctgcatgatggaaggcaactgcggaatgtcataatgcagcagcttgtcctgacgtacctgctcgtcaagcgtctcactcaccaggcgcgaaagactgttaggaacttctttccgcgaataaatcgttacggcctccggatgttcagccaggtcggccttgatttctaccacggcatcaaactgtgtggagtcacttcgaaaagaggcttccatctggggaactcccacaaaatgccaggattcatcgtctttaaactgaggaagatatttcatggtggcatcaataatggctacctgtttctggtctccgcccttgaccgtggataaccacaacgggacaaaaataagtgccgcaaaaatgaacggcatcaatatggtaagcaggataaacgactttttgcttacccggtttatgaattcacgctgaataataatccatgtcttgttcataactgaaagatttatttttttgattagattttcccctctaccgtacggataaagatatcgttcatggaagggatacattcggtaaacttgcagatttcgccctgcgcacctacaagtgacaataactcagaattggaaatggaagtgagcttccgcagtttatagtttaccgtctgctcatcctgcacctcactgctgacaatttcaaaggtatccgaattctgtaacggtttcgaagactgcatcatcagttcatactgattgcttttataacgtgaacgaatgtctgttaccgctccctgcaacaccacctttgaatgattgattagtgcaatatggtcgcagatttcctccacagaagccatgttgtgcgtagagaagataatggtatgtccctcgtctttcaatttcaggatttctcttttcagcagttccgcatttaccgggtcaaagcctgaaaacggttcgtcgaaaatcagcaggcggggacgatgcaacacggtaatgacaaactgcactttctgctgcatacctttggaaagttcctccagtttcttgttccaccaaggcataatttcaaagcgctcaaaccagtcggttagtcttttcttggcctcctgacggcttaatcctttcaattgtgccagatagatggcctgttcgcccaccttcatttttttgtaaagtccacgttcttcgggaagatagccaatggaataaatatcttccgggcgtgagagtcgtccgtcaaaccacacctcaccggcatcgggagctgtaatacggttgataatacgaatcagcgtggtctttcctgccccattgggtcccagcaaaccaaatacctgtccttcgggcactgcgatgcttactccatccagcgccgtatggttggcataccgttttacgacctgtcgtgtttccaaaaaagaatcattcatgttgttacttgttaaaaattgaacatttaaaagatataagtttcacaaagttatcaatttcatgcaaagtaaagaaaactgttcttattttctgcataaaaagcagacaagaaaaaaacgcaagggcgtttgacctaaaacgtaagtgcgtttgaagtaaaacgcacttacgtttgatcttaaacgcaagtgcgttttgaattgaacgtaaaggcgtttgaagtgtactgaaaatagttgtcagtttgaagattaattcctgacaaagttgacaggttaaacattatattcctaaaa

SEQ ID NO: 3788 - DNA, 28045 bp, Unknown
  gut microbiota DNA sequence
aacctttttaggaatataatgtttaacctgtcaactttgtcaggaattaatcttcaaactgacaactattttcagtacacttcacatctatgaataacaaccctcaaaacgtctttgcgtttcaaagtaaacgcaaggacgttttacttaaaacgcaagtgcgtttggaccaaaactcttttacgttttagttcaaacgcactagcgtttttttatactcattgaagtccttaaggagaatttcaataaatcattgaattacaacaaaatacatccctatcataagcaatatcatcaacagttcagccccacggttgacacggatggccacacgcatatcccgactatccaacggacgaggattatctccgatgaagggcttgtaaacggtctcgccgaaataatcgtgcggaccaccaaagcggcagttcaggattcccgccagtgccgcttccggataaccggaattagggctagcatgcatccgcccgtaatgtgccacgaacttcagcaacgaccagcgaccggaaaccagcaccatcagcagagcagtcagtcgggcaggaaggtaattggccacgtcgtccatgcgggccgcccagcagccaaaatctttataacgggcattacggtagccaatcatagagtcgagagtattgaccatcttatacgccagcatccccggcacccccaacagaaaataccagaaaagcggagcgatgacaccgtcactcaaattctcggccaaagtctcaagggcagccgtacgcacctcctggtcagtcaaggaagaagtatctcttcccacgatgcgggccacctgttttctcccggcttccagcgaagtatccgccgcttcaaacaccatccgaacctcatctatcagggttttcccggccagacaatagaatacggccactaccgaaagtgctatctttacccagggatgcagcagagctgccgcttccagcagccccttgctcaccagaaaggttagcacaaccagccctattgcggtccacgctccgttccgtctgcggtgagctccctgatttcctctgcgctcacaccgcgaaatcagttttccgaatcctaccaccggatggggcaaccacagcgggtcacctaaaatcttgtcaagcagaaagcctcctgccaggggaatcaatcccattacgagttctgtatccattcgtgtatgccttcaattaatagattgttttcttcttccgtctgtatggcgatacggaaataacgtgcatccagtccttcgaaattggatgcatcgcgaatcagcagtccgtgccgggtagccaagaattctttcagttgtgccgcagtaccctgccgaagacgtgctaaaaaataatgcgtatccgtaggcagtacctctatcccacccaaagcttctaatgcatcggtcacccgctttcgttcagccagcaaagcctgtatgtccatgcgatattcctccggatgctgtagcaggtaatgtccagcttctacggccaaggcattgactgaccagggcatacggcaggcacgtatccgggaaagaagctccctgctacccgtcaccgctcccaggcgcaggcccggcaccgcatagcatttggtcatggaatgcagcagcaatacgttaggcaatttcaccgtctcggccacggacagcacctctttctccgtaaacagcgcatacgactggtcgatgacaaacagctttcggggatatgcggctatcagtcggcgaagcgtgacgacatcccatgtctgccccgtggggttattcggattacacagccagaaaatcccctcattgcccgtcagtttctccagactggaaataccttccacccgatgtccgtgcaagcggcaggcatcggcatattcactaaaggtcggtatccatacagcagaatgacttccgcaaaaagcctgggcaatgaggtagatggcttccgtggctccattcgtcacacagacttcctccggactgacaccatgcaaccgggccagctcagcagccagtgcatagggctccggttccggataggaacggatgcacggcaggcatccggccaggtagcggttcaacccatcatggttcacccggtggtacacattcgaactgaaattggcatgaatggccgtatagcgataggcatcgtctccgtgtccgttaatcattttgagtcagtatttggtaaagcagtggcatgttcaggtgcttccgcacatggtcggccagcttgttgtattgttcctccttgaaagcggcataatccaactgaggctggtccagcttttcggcatacggagccagcagccactctatcacttccggattatccagtatgccgtgaatgtaggaaccggcacatttccggtctgccacacagccatccgtttctccgttctccagacgcaccagcggagtcaaagtctctccttccaccgccgaagtgcgccccatgtggatttcgtatcccgtgcaggtcggttcttcggaagacagaaaagcaaaacgtacctgacgtgtcaccttctctccttcgatggccgtttctgtaggcagaagtcccagtccgggcatctggctgatgcttccttccactccgtcggggtcggcaatacgctgccccatcatctggtatccgccacaaattcccatcacggtagccccgttgcggcgtgcctgaagaatggcttgtgccactccgttacgacgcagttcgtacaaatcgtcgatggtactcttgctgccgggtagcaggatgatgtcggccttcatcaggtcgtccacgttgttcgtatagtacaggtttacccgttcgtcatgctccagcatattgaaatcagtgaaattcgagagatgacggagcaataccaccgccacattgacctttccctgcaccgccttccgctgtttcaaggaaagttccaccgaatcttcttcctcgatgtagatgtcgtggtaatacggtatcacgcccagcaccggaatgccacagatttcttccatcatcttcacccccgattcaaacaagcgaaggtcgccacgaaacttattgacaataattcccttgatgcgtttgcggtcttccggtgtctgcaaggccaccgaaccgtaggcactggcaaacacacctccccggtcgatatcggctaccagaatcacatccgcatgggcatgacgcgccatgggcagattcaccaggtccgtatccttcaggttgatttccgagatactgcccgctccttccatcaccaccggattgtaacgggctgacagacggtcgaatgcctgattcacttcccgacgcaactcctcacgtccttctgtccggaagtactcatacgcactccggttgcctatgggcttaccgctcagcaccacctgtgccgtctggtcggaagtcggcttcaacagcaacggattcatatccgtatggcagggtactcctgcggcctcagcctgcaccgcctgtgcccgtccgatttccagtccttcgggagtggcatacgagttgagtgccatgttctgtgccttgaaaggtgccggatggtacccgtcctgcaagaaaatacggcataacgccgcagccagtacactcttacccacgtcactgcctgttccggccagcatgagcggatgcaaacgtggaagcggcagatcaatttccaccatccccccgtaaggaggcaaggctttcatggcatcttccagtttcaccttgccggcatagacttgtgcggctaccagcacaccgccatgggcaaataccagtgccggacctgaagtacggtccaggtggtcaaggaagtcggacacacgggccagcacgtccatgaacgactcgcctccggtagtccgaacccgcaggtaatcgtcataccattcctggatgcgcgggtcggttatttcctcaaaacgctgcatctcccactcacccatgttcatttctttcagccgctcgtcacgttccgcttcgggaaagccgcaataggctgccaagtgtgtacagcgggacaaaggactggtatagatacgtgaaaaacgcatccccgtatcctgaagggcctttttacatgcctctgcctcttcctggaatgaagcacgcaggggtacgtcggtctgcccgtagcacgtcccgggtgccacatccaccgaagtatgtcgaactaaatatactttcattttcttttatctaaccatattaaaaattatatgccattactactgctcccatccagcacgccagttcacacaaaaggaaaagtgcaccacaacagtcgccggtgtatcctcctaaacgtcgcttgagcagccagcccaatccaatgaaaagtacacatggaaagcacagcattccccagtaagaaagaggtaaaagcagcaagggcaacaatccgcctgcaatattggctatccactccgaaaggctcatgcgggtatagaccaccttagccttgctttcttcttcttttcgggcgtacggaaggaacaagagcatgaaactgcatacaaacttgcagaaagggtcggccacgcacagcacccagggaataacaggcgcaggcaaggataccaaaagcgagaacgagagcaggtaatacaatatcaatcccagcacaccgtaactcccgatatgggaatctttcatgatgcggagaatgccttcccggtcgcgtccgcccccaaatccgtcgaaaaaatcggccagaccgtcttcatgcaaagcccccgtcaggaaaagacgggcacacaaggccagcagtaccgctaccggcagaggaaaccaggtggagaaaacccagaaagacagggccatcactccccccgtgagccatccgcaaaggctccagtaactcaccacgtgccgaaagcattcggacggcaccgtacaaatccgccagaaaggcagacgggtgaaaaacatcagagcagccagtaaattattcatgaggtcagaagtatttggtaatggatgcatgggcaaagttatccatctcattcagcatccgcacagctgaatcgaggataggaaaggcacagacagagccgcttccctcacccagacgcaatgacagattcaacaacggacgggcgtgcaggtagtccagcaacagtttgtgtccgctttcatctccctgatgtccgaacacagcatacgaaagtacgtcgggacacaaacgcgaagcagccagtatgcagttggtcatgataaagccgtccacaagaatgaccatgcgcagctctgccgcacgcaacatgccacctactgccatcatcatctcaagtcctccgaaacgacacaggatttcttccaccgtatgctcgcccgagaaatgttgaagagcctgctgaagcacccggaacttatgggtcatggcttctccatacagtccgctgccggctcccacgcattgttccagcggaatacctgtcaggcaactcatccacaaggaagaagcggaggtgtttcctactcccatttcgccgaaactcaccacgttacaacctgcggcatgaatacggtctacgcattgcgctccacgctccagacacagattcatttcctcgggtgtcatggcatcttcgtgaaggaaattacgtgtgccgcgacggactttcatatcaatgatgcctttttcgtagggcaagtcgtaatccacacctgcatcgataatttccaggcggaatccatgctgacggcacaaaaagttgataccggctcctccgtgcaggaaattactgatttgctgccaggtaatctccttcggcgaagcactgaccttttcttccacaataccatgatcagctgcaaaaagcaagttataaggattgttcaacgaaggcgacaaggtctgctgaatcatacaaacctgcagggccaattcctccagacgccccagagaacctttcggtttcgtcaggttatcaatcttttcacgggctgcctgctccagttccgaacaggcaataggtgctatagtaaacttacgcatgatttatcctttcactttaaccggaataccggaaaccatcagtacgacctgatcggctttcgaagcaatatactggttcatccatccttgcaaatcggtgaaacgacgctgtacctcattgggggaaacgcctcccatacctatctcgttcgtgacgaaaataaaggtcgcatcctgagcggtaaaacggtcgaattcctgcttcaaggcttctaaagcaagtgacacttccggctgttccacaaagtagttcgtacaccagagcgtcacgcagtcaatgacagccacccgtcccgtaatgtcatgacggctcagttccttttcttcttcgatgttcgtccactccggaccccggttttgctggtgacgttctacccggcgacgaaattcctcgtcccatatctttgccgtagccatatacaccggcgatgtagacaactcatgagccagacgttctgcataactgctttttccagagcgctcgccgcccgtaatcagtattatcttcttcataatcttctgctgtggttttcagcttccgttagtatataaataaaaactgtctcaaggcaaatgtgcactccgtagccggaacgatgcatccgtttaccttgagacagtttcctgttccaaattgtacatcaagctgtacgactcttctgctttattcggctgctttttctgtttctacgaaatcagtttctccgtttgacaccagcaagttgtaccactgaatcaatttcttaatgtcactggtatgtacacggtcacggtcgtagttaggcaatacctcagccataaatgcgtgcaattcttctgcagaagctttcttgtaatccaaagaagtcacgttaccgttttctttcttctttacagattccagcacttcgcccaaagctacttcttctgcatcagtatacatggcaatatcgcccagtgagattaccttgtcactggcatagaccggaactcttttcttatctgcactgactgtttccacaatcagcatattctttgcctgagaaatcagtttgtacaaacctggttttccagaaatcgctaaaatagtcttcaacatattatctctaatgattaatttaattacgagtgacaaaaatacaacgcacgaatgacatacacaaactatcggcccgtttttctgtgagcaagccactcttccaacgccgcaatctgcgtatccaactgtaatttttcgtcgttgaaaatgacatagtctgcccgacgcttcttttcttcgtcatccatctgtgcagaaatacgtgcccttatctgtgcttccgtagcggcatcccgctgcatagcccgcgttatacgcaactccaagggagcatacaccatcacgacatagtccacggctgtgtgaaagcccgactcaaacaggatggcgctctccatagctaccacctccgttccggatgcggcctgacggtctgcccactgttggaagtcttcatacacacaaggatggatgatgcggttaacgcgtccagcattctctgtcgaggcaaacaagtaatttgccagcacgggcttgttcaatgagccgtctgccttatacacgtcctctcctaacaaaaccagtaacccctcacgtattcgtggatgagaaagcgtcagtttcttggcttccgtatccgtatcgtatacaggaatgcctgcttcttccagcaaatgcgacacataggatttaccactcccgatacctcctgtgattccaatcttgatcattctgattctttttctttagagggttcgcttacggtctgctgttcaatcaagtaatctacagaggaaggagtcacacgcacgtgacttactacatccggatagcgttttacggtaagaggcagtttttctgatttattcgccaccacatcagcgtaagaaacaccgaccagaaaatctttctccgtcacagacttaaagttcttcagtcccacctgcacagttatctgcaccttcgacgggaaagtccgcaaaacctttcctttcgggaaaccgattcccaccactggcacttccagcgtcttctctgaatacatatccacacaagccaccacatctacggatgatggcacaaacttcactccatgaagcttttgcaggttgatatgtttcttcagcgtatccgttacgttagtccaatggaagggctgtgtgtacgctgtcagaatggtattcagcacaccctgaggggcatagacaactacagaatcaggtattacccgaatatccgacacataatattgtctgccagccgatacttctccacccactgctaccggcactttcttgggtattccccttgaatagatataatccagtgtgtccggacgtacggcaagcagttgcgtagagttattcagctgggcactgatttttttcaatatctcagtctgaggaatgcggacataagaacctttatcctgataatcctcaaagttaaaagtcagcggaaagaaagtacgtcccagcatgtagttcagcagtaccgtacctctgtcttctaccttcacccgaatctcatcaggcagttcagacgtcatgaccacctctttcggcacattcttcagtctgaccggaatcttaaactcggtctgatacgtgtcgttcatggtctgcaagaaccagaaacaaagcgacacgaacacgaaaaacagaaaaatcagaaactctctgctcttggcactgagcagaaagttcctgatttttcgtacaagtatcaagtaatatctctttatgttctttcgatcgaacatagtcattcatatttatttcgcaggctgagcctgtgcatctgcataaattgagttcttatctaccttgatttttacaccggcagcaacttcaactacaacagtattatcttctacttccttgatttttccataaattccacccgcagttactacagactgtcctacttccaaattcttgcggaacttggcaatttctttctgcttcttgttctggggacgaatcataaaaaagtacataatggcaaaaatagccaccatcataataaggaaagagtaatctgctcctccctgtgcctgcaatactacagctaacaaattcatacgtttttcggtttagattaataatagctggacaaatatattagtttttggtcagcttgttttcctttttcaattgattaacaataccgtccaaagtaccattgatgaaaccgccactcttcggagtgctatacagcttggcaatttccacgtattcattcaacgatacatttaccggaatgttagggaaactcagaatctcagccaatgcaatctgcatgatgatgacatccatcacagctactcggctcaaatcccagttctttgaattctcactgattaaatgacggtaataatctgcattcaggatagaacgacggaacaagcggcgagcaaagtcctgatcttcttcatccttaaattcaggaagaagttcctgcttttcaccgttctcaggattgaagcgcttgatagtcttcaacacaaaagtatccacgatttccttatcgtcattccaatacaaactctggtcttccagaacttcatcaagagctgtattgttgaaaataattttcttgtacagttttctccacaattcacgatcctcttcgtatgaagaagtttcgctggccatatactccttatatatatcactctgcatgatttgttcacacaggtttttaatgaaatcgccttcattttcccaggttttcttctgagaagaagcaaaagcattcaactgtttgttgatttccaactgcgcaatgaagcgattttctacaaatttcatgttgggagacaaatcttctttggtaggaaccaacttgttttttgctgcatccaaccgcttgttggcatacttggttacctctaccatcaaaagcaaaagatagttgtacagatcatacgctttagataaactgaagaacaactccttttctgcagtatccaaatttttacctccgttctgataatacgcataaattatctgaactatcttcagacgaataagaactctgttaatcataatatataaacaaactatatttttaggtgggcaaaagtaagcatttttcctttattacacaccataaagcattatattttttcttttttttcagagattcgacatttttcctcattctcttttggcacattgcaaaaaaatattcaaatttgaacgcatttttattagtaacagtgagttatggaagaactgaagaagaaaagtacgactattgaaaacgacaaagaaatcgttttctccaaagctatcaaagctggaaaacgaatttactacttggatgtaaagaaaaaccggaaagaggaaatgttcattgctatcacagaaagcaagaaagtagtgtctcttgacaaagatgatcctcaggttaattttgaaaaacacaagattttcctgtacaaggaagattttgagaagtttatgaacggtttgcagcaagctatcgattttatcggacacgaacagggtaccacaagtgaagcacattatcagcctgctacagctacagaagaaatgccttcacaatctgaagaaataaaaattgacatcgatttttaagataaagcgcaaaagtactgattccaacttgaattacaggaatttattccatgaacatttggaaggtaaaaagaaaatgcatacctttgcgccgctttttcaagctcatcgtgtgatataccacatcgtgtgatggcgaattaagcaaacaatcaacttaatttagagtaacacaaaaaattaaaaacaatgaaatcaattgaaatcaaaggttctttgagaactgaaactggtaagaaagccactcgtgaacttcgtaaagacaatggtattccttgcgtattgtacggaactcagaaagatgaaaacggcaatcaggttgctactcactttacagttcctactgaaggcttgcgtaacttggtatacacaccgcacatctacgttgtagacctgaacattgatggcaagattgtaaatgctatcatgaaagatatccagttccaccctgtaacagacaaaattctgcacgttgacttctatcagatcgatgaaagcaaacctatcgtaatggaagttcctgtgaagttggaaggtttggcagaaggtgtgaaagccggtggtaaattggctctgcagattcgtaagttgaaagtgaaagctttgtacaatgtaattcctgaacgtctggttgtagacgtaactccgctgggattgggtaaaactatcaaagtgggtgaactgaaatacgaaggtctggaactgctgaacgcaaaagaagctgtggtttgtgcagttaaattgactcgtgctgctcgtggtgctcaggctgctgctggtaaataatttcagtaacctaaaactacaaaaatcctttcaatgaaatacttgattgttggactggggaatatcggtgaagaataccgcgaaacccgtcataatataggatttatggtattggacgccttggctaaggcgtccaatattgtttttagcgacggacgttatggagctaccgcccagctctcgctaaaaggcagacaattgattctgctcaaaccatccacttacatgaacctgagtgggaatgcagtacgctattggatgcaacaagaaaaaatccctctagaaaacgtattgattgtagtagatgacctggccctgccttttggaaccctgcgactgaaaggaaaaggcagtgatgcaggccacaacggattaaagcacattgctgctacgttaggcactcagaactatgcccgcctgcgctttggcatcggaaacgacttcccgaaaggaggacaaattgattttgttctcggacatttcgacgaagaatccatgaagcagatgccggaacgtctggaggtagcacaggaaatcatcaagagtttctgtctggccggactgaacatcaccatgaatcaatataataacaaataaaaaacatgccggaagcacgaattgacaaatggatgtgggctgcacgtatcttcaagacaagaaccattgctgccgaagcctgcaaaaaaggaagaatctcgatcaacggttctcaggtgaaacctgcccgaatggtaaaaccaggggacgtggtacaggtcagaaagcctcctgtaacctattccttcaaggtgttgcaggccattgaaaaaagagtgggagccaaactggtaccggaaatcatggaaaacgtgactacacccgaccagtatgaattgctggagatgagtaaaatcagcggattcgtagaccgtgcccgtggtacaggacgtcccacaaagaaagaacgaagagacttggacgagttcttcatgccagaatacctggatgactttgacttcgactttgatgacgaggaggaggatgaagaataaatattgtccgcattaaaaataaaagctggacttgcctattcacttgtgcaagtccagcttttttattctgccttggctgttacctcagaggcttcaaacaacgcattcaaattcttttcctctcctacgacccataccacatcgcctttctgcaattcaaaagagacttccggctgccgcaggttgctgtcgtcggcagactcaattccgaccaccagacaatggtatttattgcggatgccactttcacgaatcgtacgtccgcaaaacggtgagttacgtgcaatgacaaactgcttcaagtacatctcgcggttctcaaagtcctcatccttgtaaccttcggccaccttttccagctgtccggagaaaacagacaactgttcgtcggtaccgataacctgtaacttgtcattcggaaaaatccggtttcctccacccgggatattaatacggtgcgcacctcgtatgatagaagccacatgcactccgtatttctttccaaaatcaagttccatcaaggtctttcctccccacaacgaatcagcaggaaccacaaaatccgacaagtgcaaatcacggtccagcagtcgtccggcatattccggctgactctctcccaaatacgctttcttgatttccttggaacggagattctgcacaaacaccctttccatcccgattgactgctttttcaagaaacgggagaaaatcatcagcagaacgaccagaatagcaatacccaccataagcgcggcagaggcctggaacagatacttgatgatgtagaccacaaacaatacagccagcacaatgcgaagcaatacgattgaaatcagcggtgcatgattgaaacggctgtccgcccagagtgccttgaactcaatggaatgatttttcttcataatcatggcacggaggaaaggagaaatcaacaagatggtcactaccgctcccaacacttttccccaaaaacctcccagtgcggaaatcaaaagaggaaggaacaggttgaatgacagtaccaccatcgcaatggaaagcaccagataaatcaatgtgatacgcacaatcgctcccaacagttttttccagttgttctgatgatttacaggctgcactcctaccgaataacgctccagcaaatgcttccagaataccggaagatgccggtccacccagccataagcaggaccggacaaacgaatcatataaggagtaaggaaggtcgttatcacggatacagccaccacaatcggatataggaaagagctcgtcacattcagacttactcccaatgccgcaatgataaaggcaaattcaccaatctgtgtcaaactgaatccacactgcatggcgattttcaacgactgacctgacagcaacacacctcccgtaccaaagatggtctgccccaacaatatggctaccacaatcgccagaatcggccagatgtattccacaatcatgttcgggtcgaccatcattccgactgacacgaagaagatagctccaaacaaatctttcaccggagccacaagcttgtcaatgtgttccgattccaccgtttccgccagaatggaccccatgataaatgcgccaaaggctggagagaagcccacacgggccgccagcaccaccatcccgaagcacaaggccaaggacacaatgagcaacgtctcgtcactcatcagtttgcgtgccctctttaagaagagcggaatcagataaatacctaccacaaaccagagaatcaggaagaacaccagttttccgatgctgtaaatcatctcacttccttcaaaattcttgcttacggccatggtagaaagcatcaccatcagcacaatggccaaaatatcttccaatatcagaatactcagcaccaacccggcaaaacgctgttgccgaagtcccaaatcatcaaatgccttatagataatggtggtggaagacatggccagcattcctcccaaataaatgcagtccatctgtttccatccaaacatccagcccacaaacacaccgaccagtatcatgcagaagataatcgtacaggccgatatgaccgccgaacctcccactttcatcagtttcttgaagctgaattccagtcccagcgcaaacaaaaggaagatgacaccaatctccgaccacgtctggatattatctgcatctaccaccgaaggagtaaacgtgaaatgaggactgcagacaaaacctgcgacaatatagcctaacaccaaaggctgcttcaatttcttaaatagcaacgtcatgattccggcactaatcaatatcaaggccaaatcactgataagaggagctaaatgcgacataataacagttgtattttattttgcgcaaaaataacgaattccttacaagaaatatccccctgagagataaatatgaaacagaagtttcctattcaaccaataatgttgtaattttgtcccattctaaataaagagaatatgaatactactaaaactacacaaacctttccggtgctggacatgagttgcgccgcctgtgccacacgggtggaaaagacactgaaccgtcagccgggtgtttaccatgctcaggtgaactatgcagccgctacggccaccgtagaatacaacccgcaagaatgtacacccgaaacattaaaagatgccattcagaatgccggatacgacctggtcattgaaacgaatgcccaaaaagagaaaatagcagaagatgcacatagcaggaaataccgtcaactgaaacagcgtactatcttttcgctgatgctttccgtacccgtagccattatcggcatgtgcttcatggactggacgtacgccaattacgtgatgtggattctttccactcccgtagtattctggctgggtagagacttctaccgcaatgcctggaaacaattgaagcaccgcacttccaacatggatacgctggtagccgtgagtactggcattgcctatacattcagcctgttcaacctgttctggccggagttctggctgagcagaggcattcaccctcacgtctatttcgaggcggccagcgtcattatctcctttatcctgctcggacggttactggaagagaaagccaaaggaaatacgtcggaagccatcaaaaaactgatgggactacagccggccactgtcaccatactcactccggaaggacagctgaaagaaattcccgtggaacaagtacagcaggggcaacgactggttgtcaaaccgggcagccgcattgccgtggacggaaccgtatatgaaggcagttcctatgtagacgagagcatgctcaccggcgaaccgcttcctaccgaaaaaactcccggtgccaaagtatatgccggcaccatcaaccagaaaggaagcttcagtttcatcgccgacaaagtgggaagtgaaaccgttctggcccatatcatccgcatggtgcaagatgcacaaggcagcaaggcccccgtacagcagttagtagaccgcatcgcggccatcttcgtgcctaccatcctgagcattgccgttctttcgtttttagtctggatatggctggacagcagcaacggattcacccatggcttgctggccgcagtcaccgtcaccatcattgcctgtccctgtgcattaggattagccacaccaacggccatcatggtcggtatcggaaagggggccgaaaacggtatcctgattaaagatgcggaaagtctggaaacagcccgcaaagtgaacgccatcgtactcgataagaccggcacactgaccgaaggacgccccacggtaaccgacatctccgacccgcttcttcaatctccgttaggcgatgtgctctttaccctggaaagcgcttccgagcaccctctggcacaagccatcgtgcagcatcagacacgccagatacttcccatggaagaatttgaaagtctgacaggattaggagtacgaggcaaaatcaacggtacctactattatgccggcaaccgccgactgctggagacgcaccatcttaccgtgtcccctgccctgacggaagaagctgcccgactaagccaggaagccaagaccgtcatctggctggccgattcacaacaagcattgggactgatagccattgccgaccgcatcaagccgacctccagagaagccgtcagacaattgcaggagataggaatctcaacttatatgctgaccggtgacaatccggaaacggcccaaagaattgcagcacaatgcggcatcacccactttcaggccgaagtgcttccgcagcagaaagcccagttcatcaaggacttgcaaaaggaaggcaaaatcgtggcgatggtgggcgacggtatcaatgacagtgcggcactagctcaagccaacctcagcattgccatgggaaaaggaagcgacattgccatggacgtggctaaaatgacgctcatttcgtccgacctgaacaagattactgatgccatccgcctttcgcaggccaccgtacgcaccatccgcgagaaccttttctgggccttcatctacaacctgataggtattccggtagccgccggtattctgtaccctatcaacggcttcctgttgaatccgatgatagccggtgccgccatggccatgagcagtgtcagcgtggtaagcaacagtctgcgactgaaacggaagaaattcgcacacaccacagtgaccgtacaggaggaagtacaacccactgaagaaaccaccgtacccacaacggaaacagctaccccacagccggaaaccacagctccctctgcttccgaaaaccggaaaacctacctgatagagggaatgatgtgtgatcactgccgcacccgtgtagagaaagtactgaacatgtgggaaggagcctccgctcaggttacactcactccgccggaagccatcattaccttccaagggaaagtacctgcactttcagaactgcaacaactgattgatgaaaaagccggtgattatactctgaaagaaaagaactgattgaaagggatttatccaatcccagtacttccttggcagtactgaagtactgacggcgaagtactacagtactgccgtgaaagtactgaagtactgcaagggaagtactcaaacattcactgtcagtcttaaatgaaaagaactgtactgattggctttgtttttaccccatccccctcataaattcaaaaaaagtcgtatatttgaagcaacaattcaaatatacgacttatgaaacgaacacatttttttcatggaatacttctgattgtactcatcctttcctttatggcatgcaaggatgaccacggccccatttacctagtaagtgctaccgaccatcaacaaatcactgacggccaattggaaatcagtccgttcagtaaaggagagaaatttttaatccgtggaggagaaggaaattataccatcaaaaatgaaaataaggaaatcgtagactaccgctacgacggtgacacactgacattcattccggtcagcatcggagaaacctctacccttattgccgaccgctcaggcaacagttacacactgacgattgttgtcaataacccgcaaagcaactaccggatagaaagcatcagtgcagaagtggaaggtgataatctaaccaaaggagaagaagcggaactgcttgcacgaattgccgaagacgctccggttcagtcaggcggacgcttgctattcacctactctgacgcttctttgtcatacggcgatttgaaaattttccctaactataccggaagctatcaaatcggactttttgaacgtacattaaagtacacggaagataccggtgaaccttaccagcagattcaggcagaaatggcaggaagcaccaagagaacatacactttcatgctgttcgaaaacgaaacctcttctacccagactactgacaacacttcttctacaaacgaagaaggagctgccaccaccaactgttttatcaaagaagaggtaaccgcacaatacaaaggagagttcagcggactcaccaaggcgtatcggatttatcacctgaccaagctgccctaacattctgccgacacttttttgcacatgtctcgtatcgaacttcaatccttcgatttgttcaaccgtatcgaacggattcatcatcagccgacggctgcccccgacaatttacaagctaaatatatcctgctccacaaagtgctggagcaggcttgttatgaactgaccactggtgtcacgctctcgttcgccaacctgttttcccgtctggattacatctgcaaggagaagaaaatgactccctccgaccgctatgccatccagaccatgcgtcgcaactgtaacgcagccatgggcgaccgttttcaggccgacatgcaggaatacctttacgacctgcgggcactggtgcgctttgtctcactgggttttgaagaagacattccggcttccatccttccggaaatcccccactccaaccgtccgtatcagggtacacgcctgtcgcacatcccgtacgtacgggcttcggtgaccagctggaacgacacgcagatttttgcagcgaccgacagcgaaaccgacccgttcatcatcatcaactatgccaaaggtgggtatgacggcgacctgctctatctgaaagacctgctttcagaaaatctgccgctgaacctgctcgatgtgcgtgtggacgaggaaaatcactacattcccaaccttattgtgattcaccccgattacctgattgacatcagttcgctggccgcctgttttcgggagtacggacaccacccgctcaactatttcatgaacaaaatcaagccgagagccaatacggcccccatcctgatgggtaacctggccagccagtttctcgacgactatatcaacgagcagccgcaggagccggtgagctacccccgcaccatcaagaaattcttcgccgcttcggccctcgacttctgtacctgctcccttccggccgactttcacgcacaggcacaggcgcagatgatgaacatccgctcgtttgttcacgatgtgctgcctcataacatacggaacttcaacaagaagaataccctgctcgaagcctccttcatttgtgagaaactgggattgcagggacgtgtggacatgatgcagaaagacttccaggtactcatcgaacagaaggccggaaagcgcgacgaataccatcgccgccataaggaagaccatttcattcagatgatgctctaccaaggcgtactgatgtataatttcggacaggaaaccgccaatatgcaaaccttcctgctctattccaaatatgccgacggattgctgatagaacattttgccgaaaatttgttccgggagagcatcaagctccgaaattacatcgtacacaacgagatgcgactgggcgatggagccatcggagaaattgtagactcactgagcatcgatttgctgaacgaattgcagattggaggaaagctgtggaacgactaccaggaaccgcaactgcagacggccatcaatacgctgaaacgctgtacaccgctggagcgggcctacttcaaccgttttttcacgttcatatcaaaggaacagattctcagcaagaccggaggaagcaacgatgcgtctcacggatttgccggcaactggcatatcccgctgcacgaaaaactggaggcgggcaatatcctgaccggactgaccatccaggagaaacaaagcagcggccccggcaaaggatacgacctcattgaactgcacattccgacacaggacgaagacttcctgcccaacttccgcacgggcgacatggtgattctctatgcgtataaggaagaaccggacatgagaaagcagattctcatgaagggaaacattctggaattgcagccggaccgtatgaccttagtgctgcgcaacggacagcaaaataaagatattatcggcggcaaagaagaggtgtttgccgtagaacacgatttttcggacacgtccgccaacaacggattccgcgggctgtatgcttttctgtccgcacaggccgaccggaaagaactgctgctcggcgtacgtccgcctgcacaactggagggcgtcaaactgaacggcgattacggtcgtttcaacgaactcatcctgaaagaaaaacaggccaaagactactttctgctggtgggtcctccgggcaccggaaagacctcgtgtgccctgcgcttcatggtggaagaagccctgagcgaaccggacacctccatcctgctgttgtcgtacaccaaccgggcggtggatgaaatctgtgccatgctcacggattccggcattgccgaccgtaccccgttcatccgtatcggcaacgagttgtcgtgcgacaagcgtttcgtgccttacctgctgaaatacagtctggatgactgtcccaaactgaccgacatccagcagaaaatggcacgcacacgtatctttgtgggtaccacgaccgccatcaataaccgcctcaacctgttcacgctgaaacatttccagctggccatcatcgatgaagcttcacagattctggaacccgacctgataggtatcctgtctgcccgtcatcagcagcataacgccatcgacaagttcgtattggtgggcgactacaaacagttgccggccattgcccagcaaagtgcggaagaagctgccgtgaccgacctcctgctgcggaacatcgggctggaagattgccgcaactcgctgttcgaacgcctttacaaatcgagtccggatacctgccgcagcatccttcacaagcaaggacgcatgcatccggccattgccgagttcccgaaccagacgttctactaccgggagcaactggagagcgtgcctcttcctcatcagttggaagaaacgccttacgaagccggcctgactccgcaagacaccatcgaccagttgctgctggaacgcagaatggtgttcattcccgcagaagctccagaccacctgacctgctcggacaagaccaacccgaacgaagcccggattgtagccactctgttaggccatatttaccgtctgacggaatcccgtttcgacccgaaccggacggtaggtgtcatcgtgccctaccgcaaccagattgccatgatacgaaaagagattgcgcgcctccagctgcctgctttgcaggacatctccatcgacacggtggaacgctaccagggcagccagcgcgacattatcatctattcgtttaccatacagaatttcagccagctcaacttccttacggccaatacgtttcaggagggcaatttcctgattgaccgcaagctgaatgtggcactgactcgcgcccgcaagcaactgctgctgacgggtaacccgcacatcctcggggccaacatcaccttctacaagctgatggagtacatccgcctgcacaacggatacctggaaacggatgccctctcgttctgccggggagatttcaccctgccttcgtaccggaagaactgggaagtggcagacgatacctattccctgccagcgcatttcaagcagatattctcggaattgatagctccaccggcacagctggaagaaaacgaaacttactaccgtgaagccactgcctacggccggagtgacttccgcaccctgcccgaagagatgtccccatctgacttctgccaggcctacaactatttttatatgcggaaacaatatgccgctgcccaggccctctttaccggaagcggcaactggcagcacgacctcatccgtaaggtatcaggacgcgtggtgttctgcgatctctcgtgtgaagccggagcttcgggactggcttttgccgatgtatgccgttcccttccccatctagacctgacctatacgggcatctatcccatgcaggaaatgggagaaacggccgaagcctttttccgttcaccagcctacaagcacattcaggcaaactggtatccccgcctgagtgccgtgcctgctgccttctggcaagcccatgccgtactgaccgaactggtgattttcaacctctccagtctgttcgaccgcatcgctccgcgagaagcacgcgacctggctctgcaaatcaaccaattggtgcatgcccgtcccctgaaccattacgtactggtgtaccgtgacgatgcggggccttgcatgcacaaccattcctacacggcattctgcaaccacctgtcggcagagctgaagccgctccagccgcagatgccccttttcggaaaaatccattgtgaacctaccgaaggagttccagtttcgcaggaattcctttatgaaatacgtaccaactgatgaataaaaaacctatacagcgtgccctcatcgtaggggctacttccggtatcggaaaagaaacggccttgcaactgctccagaaaggatggatactcggactggctggccggcgtgaagagaatctgaaagaactgcagcaactggctccggagcgtatccacatccgggccatcgacatctgtcaggaggatgcgaccgaccgcctgctgaaactgattgaagaaatgggaggcatagacctctacctgcactgctcgggcatcggtcatcaaaactaccagctgacaccggaaatcgaactccgcacgctggagaccaacggcaccggatttgtgcgcatggtgacagccgccttccgctactttgcccaacagaaaggaggacacctggcggtcatcagttccattgccggaaccaaagggctgggagctgctccggcctattctgccaccaaacgtttccagaacacgtacatcgatgcgctggagcaactggctcacatccagaaacttcccatccggtttacagatatccgtccaggattcgtagccaccgggctcctgaacgacggcaaacactatcccatgctgatgcatacggagaaagtggcccgccacattgtgtgtgccctggagaaaaagaaacgcattgtcgtgattgactggcgctatcgtatactggtagctctctggcgactgataccccctttcttctggaagcggctgcctgtcaggaattagccaccacccgtccttctttcaccacaatccgttgcaaacggcggtacacatagataaatgccggaatcaggaagaggttggcaaacagccaggctgtcgggtcgccgaagcatacgccccagaatccccacaacggaaccgcaatcagactgaccagcacacgggccaccatttccgacacaccggagaacatagccagccgtgtgtagcccgctccctgaatggtatagcgcaagatactgagcatacccagcaagaagaagaaagaagtgttgatgtgcaggaacaaagccgtatcgtcgataatctcggtctcatccggtgagataaacagcagggcaaacttctcggccagtccccacatcagggcaccaatcgctatgacatagacggtcatcatcagcgtggccgacttgatacccatccagatgcggtccggctttccggccccgtaattctgtccggaataggtcgccatggccattcccaagctatccagcggacacatcacaaacatcttgatacgcatggctgccgtgaaagctgccacacaggccgtacccagcgcattgttcgcactttgcaacatgatgctgccgatggccgtaatggaaaactgcaatcccatcggtaccccgatgtacagcaactgacgggccaggtcgctacggaaacgacggtcggcaggctcggttttcaggatgtcaaacttgcggtacatatagatgtaacacagcaaggccgacaacccctgcgagaagaccgtagcaatggctgctccggccactccccaccctaacgtaaggatgcagaacaaatcgagcacaatgttcagtatagtagagaaaagcaggaaccagaacggggtcttgctgtcgcccagcgcacggatgatgctggacaataaattatagaagaacgtacacggcacaccgataaaggtaatcagcagatagaggtaagccccttcaaagatattctccggtgtgcgcatggaacgcaggataaatccgcaaagcagactggtgacaatggctaccgcgaccgacatcaccgccgccagcttcagactgaccgatacatagcgccgcatcgtcacataatcgcgagctccgaacttctgtgccaccggaatgccgaaacctccgcaacacccgttgcagaaccctaaaatcaaaaagacgaccgacgtactggcaccaacagaagccagcgcattgatacccaagaactttccgacaatagccgcatccaccagcgaatacgtctgctggagcaggttgcccagcaacaatggaaaagtaaaattcagaatcagcggcagactcggccctgatgtcatctctttagactgtgccataatttcctctcgttatccttaaaatcttaataagcgtgcaaaagtacacgaaagtcacgaaacgaaagaaaatcatcccgttaaataaggtaattcgagcaatatttttgccttaaatcaagcactaagaaaacgcacttgcgtttcaaaccaaacacaagtacattttatctgaaacggccttacgttttacttcaaacgcaaggccgttctgaatcaaacgcaaaggcgttttttcaacctatcccaacagatttataaagcacaaagaatcagctatttaaccacattttcaaaagaatcatccgttcacggctaatttgtatcgtaccatcatacgccggccatacactcaccacggcctttccgttgaagtagtgctgaatattgcgtatggaatcggccgagaggataaactggcggttcacccggaaaaagacacgcccgtccagctgctcactcgttgccgccttggccaccttattccagtaatactggtctgcctgatacagcacgtcgttcgtcacccgcttttcttcgtacaaggcactctccttttcctttcgggatttctccagtccggctttcagtgcccctcccgagtagaccggctgcaacaaagtcacggaagccccgtacttggtgtcacgcccctgaaaatacagcggagtttctatggacggaagttccctgtagagttccagcgggttacccgtgtaactggcattggcatttccgctcagcgaaggaagaaaataggccttcaccttttcacgatactgctgcaagaatacactctcctgggcatggactcccagctccagtcccagcatgcagcacatcatcattcttctattcatctcaatatagttataaaattagagaaacattttttattgggccacacatttcttctttttattcaccccgtttggatattttatagaaaaccgtgtacaaggccggagtgacaaacagtgtcagaagggtggcaaaggaaagtccgaacaccgtggtcagggccgccatcaataccggacgggctctggaaaccgtggcctctatcacagccgtataaggctccacaccggccttctgctgaatatttacctcgtcgagcagcacaatcacattcttgataatcattcccagcaatcccagccagcctgcgatacagaaaaagccaaactgaaatccggtgacccacagaccaaagaccatccctatcaaagacaagggtagaatgaggaaaataatcaagggctgacgaaagttgccaaacagcatgaccagaatgaccagcaacatgataagtgccagcgggaaatacttagtcagtgcagccatggcttctttctggtccttgtactgtgagtcccagaagaaggtatatccttccggaagacgaatgcgctcaatctcttcccggatttcagagtgaacttctttcatggtatgtcctcgctttacatcgcactgggcagccatggaaagcttccggtcgtacgtgcgcacaaggggatattcccatgccagtccgatgctgttggccacctgccccagcggagcagaattacgcccgttccatatcggcaaatcctccacgctttccatgtcccaggaacctttgacatccgtatgcagcaacaccggcactttcttgtcgcggtcacgatatacccctacagccgtaccgtcattgacggctttcacggcattcatcatgtcatgccgtcccacattcagccttccggcctttaccggatcataatcggccttaatcatcagtgccatgtttccccactcattgcgggcattcagcaccttgggattcttccgcatgatttccagcgccaggttggtcaaagaatcgagtacctccggatcatctccgcagaagcgtgcctcaatcaaggcctgcggaatggagtttatctcgaaactgttcacacgaaccagcgcgtccggaaacatttccggcaaacggtcgtacaacatagcctgaagctcacgtgacttctccggcgtgtcagcttctaccaggcattgcgcataattaggctgcggaccataagccgcattggccaggtaataacggggcggcgtctgcccgacaaacgacgacacctttttcactccttccaacgaattcagataggctgtcatctccgtcatctgacggtcactttcttctatacgtgtaccctcgggtaaccagacgtcgaccgaaaaatactgcttgttgagcaagggcataaactgctgcggaataaagcggaatccccatccggcaatgaccagcaacagcaccatcgctcctaaaaccacatagcgtctctgtatagtccatctcaatgcctgccggaacaggtcgtatgcacggccgctgaacaattcgcccttcagctcatccggacgcggacgacgcacaaactcctgcacgaagaatacattctgcgtaatggccagtacccagctcagcaaaagagataccgcaatgacaatgaacagtgaagacaggatttcaccagtgatatgcggcgacaggtagaccggaagaaaggtcagtaccgcaatcagggtcgctcccaacagcggcatggaagtgcccgacacggcatccagtatggcttttcttttccgcatgccccgctgcatgttcaccagtgcggcatcgtacaccacaatggcattgtccaccagcatacccatggcaatgataatggctgccagcgacatacgctgcgtcaggaaatattcagaaggcacaaattccctgtcaggaagtgcattgaagcggaccacacacgccacagaatctttttgccgcatctgcaacgccatatcctcgggcacgtaggcttctaccttgatgcgtgaaaggtcgataaacgtcaccaccggaaccgacggtttcacatcctggtagcgctcgatatgcgcctgctgcacataaccgtcgaaaggcgcatacagacggctgtcttcccacgcgttgactgccgcttcataatccgctttggtgcgttcatagtttgcctttgcctgctcataattcatgaggctgtctcaaaatagaattgcaaaagtaaaaatattacagattgaaacttagaaataaaaaatctcctgtttcagccttag

SEQ ID NO: 3789 - DNA, 27875 bp, Unknown
  gut microbiota DNA sequence
ctggtttccataacttttgctgattttctttccggcaaagatataaatttatcggatttacccctcagattattacgttgaccccggtttcctacttttgtccaaactaaaaactgtaggaaaaatgaaaagaagttcattcaatgtgcttttcttcttgaagaagaccaagctgctgaaaaacggagaagcatccgtttgtatgcgtatcactgtagatggtacgcgagttgaaaacaacatccgcaaaagcattgacccgtctctctggagtcaggctaaggaatccgccagaggcaaaagccgcaaatcatgcgacctgaatgcctacatcgaaaatgcgagaatcaagttacatcagatcttttgtgaactggaagaacagaaccaacctataacggcacgtctgttgcaggaaatatttttcggacaggacaaagaaccggaagcggtccgcaccctcatcggtaccatgcaggagcacaatgaccaatgccgtgccctggtcgggaaagactacgccctgattaccgttcgccgttatgaaagctgcaagcgctatcttgccgaacttatcagacagaaatacggaaaggatgatctgccgctggcggaagtcaacggtgagctggtacgtgcctttgaattttatctgaaggcggaaaaggaatgtcagcagaataccgttatccgttatatgaaatgtctgaagaaaattaccaatctggcactggccaatgaatggatagccaaagacccgtttatcagtatcaagttccacgaaaaagaagtaatccgtgagtttcttactatggatgaactgctgagcatctaccacaaggaattttctctggagcgaatcaccgtagtccgtgatgtttttattttcgccgcctttaccggtctggctttcatcgacgtgcaacaactttcccctgagcatatcgtaaaagacaacaacgaaaacctgtggatcaggaagccacgtcagaaaacaaagaacatgtgcaatattccgctactggatattcctttggaaatcctgagaaaatatgcagattatcctgcctgcaaaaagaaaggagtattgctgcctgtcccctgcaatcagaagatgaacagctacctgaaagagattgcagacctatgcctgataaagaagaacctgactacacacaccgcccgccactcgtacgccacatctgtctgtttggccaatggggtaagcattgagaatgtagccaaaatgctcggtcactccaatatcaagatgacgcagcactatgcaagggtactcgacagttccattctgaaagatatgaataatgtaagggatgtactttcaaattgtctgtagcttatgaaaagagaaattatccatatggaggacggcaggattgttattcctgctgttcatcctgataagattcgtatggacgaagccgaacttgtcggcttgttcaatgtagttgcaccgactttaagggctgcgaaaagaagaatatataaacttgggatattgcaaccattcaccgcagaacaacgtattccgttaaaagaggggtatcaggtagtctataacctggaaatgatatttgcgcttgcctttcagattaatacttatccggcccaacaattacgtgagtatataataagcagactgttccaatctgaaaagtcaatgattatctgcataatgaatggtaatcataaatcatatctaaaatgctgataaatattgatttcagtgtttcatgcggataataagacgcaaattttgcagttaattatccgcgaaactctcttaaattagtattatataaagtttatcgtgataaatcattacctttggaagtaaatattaaaaatatgattgaacctttcaaagattatggagattttgtaaaccataaaaacgaacgaattatctgtttcaatgtaagcagaacatatttgggttgtgaacgtccgaatttatatgaatgtacccgcaaatattggagattaaatggtcaacgagccaagaaagcagatttagtttttgcaatttgttgtggttatattgttggaatcttcaagccgcatcactggtttcctacccaatgtgagaaatacaaaggacgatgggagtttgaaggagaacaaatatttgattctccttaccagaatcaagatatatcaaaaatcgtacgtaacagacaaaatcctgtgatgtatataaacatgtagttatatgacagcaaattctgatttaataatatatcaagaaaacgaactttacggcctgaaagattgtaatgacaatgtcattatttctcctcaatataaggaaatgtatccattcagttgtggtttagctctcgtcaaaaacaataagtcccaacttggttacataaataaagaaaataaactcatagtaccgtttgatttatattcttggtgtgacccacaattcgtttgtggatatgctcgggttgtacgctataatacaataagcgggaaagacgaatggggaattatagatacagatggtaatgtcattgtacctataaaatatgataagatatggtctcttaatgaaagttatctacattcggttaaagctttcattgaaaataaagaggttcttataaatctttgtatatttcctaaacgtgttgtttttagcggtttaaagtatatagcaacatatacgatagaaaatttcaaagctatttttaattgtacacgtatagatgtaaaggtaaatccaaagacagaagaactatttttctcttacgggtgccacactgggtatgttgcattaaaatggaagccaatcgcgccagttatatcagtagttattaatagtgccggttctctctttttgcttctacatgaaaaaaaagatacgggaaaaacaaactttgaaaaaagtatttataaaagacacagggaaaaatcatctaaacaactttctaatacaacttcttgggagtatgaaaaagaaaatacaatagattcagacagttggagtgacccatacggagacgaacgggcatattatgatggttggtctagagaagatgtcgagtctggattagctgatgcatacgaataattcatttctgaaaaaataaatcaaaagaaactttaatctataaattatttaaggtttacaaagtaaaatcacaagagttagtcaagcatatctaaaatgctgataaatattgatttcactatttcatgcggataataagccgcaaaatttgcggttaattatccgcaaaaccgtatatttgcagaaaacagtgatgcctatgtatatacatgaacataaagaatggccttctttttcgtggaacaaggaacttgtcagtgagaagctgaacaaggtaaacaaagctgtcggttatctgatgggacgccttagtgtaatcggttttaacgacaagatgtctgccgtagttgaatccatatctcatgacatcattgcatcatcagaaattgaaggagtggaattgaacaatgagcaggtacgttcatctgtagcccgcaaacttggagtacaactaccgaatccgaccgaatcctcacgatatatagacggagtagtggaaatggcacttgatgcaactgtcaatttcaacagtccgcttacccatgaaagactctttggctggcacaactgcctgtttcctaccggatggagcggtccaacgaaaatagatgtagcccgataccgcagtggagagatgaaagttatttctggaatgttcggtcgggaaaaggtacattatgtagcgcctgctcctgaaagaatagacaaagaaatgaatcggtttctggactggttcaattcagatgtacataacggctatgtcaaatcggcgatagcccatttgtggcttgtctgtatccatcctttcgatgacggaaacggacgaatcggacgagccattgctgatatggcactttcacaggctgaagactcaaagatgcgtttcttcagtatctcccatcagataaataaggataaaaaacagtattacgacatattggagaaaacgcagaagggagattgtgaaattactgaatggattatctggtatcttgactgcctgctccgttccgtcgagcaatccgacgaaacattgtcgaatgttcttaacaaggccatattctggcaaacccatgccgaaacagccctgtccgaacgacaacgtgaagtcttgaatttatatttggacggttatcccggcaaactgacggctaaaaactgggcaaaacgtgtaaaggtatcaccggatacagcagcacgcgatataaaagatctggtagaaaagggtattctgataccccagcaggggcgggttcgtgacgtattctacggaatccggtgtagtgagtctatccttgtcatccccatgcctgaagatttataacccgaactaaagaatattaatactatttttaagtgtcatcattcctttttaaatctctaacccattaacaagacgattataaaaacacgaaatttatttctctaaacttgaaaggattcatatatttgccacctaacagacaaatacaagcaacgccacaaaacttaaaagaatttataaatcttaactctaacaaaaaccgacatccatgaagcatattaatctccaatccgtcattgaagcttatagaaatctagaatcttcattgttccagaaattaatgaatagctacggaatcattgtaggaggattaaatggcattaaagattatgaacttgatggcatagaaggactgataaacaatatatttaaacatacagccgacattacggtcaccagcaattactatctaggctactcaattcctcagataggaaaagaattcgacttactccgttttggcaccaactacctagtcaacattgaaataaaaacaaaaagttcaccagaaaagatactaaagcaacaagtaaaaaataaatattatctcagtttcctagaaaaagaaactcatatttatacttatgtattaaatgagaacaaattatacaaactcatgatagacaaaagtgggcctattaccagagaaatcgactttcatgagctatgcgatgatttatcatcacagaaaattatgtacctgaatcacattgatgaggtattcgaaccttctaattatctgatttctccattcaattctactgacagattcataaacgaagaatattttctcactatacaacaagaagaaatatgcaaagccatacaaaagcaattagccgataaaaccacaaacttcatcgcacttacaggaggagcaggtacaggcaagacactcttaacttatcatatcgccaaaaaagcaattcaagttggtcatgaagtacttatattgcactgtgcccaacttaatgcaggtcatgaactattaaaaaataaatacaaatggcatatacatatgcctagatatgctcccagtttttctgattatgatttagttatcatcgatgaagctcaacgtatgcgaccagagcagtttaataaatatacggaagaaataggtacattaaatataaaatgcatattttcctacgatgaaaagcaatatttgagcgacaacgaaaaagaatataatttaaaaaaaaggattgaagaagaactatcatgcactccatacatattgacaaacaaaatacggacaaacaaagaaattgcgttttttataaaacaacttttcgattctcaaacaaatattccaggcattacatatccacacattgagcttacatattgtaaagactacttttctgcaaaaatattgctacaaactctgctaaatgaaggatgggaaattcctagttatacacctggaacacgttctattttcgattatgaaaaatactttcccagtaacaaaatgtgtgcacattctgtgatagggcaggaatttaacaatgtggccattgtaattgatgaacatttcaaatatacaaaaaacggaaagctaacggccagtaaccaatattattcacaaaggcaaatgttataccaaattattactcgagcccgaaaaagacttcatatcattgtggtcaacaatgcttctatgctagcacgatgtatagagattcttaataaataatgtactaaaaacaggccaacctcaaaatcgagattagcctgtcttttttaattttatcgtcctcctgccggaagattcttcaagaaataatctgtcatagacttgcgaaggtgatacgtggtgccttcccgctcactgatggaatgtgaacgcatgggataggacagctgataaaataccttaccgtgtttcaccagctcattcaccagcatctcacaactctggtaatgcacattgtcgtcacccgtaccatgaataagcagcaggttacctttcagcccctctacgtatgtaataggagaacccttacgataaccttccggatttgcctgcggtgtattcatgtaacgttcctgataaatcgtgtcatacaaccgctggtcggatacgaaggcaatggcaatacccgtacagaatacatccggatagcggaacatacaattcaatgtctggctgcctcctccgctccagcctgtaataccgatacgggaagtatcaatgaatgaatactgacgggccaagtccagaattccttgcgcctggtcttgcgaagcaaaagttcctacctctccatagatacactttctccattcccgtccgcgaggagccgcagccccacggttctcaatgctgactacaatatatccctgattagccaggtaccgatgccacaggtcacctccctgccatacatcctgcaccgtagagccggcaggttcaccgtacacatcaatgatgaccggatatttcttcgacggatcaaaattaacgggcttgatcatccatgcatccagttgcaggtctccggaacgggttttgacaaactccttcggactcaactgaagttgctgatactgcgatgcagcttcctcgttattttcaatgaccgacaccgttttatgagaaggcaaggccaccatctctatccgaggaggagtcacagagttgctgaacgtatgtaccgcatatttcccgtcgggagacaaatcgtaccgatgctgtccctgctcatccatcggactgaggcgtttcacttcaccctttcctaacaactcggcagaataaagataccgctgggtataattatcgggtgaagcaatgaaatagacgagacctttcttcacgtccatgcccacctgttcgataaagtcgaactcccctttggtaatgggctgaacatcttttccgtcacgacttacacggtaaagatgacgccagccgcttcgttcactctgccaggtaaagtaagtattattcttcagccaggtcacctgatcatttgtttccacccatgcggcatctgtctctgtcaggatattcttcggagcaccgcctccaatagtagcaatccacaccttgttcgtgttctgcggacggttcatctgctgaataaacaaatcattgctttccggtataaaatccattcgcatgatataattctgacgagggtcaccgggcagatcaatccatgtagtctctccaccggaagctgctacgtatcccaccttaaccgtcgagttcgtagttccggccttcggataagggaaacgaaggattttcggataaagcgaatcgacattgttgataatgtcaaaccacccagtaccttctgtatcgctttgccaataggctatgtacttgccatcgggactccagcggaagccgtcacggcaagagaattcttcctcgtacacccagtcgaatgtaccgttcacaatcgtattacttccgtcgcgggtcaactgtacaacctttccgtcggaaacatactccacatagatattgtttccgctgacataagccacacgtgtaccatcgggcgagaatttggcaaacatcagactgctctctggcaactgtgctcctaattgcctcaacttgcccgtttccatgttcaatacccaatagtctccgcgcgtatcatacctccagacacgccgtgtattggtatataccaaaacctgcttatgggaggtgtcaaaactaaaactacggacagacaacgtgtcggaagtacccggctttacgaacatggaagcaggaataagtacctcacgcttgttcttaccgggcgtatacgaaacgatgtcgtatcccccagccggatttttctccttctttgaataactgttcccctctgaaagccagtttacccggctttcgcccttcgtgacaatcagacctccgttcaccacttcctccaaggttggtacatgctgtgcataggatgagaaggcggtcagacaacacagagctaaaaagatgctttttgtgttcatctacgcattaatttatggttgattaaaataaacttgtaagatatgccaaaagtacaacttttcagcacacaaacggaacaatctgacataaaaaaaacgtacttgcacttcttcgagaaacgcaagtacgctattattaaacacatgaacctcaaatcttccttttctgaggctttttagaattttaccaaaatacggaataccttacccggattcaccgcccagccttccatggcttccgatgcattttcgggtgacacaatgcttgaaatcaatttttctaccggacaatttcctgttttcatataatgtattacagcacggaaatcagctggcaatgcgtttcgggagccacggatgtccaactctttctgtacaaagtatttcgtctgaaattctaccccgctcttggcataaccgatacataccacgcgtcccgtaaagctgacctcatcgaccgccatcacgtaagtggccggactgcctaccgcctcgattaccacatcggctcccaagccgcctgaatattcctgcacacgttcatgcacattctccgtgcgtgaattgatgacatacgtagctcctacctcacgagccagagccaatttctcgtcatccaaatcgacggcaatcacggtagctccacgcaaggcggcacgtacaatggctcccataccaaccataccacagcctatcaccattactatctcattgtcaatcacctgaccgcgtgacaccgcatgaaagcccacgctcatcggttcaatcaacgcacagtcacgtgaagagatgccctctgccggaatcactttcgaccagggaagcaccgcatattcacacatcacgccgttacgctgtacgcccaacgtctcattgtgttcgcaggcatttacccgcccgttccggcacgaggcacattttccacaattcgtatagggattcagtgtcacattcatgcccttcttaaaactctccggtacgcccggtcctacgacatctattaccgcaccaacttcatgtcccggaatgaccggcattttcaccatcgggttccgccccagataagtattcaggtcagaaccacagaaacctacatattcaatctttaccaatatttccccagccttcagttcaggcttctcaatctctacgaccgccattttctggggagctgcaatttgaaccgctttcattttcttgttatttttattttcagatagactattttcaatccaataccttgtatcctctccacccgtaataggcgcaaaataagaaacaaaccatcggaactacatacgccagatgatacatctgttcattaacgtgcatcagataagccgtaaactggggcaggcaagcattacccactatcgacatcaccagaaaagcagagccacttttcgtctgactgcccaaatctttcagtgccaatgaaaactgggtaggatacatgatggacatgaagaacgaaatgcccagcatggcatacagaccaatccagcctccacacacggcaactacggcacaaagcagaatattcaccaatgcatagaccagcaacatatcttgcggacggaaacgaatcatcagtccggtaccaatccatcgtcccagcaggaaagccagcatatacaaaccgaaataggtggtagcttccgactccgaaattccggcatacgaacagcaatagactaaaaacaggctgttgatagccgtctgtccgccattataaaaaaactgtgcaatgacgccccaccgcagatgcgaccgcttccatacactgaaatcaatcagtttttccttagaagtgccccgctgcccttcatctccaatcttaggcaacctagagaaaataaagattcccgcaataaccagcagcaataccgccaatgccagataaggagttttcatagcatccgtctcaaactggatataggcttcccatccgcccggataatctgccggaagcgtttcacgcgtatagtgcgtgccactcaatatcagtttactcaaaaacatggctgctatgaaagctccgagcccgttaaatgactgcgccagattcagtcgttgaggagctgtagccgcatcacctaaagccgttacgtacggattggctgcggtctctaaaaaacacatcccggtagcaataacaaagaagatgcacagataagcccaatattccttcaacatggcagccggaaagaacaacagaccacctgctgccgccaacaccaagccgaaaataataccagctttgtagctataccgcttcatgaacatggctatcggaatcgggaaaataaaatacgccagccagtaagctgtttccgtaaaggacgcttcaaaggtattcagttcgcaagtcttcatcagctgccgaatcatggtaggcagcaggttactactgatagcccacaaaaagaaaaggctgaaaaccagtgcaagcggcagtttatagctattattatttttcatcatttccccgtttttttattccgacatattcttgatgtaaggaagttccgacagattatggaagccatagaaactgcgggcattttctcctaagaagagggctttctctctttccgtcaactctgcggacttactcacaaagtcgtacgacatgcggtaggtaatggccgtaatggtacgcggataatccgacccccacatcaatttctcaaagccgaccagctcagcagcctcacgaatggctcttaccgcccccttaaacggataaaactcgtcattgaacaaccaggtaattcctcccgattcaatacgtacatgaggatgacgcgccaacttaatctgttccttccactgaggacgggttaccataccaaaatgcccgatggccaccttcaacttaggacactcctgaattacctcctccagttcgcccacctgtgtagctccgtcggccatgtcaatggaaagcagcaccccgttctgctccatcagatggaacatctgcatcatttcctcacaattcagtcttacacgcccctctttgagcagcaagcgctgtgcaggaatcttaatcccctggaatccccgtgcaataagctgacgcgcctgatccagatatcccggcttacggaactcacacattccgcatacaaagaaacggtcgggataacgagccgcaacctcagccaaatagtcattctgaaaaccgtcaataaactcttgtgtcaccacggccgcagacacctgcgcatagtccatgttagataagaacacttcggcactgtttactccatcggtcatgaacgggggaagcatctgtctcacttcccccatgaacaatgaccttccattctccaaggtgcggataggaagtccctcaaccaccgtatcctgcttcaaccacaaatgagaatgtgcatcgattattataaaccccatatacaaattcctcctttaagaattagcccaacttacacggaactggtcgccgataatttcacgcacttcacgcaccaaagtttcatccatcggttcctctatgtaagccacattcttcttcacattctgcggattggccgtactgaacaacgttgtagcaatgcgcggattgctcacagcatactgcatggccagtttttctatcggataattcttactcttgcaatgctccatagcctttcggcaagcctctaccaacggctgaggagccggatgccatgacggtacacctctttcggtcaacaaacccatagacaatggagaggcactgattaccccaatacctttcgactcaaaatagtccagaaaatcgaccagcttgtcatcacacaagcaataatgacagaagttcagcaccgactctaccgttcctgccggtgaatggtcaatcacccacttcaggttctccagttgcaggtcggtgatacccacatgacctactatccctttctctcttaactccaccaaagccggcaaagtctcattaaccacctgattcaagtcggcaaactcaatgtcgtgcacattaatcaggtcgatatagtccacatgcaggcgttccatactctcgtacacgctctccgtagcccgctttccggaataatcccaggtatttaccccgtcttttccataacgtcctaccttcgtagagagataatacttgtcgcgaggaatctccttcaaagccttccctaataccgtttcagccttataatgtccgtaataaggagacacatcgataaaattcattcccaaatcaatggcggtaaacaccgcttccaatccttctttttctttaatgtcatggaagactccccccaaagaagaagctccgaaactcaaagaggataccttcatccccgtttttcctatttcatggtattccatagtgataactttttaagattcatacaaataaaacatacgctccatcaactgccatttctcggcagaactgcttcccgatacacattcctgaaaacgtgccacatggtcttcccattcggcctgtctgggtaactgtgccaggcgtttcatcgcgctatcccagtcaaaatcaagcggtgtttccacaatcatgaacaacttgcagcctacgatatagatttccatttccagtatccccactgaacggattcccgcccgaatttccggccaggctttttcacgactatgtatcttccggtattccgctatcagttccgggttgtttttcaaatccaatgcctgacaatatcgcttgacgggcataccgtactcttttactctatatccttccatcttgttacattttattatttcgcgattcgcaatacgggagcaatctgattcaacggctgtgcaggaagcgtaatcgacaagccttcggcggtacggacaaaatcgacttttccgtatcctaataattccaccttacgaatctttccttcataaagtttactgtctgcagccagtgacttgatgtttacctttccgtctgccggccatgccagcacagtagcatacaaatatttcggagtctgtgtgaaacggatttcctttgctcctgcctgactgtaagaaccttcattgaatccctgagcattgagcggaatatcttcttccgcaatcggaccttccccgaacactacccacggacgagtatcataaatagcttccttgttaatgttcatccatgccccaaattcattcaggattttctcttctttttcatcgaaagttccatctgcacgcagaggtacgctcagcaacagatttccattcttgctcacaatgtctaccaacagtttagctacgtatgccgctgatttatattcgtttttctcgtaaatagacgtattgtaatgccatccgccaatgcaggaacatgactgccacggctgatcgataattttattgggagcaccgcgctctacgtcccacaccaaagcttttcgctgattttcatcaagaatcttaccaaacatcaccgcttccagtttccctttgtgagtagccatattgtggttgtagaaatgagccgcaatcttcaatcccgcgtcactcaccggatagaaaggtgctactgtcacatcaaaatacagcaaatcgggattatagcgattgatcacatcgagtgtacggttatagaagtttgtacaatattcctggctcggtacacaaactccattgccccaagcccactggcggtgaatcattccgttatcccagctgttctcactcaatggatgattctgtgcatacaaatcctgcggatcgtatccttcccaccattttccttttccgtctgctttggtcagttttccatcgtatggaattcctttcttcggacctttcgtatcatgacgctgagaaggctcataccagctccacgcatggtcggcatgcaagctgactccaaaatacaatccgtattttcttgccgctttttcccatccggccaaaatatctttcttcggccccatattcactgaattccatggctgatacttgctgtcccacaagtccatgttgtcatgatgattacccaaagcaaagaagtactgggcacctattttcttataaaaggctaccagcttatccgggtcccagttttccgccttccacaagggaataatatccttgaaacccacttccgacgggtgtccgtagtgttttacatgatattcatactcacgagtaccctccatatacatggaacgagccatccagtcgcctgaaccttccacacactgcggtccccaatgagcccatataccaaatttcacgttacggaaccattccggcacctgatagttttccaatgaactccatgtgggttcaaactttcctttcatcatcggttcatcctgttccgatactggtacctgataagtctgtgccgacaatccggccatggataaaaataaagaggcgaatataagctttgctttcataagtattattctgattgtgtttttacaaaaacaaatgtacggagaagtttaaacaagggataggattaaactgagcgtttatgtgtcaatatcgacaaaacaaaagatttcaatgagattcaatgtgactatatcgatttttattgacaaatatcgattattaaaggagtcattcggaaaagaaaaaataatcatgtaattttagggcgaaaaagaattgcttatgaacttgcaagtagaacaaatgcatccactcgtcctgaatgtgggactggctatacataatgccgactggaattggaaaaacgtaaacagtccgtttacacgtttatattatatcacagaaggtaccgcacagatagaattacccgatggaatacatactctatatccgcatcacatgtattttattccatcatttacagtgcataccaatatctgcgattcacatttcgagcactactacttacatatttatgaagatcactactcagaagacgactggctggaacactggaagttcccgttagaaatagaggcaagtccacttgatttatctcttttccaacgtttatgtgaaattaatccacacatgaatcttcagaagtcagacccgacaacctatgacaacaatcctacactcatgagaaatctacttagaaacaggcaacgagccttctgtgacaaagtagaatcaagaggcattgtactgcaactattgtcacatttcctaaaatatgcccagcctaaaaatgaaatggaagacaaccgaattgccaaggctgtacgctatatccataaacatattgcagaagaaattgaattggaaaagctcgcagaaatctcttgcctttccaaagaccactttatccggcttttcaagaaaggaatgggaactactccgttacaatatgtcaatcaaaaaaagatagaaaaagctcagttgcttttacttactgaagaactagctgttaaagaaattgcttttcaattggcatttgaggactattcttatttcaaccgcctgttcaaaaaagtcacaggtatgactccccaagaatatcgccggttatactcacactagtcattataatcacattttccgaaaagacttttatataactgccagatgataaacatatactctcaaagcactttctacgtttctctcccataagccatacggttcacatccgggaaacctacatttccggaacttaaaacatatagttcccggcaagaaaacataaaagaatgactgacgttattttcatagcgtacaggcattcttcacaataaatcatctaatagactagtttttcatttgaaccttcatcacaaatcctccacgcggcagacagtccacctcatgtatagctttcttcaagccagagagcatctgtatatcaaactgattacgttcttttccatcggcatacaaagtgatttctttgacgggttcctgaataaaacttaaatccacagcaagcgatttcttcccgtttgttccgttcagaccggcaatataccagcaatcaccacttttccgggcaagcactacatagctggaaggataaccgcttagcaatttcgtatcgtcccaaacggtgggaagcgaagagataaacgaacgtatttcagctggttgggcatggtatccttcggggcggtcggccaaatgctgcaaggcagattcaaacgcaaccagcagagccagttcatgcccgttcgaagtgatatgtggatgctgagagtctgtaaaagtacaaggagtatagtccatcgggcccactacattacgcgtaaaaggcaatgtacagttatgccatgccgcactgtcggtcaatgtctccttattattataccattcagctccatatactccttctactgacatcaaatgaggataagtgcgctgccagcctcgcggaataggagctccatgaaagtttaccatcaaatgatatttagccgcatcctccagaatgtccacaaaataattcatcgtagatatactgtcctggctgaagaaatctacttttatcccttttactcccatggactcaagccaggcaaattctttctgacgcatttccggcttgttcaaacgatacaaaggaccgaacgcacaccacgcggtggaagaattataccataacaaaggagcaatattcttctgttttgcataagccaaggcatcttccacattgccgccgttccccatttcgtcccattccgcatcaatcagcatataagggagatgaaaatctgcggcaaaatcaatgtacttctttattatctgataatctcttgaaccatgattgtaagcccagtaaatccatgaaacaactcccggcttaatccaggagacatcgctcagacgacaaggttcactgacatctgtcaccagggtagattctaccacatcagccaaagaaccgataatggccacgcgccaaggtgaacaccatctgccggaaacgttggtcggctctgccatctccactttgtagctcgatgcactggaggcattgttcaaccaggaaccacagttacctttcgccacatttgcttctgagataagggtaaaaacagaacctgccacttcaaacaatgccgggaatccccattgtccagcagtatatccctgcacacgtcctttatttttcagatagaagtcttcataagcttgattcagtttctgtgtccatcgggtaatgccttcctgaaagacaaaagctgtattttcatcggtcacacatatctcttttgtcggctgaggaaacacatagcgaaaagcaataccgtcatcatacacccgaagttccaaatccagcgatacattctgaccgttctcgaaatgaaatacctgctggtttccttcgttcgtgcaatgacggcgtttacccgttatcatggtataatcctcacgtatggaagtcacggcagaagaagacacgtaattaaattcatctccggatgcacgttgaagctgaagtcctatattctctaactgaactaccgaaatcggaacatctccttttttatatatcacacgcaatcctttcaccggattatcccagctcactcctattttcttattaggagagtacaaactatcatctgctttcactgttataccggaaaagaatacacatacgaaaagaaggcatgccttccatgaattagaaattaattgtctgtacataattgtttattcattttattggatgacaaaattatccgttctttcaggaaataaattgcataaaaccgttttatacaggacaatatcgatatataaagagtacataaacaaattttatccacaaaaagttcttactatgtacgcaaaaagtgactttttgcacagtattgtgccctttaacaaaacaggacaatatgcaacagagcttgataaagaggagataacaatataattttatataaaacttcccctaaaagcgaggaatcgaggaaaaactttctacttttgcaacttgtaattaaaagaactcatttgcagatgaaaataaagtttttgccattgattgcagtactctttgctgcaacatctataatgacatcgtgtttggataatgatgtagaacagattacgtatacatctgaaaccagtattacgggattctctttggggacattgaatatcaatcgcatgggaaaagacaaaaatggtttagatcgtccttatgtagatacacttgattgttctaactatccattcaccattgaccaaatcaatagaaccatcacaaataaagactcactccccgtaggaacccacatagataaggttattaccagtatcacatatgatgcgggaatgctagcctacaaacccaaaggctccgaacgtgataccatctggacatcaactgactctatcgattttactgacccggtggaatttaaagtgtatgcatatagtggtgtagaaggaaaaccttatacaattaccattaacgtacataagcaggaaccggacacaatttcatggaagaagtttgataacaatccatttagtgctggaaacttgagtgaacagaaagctgtatatgccaatgagaagatttatatttttgggaaaaagaataatggcaatacttgtatagaatatactaaagctataaatgttcctggagagaacggactgaaagataacccgacgtcatggactcctatagaaaatttaccattaaacatcgatacttattctgccacagtatgtgcaggaaacatctatttcctggcagaaactaataaacagctttacaaactggatgcaaatagcaataaaattacttctgtaggcacagaaacatttgaaatgctaataggagcaaatgaaataaaaagtgaactttacgctgtaaaaggtggaaaaagtggtatatataaagaaaatacatggacagaagatgctgacccattcacactgttcccgacaggtaaacctttcttctccaatacaactactgcatcttacaacagcaacgttactactactgtagctctttgctataatcagggcactacagccaatgacacaacagcgttggtattcaaccgcatgtcaagtgatagcaaatgggaaacaagaatgcagaatcttccactgccgaacctgaaaaacgtcaccatgatttactacgacggaaagctgtatgctttcggtggggaaagtgtaaaaccggaagtgaaacctttcagccagttctattgttctaccgataacggactttgctggagacctgtcactgaatgtatggctttcccagcagaattcggcacactttatactacacaccacggcaattattcatgcgccgtaactcccaaactggaaaacggaacgtccagaggtaactttatctggattgtgtgggaagatggaagcatcagccgaggacgtatcaaccgactgggattcactcctaaatggtaatctaaaaaactgaaaaacaacaaagctatgctatataaagaccaaattgacaagaaccggataccggcacatattgctatcattatggatggcaacggacgctgggccaaacagcagggacatgcccgtactttcggacaccaggctggcgccgaaaccgtacatgtcattgcggaagaagccgcacggctgggcgtgaagtatctgactctttatacattctctaccgaaaactggaatcgtccggtagatgaggttgccgcactgatgagtttacttatggactctattgaagaagaaaccttcatgaagaacaacatcagcttccgcatcatcggtgaaacagaaaaattgccggaaaacgtacttgcacgattgaacaagtgcatcgaacgtacgtcaaagaacacgggaatgtgtctgactttagcattaagctattcttctaaatgggaaatcacggaggctgtcaaaaaaattgcccgtgaagtgaaagaaggaatactcactcccgaggaaattacagaccagaccattgaccgatgtctggccactcattatatgcccgacccggacttgctaatcagaacaggcggtgaaatccgtctgagcaactacctgctttggcaatgcgcctacgcggaactgtatttctgtgacactttctggccggacttcaaggccgaagaattatgtaaggctatttgtgactttcaaaaaagagaacgccgattcggcaaaaccagtgaacaaatttaacaaagaacaatgcaaaaccgtttttcacttcttctattgattgctgcatgtctttcgtctgctccaatggggggatatgcacaggacaataatacaactgaacaaagcgataaaccagttatcctttacaacggaacacctaaaaaatatgaaatcgccgacatcaaggtcagcggagtaaagaactatgaggattatgtcttgataggtatttccggcttggctgtcggacaaactatcaccgtaccgggagatgacatcacctcggccgtaaaaagatactggcgtcatggcttgttctctgacgtgaaaatcactgcagataagattgtagacaataaaatctacctgtctatccagctgacacagcgtcctcgtattaccgacatcgtaattcacggtgtgaaaaagagtgaacgtgaagatttgcaggctaaactgggtatggccaaaggtacacaggttacaccgaacttgattgaccgtgccaagattttgatcaagaagcattttgacgagaaaggtttcaagaatgcggaagtaaacatcattgagcgcgaagacccggaaaacaaggagcaggtatatgtagatgtgaacattgacaagaaagctaaagtcaaagtccaccagattaccattgacggaaacgaggtcctgactgacaagaagttgaagcgtgtcatgaagaagaccaacgaaaaaggtaagctgattaaccttttccgcgccaagaagttcatcaatgaacgttacgaagaagataagcagaaaatcatcgataaatataacgagctgggttaccgtgacgcacagattgtagtagacagtgtatcgccgtacgatgaaaagacggtagatgtctacatgaaaatctacgaaggacagaaatattaccttcgtgacatcacctgggtaggtaacacagtatatccttctgacctgttgaacgaacagctccgcatgaaacgcggtgatgtatataaccagaagttgctgaacgaccgtatctctaacgatgaagatgcaatcggtaacaactactataaccgcggatatgtgttctaccgcctcgacccggtggaagtaaatattgacggtgactctatcgacctggaaatgcgtatcactgaaggtccgcaggccagcatcagtcacgtacgcatcaacggtaatgaccgtctgtatgaaaatatcgtacgtcgtgagttgcgtacacgtccaggcgacctcttcagtaaggaagcactggaacgttcttaccgtgaaattgcacagatgggacacttcaaccctgaaaatatcaagccggatgtacagccgaacttccaggacggtacagtcgacatcaactggggactggaatcaaaagccaacgaccaggtggaattctctgccggttggggacagactggtatcatcggtaagctgagtttgaagttcaccaacttctcatttgcgaacttgttccgcaaaaacgataactaccgcggtatcctgccgcaaggtgacggacagacactgaccatcagtgggcagaccaacggacgctactatcagtcatacagtgtatcgttcttcgatccatggtttggcggcaagcgcccgaactcattctctgtttcggccttctactctatccagaccgacgtaagcagccagtattacaactctgcttacatgaacaactactacaacatgttgagcggatacggatactacggaggttatggaaactattatgacaactacgaatcttactacgaccccgacaagtcaatcaagatgttcggtgtatctgtaggatggggtaagcgtctgcgctggccggatgactactttaccttatcggctgaattgtcttaccagcgattcatgttgaaagactggagttacctctatatcaaactgaacaacggacagtacatgaacaccggtaactgtaataacctgagcctgaacctgaccttgtcacgtaactctacggataacccgattttcccgcgttacggttcagaattctcggcttctttgcagattactccgccgtactctctgttcagcaagaaggactactctacttacggtaaagacaactaccacgatgctgccagcatgtacaagtggattgaataccacaagtggaaattcaaagccaagacttatacagccttgatggatatccagaaatgtccggttatcatgacccgtacagaattcggtatcctcggtcacttcaacaaatacaaacgttcaccatttgaaaccttctacgtgggaggtgacggtatgactggttacagctacaactatgcatccgaaaccatcgccctgcgtggatatgaaaacggttcattgactccgtacggaagtgaaggttatgcttacatccgtctgggtgccgagctccgctatccgctgatgctggaaaactctaccagtatctatgcactgggcttcgtggaagcaggtaacgcatggaacaacgtgaccgactttaaccccttccagttgaaacgttctgccggattcggtgtacgtatcttcctgccgatgattggtatgatgggtattgactgggcttacggtttcgacaagattgacggttcaatgcaatacagcggaagccagttccactttatcatcggacaagaattctaacacttaaaaaccaatgattatgaagagactcattttatccgttatgctgttagtggccgccgtaggcatggcctcagcacagaaattcgccctgatagatatggagtatatcctcaagcagataccttcttatcaacaggccaaccaacagatggagtcactgtcaaagcaatggcaaagccagattgaggccaaagccaatgaagcgaagaagctgtacgaagattaccagaaaagcgccaacacgctttctgctactcagaaaaccagcaaagaggaagctatcgtagccaaagagaaagaagcggcagagctccgcaagcaatatttcggaccggaaggtgaactgatgaagaaacgccaggagctgatttctccgattcaggatgccatctacaatgcagtgaaagaaattgcaacccagcgcggatatgatgccgtgatagaccgtgcctcggcacagagcatgatttttgcttctccacgcattgatataagcaatgaggttcttgcaaaactaggatattcaaattaattttatacatttgcaaccgggtgataataagccctgttttatacatcgaattaattaataacaaatagaaacttgagattatgttgaagaaaattgcttttttacttttactcatcgcaccgatgagtgtattcgcacaaaaatttgcgcactttaaatcaatggatatcatcccagtaatgccggaatacgcaaaggcacagacagacatccagactatgcagaaacaatatgaggacgaaatcaaacgtgcttctgacgaattcaacaagaaatatgcagaataccagcaggaacagaagaacctgccgcagaacattcaggaacgccgccagaaagaattgcaggaactgagtgaaaaaggtatgcagttccagcaggatgctcagcagcagttgcagaaagcatacgctgacatgatggaaccgatttacaaaaaactggaagatgccgtacaggctgtaggtaaagcaggtgcttatacttacgtattcgacctgaaccgtactgatattccttacattgacgaagctcagtcaaaagatattacaaacgacatcaagactaaattgggcatcagcctgacagcagttcctgctactccggcagcacctgcagcaactcctgctcagtaattaaagaaactctttgtcgtactgactacatgtcattcagagaaacacacaaaagatttctctgaatgacatttttcttttcaaacctttcaaccgttttcccatgtaccctctatctgcccctcacaccggccctatcggagtattcgactccggatacggaggtcttaccattttaggaaaattcatcgaacgactgccacagtacgattacctgtacttgggagataatgcccgtgctccatacggcacacgctcgttcgaagtggtctacgacttcaccctgcaggctgtcaagaaattgtttgagctgggctgcccgctggtcatcctggcctgcaatacggcttccgccaaagcgctccgcagcattcagcagaacgaccttcctcacatggatccgacccgccgcgtattgggagtaatacgccccaccgtggaatgtatcggtgaaatcacccgtaacgggcacgtaggcctgctggctacagccggcaccgtacgctccgagtcctatccgctagagattaaaaagctttttccggacattcaggtcacaggaatggcctgccccatgtgggtgccactggtagagaacaaggaatacgacggtgacggagccgactatttcgtcaagaaatacattgataccatcctgcagaaagatccggatatcgacaccctgattttaggctgtacgcactatcccctgcttctgcaaaagatacggcagtacaccccctcgcacatccgactggtaacgcaaggcgagtatgtcagcgaaagcctgaaagactatctgttgcgtcatccggacatggacgcacgctgttccaagaacaagcgacgggagtttcttaccacagaatcggtcgagaaattccgggaatcggcttcggtattcttacactgcacagacgtacatgtacgcaatgtccaacttgaataacacaaaaatggtccgcctctgaatcttctcacaaaggcggaccattttttgttttatatgacctgactgctattcagccacaaaagtcgcgtgctgcacattccgactgtccggacctaccatcacctcaaattctcccggttcatatccatattccagacgagagttataatacttcaaatcatcctcgtcgagcacaaattccacattctgcgtctctccctttttaagggccacacgacggaaagctttcagctccttcaccggacgggagatttctgcatacacatcgtgaaggtacagctgcacaatctctactccgtcacactcgccggaattggttacaggcacggttaccttcaactgaccgcccttggccatacgctcggcactcaactgcaaattaccgtagcggaaagtggtataactcaaaccatagccaaaaggatatagcggttcattgctctggtcgatgtaattgctgccataacggttaaaagtggtatcatccgtatccggacgacccgtgttcaggtgattataataaagcggcaactgtcccaccgcacgcgggaagctcgtggtcagcttacctgaaggagacatgtcaccaaacatcacatcggcaatggcatcgcccgcttcactgccggcaaaccacacgttcaggatagccggtacatgctcagactcccagcataaatccagcggacgaccggtaaacaaagccagtatcaccggctttccggtagccaccagtgccttcaacaaatctttctgcgcatccggaatctgaatatccgtacgagaagaagactctccgctcatctcggcactctcacctaatgcggccacaatcacatcggccgaagccgccacgcgcaaagcctcagcccgcaactgacggtcatcaccacgtgtcagcggacgaggttcgaccgcccctttctctatatgctcactataatacacgttacttcctttggcataagaaaccgtagccttatcacctaccgcacgacggaaagcttcgtacatcgtcacatgacggtctgtctgacaatccatgttccacgtgccgcacatattgttctgcgcatcagccatcggcccaatcaatgcaatgcgtccctttttctgcaaaggcaacaacttaccctcgttcttcaacaacacaaacgtttcggccgcaatctcacgtgccgctttacgattcgcttccgtaaacagttccttgcgacctcgaagcgtatcacaatacttataaggattctcaaacaatcctaacttatacttggcctccagtacccgacggcaggcctcgtcaatccgctcctgcgtcacggccttctccttcaatgaagcttccagcgtatgcaagaaaccatgtgccaccatatccatgtccgttcccgcattcagtgcccgagcagaagcctccttcaagtcggccaccccatgagttttcatctcaccaattgaattgtagtcggtcaccacaaaacccgtgaatccccactcattgcggagcaaatccgtcagcagccatttgtcggctgtagcaggcaccccgttgatggtattgaacgagctcatcaccgagcccactccggcttccaccgcacccttgtaaggagccaggtacacattatacatcaggttacgactcatatccaccgaattataatcacgtcccgattccgaagctccatacagcgcaaagtgcttcacacaagccatgatttcattgttctgcttcatgccgtcaccctgataaccgcgcacatacgctccggccatcagcgcgccaaggtacgggtcttctccacttccttctgcaatacgtccccagcgggcatcccgacagatgtctaccatcggactgaatgtccagctgattccatcggcactggcttccgtggcagaaatgcgtgccatgcgcgttaccgctgccgtatcccagctacaagacagggccaacggaatcgggaagatcgtttcgtacccgtgaatcacatcggcacccactatcagaggaattcccagacgagtctcctccaccgccatacgctgcatctggtaaatcttgttcactcccttcacattgaaaaagccgccgacctctccagcccggatagcttctgccatcttgctgttcttcactgctcccgacaccaaatcatttcctgccggcagattcagctgtcccaacttttcatgtaaggtcatgcgccccatcaggtcactgataaagcggtctatctccgcatcctttcccccggaattcggcgaagaacatcctgccattgtcaaaagcaaagcccccgcctttacaaactgacttatttttcccatagatatcgtaatttttagaattcgttcttccaaaaatatcaatttttcacacaaaacgagccagaaatacgaggtttattttcgcaccagcagaacgcaagtacgttttaaaaaaactgtagtgtactaaataagttgacacaatttatttagtaacatgcgtaaaaatcgaaagtattcaaaggcagaatgtc

SEQ ID NO: 3790 - DNA, 41340 bp, Unknown
  gut microbiota DNA sequence
tcttggaggtgggcgttgacggattcgaaccgccgaccctctgcttgtaaggcagatgctctgaaccagctgagctaaacgccccaaaaagaaaaagcaatgatttacgagaaattcgttgagtgggcgttgacggattcgaaccgccgaccctctgcttgtaaggcagatgctctgaaccagctgagctaaacgcccgatagtctcgttctcaattgcggttgcaaaggtacaactaaatttgtaatctgcaaacttttgagttgtttttttgccaaaaagtgaaaaaagagcacattgaagggggtaaaaatctatccaacaaggaaaattcgcaagaaagaacccacacaaatcaaattattgtacgtaactttgcaaggctaaaatgaaggaaaaacaaatggaagaaacgtttgcaaaatacatcaacgtcaacggagaactgatggatttatcccgccctcaggtgatgggtattctgaatgtaacccccgactctttttatgccgacagccgtaaacaagcggaagaggatattgtcagcagggtacaccagattatagaagagggaggacgcatcattgacattggtgcctattcttcacgtccggatgccgaagatgtatctccggaagaagagatgaaacggctgaaacacggtttacaggttatccaaagagaattccctgatgccattgtttctgtcgacactttccgtgccgatgtagcccggatgtgcgtagaagaatacggtacggcaattatcaatgacatttctgccggcgacttggatgcaaacatgttttctactgtggcaaaattgaaagtgccctacatcatgatgcacatgcagggaaatccacaaaacatgcaaaagaatccacactaccagcatccggttaaagaaatcatcctttattttgctgaaaaaatcgagaagctccgggctgcaggtgtaaaagaccttattatagatccaggatttggtttcggaaaaacactggaacataattatgaaatactgaacaaactggaagagttctccatattccaacttccgatacttgtaggagtatcccgcaaatcaatgatttataaattattgggaggaggagctgaaaatgccctgaacgggacaactgccgtacacgctattgccttgatgaaaggtgccaacctgctcagggtacatgacgtaaaagcagccgtagaaaccgtccggattttcaatgccatgcaaaaccaatgatttaagacacgaacttcaacatacttttaattatgcctttcgacatctacatactcagtttcaaagatatactcgacattctgctggtagcctttctgttatacaagtcctacaagctgatgaagtcgtcgggctccattaatatcttcatcggtatcctggtattcattatcatttgggtaatcgtgtcacaggtactccaaatgagactattaggttctattttcgacaaactggtgagtgtaggagttatcgcacttattgtcttgttccaggacgagatacgccatttcctattgtcattaggttccagacaccgcagcaacagcctgttccgtttcctgaaaggcaacaaaaagacggacacagaaaaagaagacatcatgcctatcgtgatggcctgcctgaatatgagtaagggtaaggtaggagcactgattgtgatagaaaaggatttcccgttggatgacattgtccgtacaggcgacctgattgatgccaatatcaaccagcgtctcattgagaatatcttcttcaagaacagcccattgcacgatggagctatgatcatcagccacaaacgaataaaagcagccggatgcattcttccagtttcacacaacctggaaatccctaaagaattaggacttcgccatcgtgcagccttgggtgtatcacaagaaaccgatgccatggccattattgtatccgaagaaactggcggcatttccattgcctaccacggacagttccatttgaagctaacggcagaagaactggaacgtatgctgacagccgacaaccggatgtaacttcaatccaacatcagattcatgtaggggaatttcccatcaaacagttgtcgggtaagttcattgatagaaaccacttgataagtctgccctttcaattcacctctggaatacatgcctccttccaagttatgccaaccattattttgcggaagagcctcatccccttctactttaaaataatggtttccagtccatattcctgccaataatctgaacaaagcctctacatgaatgattcttgccatccctagctcataaggctgaccatcagaaaaagaatagcattccaattccatcaagccgtaatgagaagacaatccacgcagcatagcttgttcaacggtcttatccctgcataccacttccttgattatcagtttttcctcttccggcaaacagaagcaaagtccctgcagttcatcttcctctacagcaccccacaactgacctcccgacaaaagtaaatccgccaatatgatgtggaaatcttcccaattatgctgtatgcagttttcacaatcagactgaaaaaggtcataaaaacggaaagcatccccgcataaggcacttcctggagggatttcaaccagtttccaccgatttgaaaagttttcaacaggtaaacaagaagctgttaataacttttttctacgttgaaaacaaagggtatatcccgaacgggcatagtaacctttcagccaatcctctgcaggtatcaaagtagaaaacagcaccccttcccgaaacatgctctgatgagcctgggccagcaattttcgcatcactccccgctcccgatatgccggatgtgtacaagctcctgaaatataggcaaccggcacattcatgccttcatacgtcaaccgatacggaatacgttgcaaagcagctattacctgcccgtccgattccatatactcattcagggaatcagcatagcggcaaccgaaataaagatccatgaacgcttccgagtcatgaaagcaagttgcccataacattctgacctgctctttcacactcatttcaactccgccatgtatttttcaagaatcacttccggctgataagaaagcttggctttccggagcccttccaatcccaagtcttcctcccggttgatatagatgtactgcgaaggaatatgattggcaaactcataattaatcatggcgtacgctccttccacagccgtatttgctttttccacacaggtatcgaaagtcgtttggttaatgggtgccccaaaagtaaaggccacaatctcatcctccacataaagcactcctccaatcacgtccaattgctccaaatgctgcaaggcagctgtcatggagcaacgttcgttctccaaggcctgattctccgcgcaattgttcgcccggcaccactgagtctccagctccagacatgcgggaatcaaatcggaagtcaaaggtttatatgtataattcggataattactcctgaacttattcagatgatttcgtttgggctgaaactttttccctttcaatgtagacaagtcggaacgcagataaatgtaatcagcataatcccggtcggatacaaaattaaaccgatccgggaaagcattttccagctctgcacgcatattggcacacacacccaacaaacggaaaagagccccttgactttttgcatcttccatcaacgcctcaatcaccggacgaatatcacttccttcacctacaggcatcatataggccagctgtccgtctgcatagaaacgaaacagtaaaaagccatccatttccgcaatctccgtctgatacaggaaacgccagctgtacaggttcacaaacgacaaatcacaattacgccgtggactgcacaacgtatatttctgcacagtttccttatcactcaggtctatcggtttaaatgctatcatataggtgtttcttttttgtttcgaacaaatacttacatctgaagaaaataacaaatcagccggtcattcagttcattccgtacaaggacaaaatcttaatacaatcctaagatatgcaaaattgtaggcgaaagcaaagcggtaagaattccgttcaaggtcaatcccagacttgcgtacgcaccatacttgccactcacttccatggcacgtgaagtaccgactgcatggccggctgtccccatggacaatccctgtgcaatcgggctagctacacgccctacctgaagcagtttaaatccgcagatagctccaaacaatccgaccacaataaccacagcagccgtcagtgaaggaatccctcctaccgcattcgatacctccatggcaatcggagtagtcacagactttggagccaatgacataatcacttccggagaggcccccatcaatttggcaataatcgtcaccgaaaccagcccgaccacacaaccggccaactgcgaaatcagaatcggcatcagctgtttctttatcatgcgcaactgcaggtacaaaggtacccccaatgccacgacggccggcttcaaccaaaattctaccaacgaaccagcctcagagtaagtctcataagaaactcccgtgaactgaagaaaacaaatcaacatggctattgccacaaggataggattcaacagcacccatccagtttttttctgcaacaattttgacaaaaagaaaaagccaaacgtaatggccagcagaaaaaatttattttcgaaaaaatccatacttacgaactaattgatgtacccaacctgttactactaaaaccaaaatcgtgctgaccagcgtcgcaattacaatcggccagaactgcgccgtaatcacatcgaaatagagcatcaacgccactcctgacggcacaaagaaaaatcctaaatttgctaccagaaaatttgtaagcccctgcacccactccagttttatccagcccagctgaagaaacaaagtcagcaacagcataccaatgatgctcgaaggaagcttaatacccgtcaaataaacaatcagttcacctaacgccagacatccaaaaagaatagaacactgtcgaatcataataccttttattttatcttgaaaaccggtgcaaaaatacataatcagaaaaaacaatctccttctaagccgctttttattcaaatctacaagggatggaaaggtttttgcatactttaaagaaaaaaaaacgctttttgcaaactagatattacaaaaatacctatttttgcaagtggaaaacaaaaagctcgttaccgcacacaacaagcatttacaatttaacatataaatcatggatttaatcagtgaaatcgttaaacgcgctaaagcaaacaaacagcgcatcgtgcttccggaaggaacagaagaacgtactttgaaagctgccaatcagatattgacagacggtgtagcagaccttattttgttgggtaaccccgatgaaatcatgaacctggccaaagaatggggattgggtaatatccacaaagctaccatcattgacccagaaaacaatcctcaacaagaagaatatgcacagctgctgtgcgaacttcgtaagaaaaaaggaatgaccatcgaagaagcccgcaaacttgtgctgaatcctttgtacttgggctgtctgattatcaaggctggcgacgcagacggacaattggcaggtgcacgcaatacaactggtgatgtacttcgtcctgcattgcagattatcaagactgctccgggcatcacttgcgtttcaggtgctatgctgatgctgacacacgctcctgaatgcggagacaacggtgtattggtaatgggcgacgtagctgtaactcctgtacctgatgccaaccagctggcacaaatcgctatctgtactgctcagactgcaaaagcagtggcaggcatcgacccgcgtgtagctatgctgagcttctctaccaaaggttctgcaaaacacgaagtagtagataaagtggtagaagcattgaaaattgcaaaagaattagacccggcattgaaaattgacggtgaactgcaggctgatgctgccttggttccaagagtaggtgcaagcaaagctccgggttctgaaattgccggaaaagctaatgtattggttgttccttgtctggaagtaggaaacatctcttacaaactggttgaacgtctgggccacgctactgctgtaggacctatcctgcagggtatcgctcgtccggtaaacgacttgtcacgcggatgtagcatcgacgacgtatacaagatgattgccatcactgccaaccaggctattgctgccaaggcacagtaatcatccgattccgataatttatttccataatgccactcacttttcttgcagagtggcattatagttttcatcattacaaaaatatttaattaagatatgaaagtattagtactcaactgcggtagttcttcaatcaaatacaaattgtttgaaatgactacaaaagaagtcctcgctcaaggaggtattgaaaaaatcggtcttccgggttctttcctgaaactgactttgcctaacggtgaaaagaaagtgattgaaaaagacgtgccagaacataccactggtgtacagttcattttcgacactttgactaatgcagaatatggagcagtaagcaacctgcacgaaatcaaagcagtaggccaccgtgtactgcacggaggaaccaagttcagcggttctgtactgattgacgacgccgtaattgcagctgtagaagaatgctgcgacctgggcccgctccacaatccggccaacctgaaaggtatctacgccgtacagaaacttctgccggaagtaccgcaggtagctgtattcgatactgcattccaccagactatgccggactacgcttacctgtacccgataccttacaagtatttcgaaaaatacggtatccgtcgttatggtttccacggaacttctcaccgctacgtttcaaagcgtgtatgtgaattcttgaacatcccgcaggaaggcagccgtatcattacttgccatatcggtaacggtggttcaatcgcagccgtaaaagacggaaaatgtatcgatacaaccatgggacttactccgctggaaggcttgatgatgggaactcgctgcggtgacatcgacggtggcgccatcacttacatcatgaagaaagaaggtctgactccagacgaaatgtctaccttgctgaacaagaagagcggtgtactaggtatgttcgaaaaatcaagcgacatgcgcgaactggaagatgcagtagctagaggtgaagaacgcgctatcctgacagaaaatatgtatttctaccgcattactaaatacatcggtgcctacgcagctgccatgggaggtgttgacgtaatcttgttcaccggtggtgtaggcgaaaatcaggctacagcccgtgcaggtgtctgcaagacattgggcttcctgggcgtagaaattgatccggaaagaaacaaagtacgtagcaaagaagctatcatttctacagacagctctaaagtaaaagtagtggttattcctactgacgaagagctgatgattgctacagataccatgaacatcctgaacaacaaataatcacaggaatcctaaaagagttaaaagaggatacctcctgcaaaggaattcactatctttgcgccagaaacaaaggcaaagagagattccctcaggaagtatcctctttctttttgcccacgttctaactaataaacgaaaaaccttctattatgagcaaaaagattgtaacatttggagaaatcatgctccgtcttaccactcccgataacttgcgcatccagcaaagccgtgactttctggttaactatggaggaagcgaagctaacgtagccatctccattgccaactttggcggagaggtagaatatattacccgattgccggacaatgcactgggagagacttgtatcgcagagctccgttctcacaatatcggaactaaacacattcttttcggcggacatcgcttaggtacctattacatggagaaagccgctgccatgcgtaactccaacgttatctacgaccgtgagaactcctcattctctgaactgaagcctggaatgattaactggcgcgagattttcaaagacgcagccatcttccactggtcgggaattgatgccgcactgactcccggattggcagaggtgtgcaaggaagccatcgacatagccaaggaaatgggactgaccatctcatacgacatcaactaccggaagaacttatggaactacggaaaaacagcccaggaagtattacgcccgctcatgaccagcagtgacatcatgttcggaagtgaaggtgaatatgctctcgtcaccggaattccggctcccggcttcaaggccacccgaagcggtgaaaaatacgataccgcagcgtatgagaagttctgcaaggaaattagccagcagattccaaactgcaaatatatctatattgccctgcgcaatgtgatgagttcagaacaccacacttttgccggagtactttacgcacagggagaaatgaaatacacccgcgtgttcgatattgacaacgtaattgactgtgtgggagtaggcgatgcattctgtggtgccatgctttatgcacagaatgcatacgaagacaaccagaaacgtgtggacttctctacggctgcttccgtactgaagaatacgattgccggcgactataacatggtgaaagtatccgaagtagaaggtctgcttgcccgccatgaaagcggagaagttgctcgataacttacaatacaaactctataaaaattcaggcgctgaagagaatgtacgttcttcctcagcgcctgaattatttcttatccttttcacacagtatcacaccgaagtctccccttcaatatactgctccaggaacatattttctccatcgaaaaccgcatacgaaaattcggtaatccagtcgcccagaatcatcatacgcgacgtacggctcagcatcaaatccagcataatgtgacgatgcccgtaaataaagtaattaatgtccggatgactctttaaatagtctttagagaatagtaccagcggttccttatcctctcccatataatcaggctcacgcccaccttccctcttcaggcgactgtgtttggcccattccagtccaaattccacgctccatcgcggatgaagcatcgagaacaatcgctgcaaggtcttgctgtgaaacatcgtgcgcagcaacttgaacttacggtcattgtcgcccagtccgtcaccgtgtcctaagaaaaactctttcccgtaaatctcacaggtcagcggctcacggtgcaggatgacgccgcactccttttccagatagtctccacaccagatatcatggttaccgataaaaaaatgtacttccactcccaaatcagtcagctccgagatttttcccagaaagcgggtatagcctttgggaaccaccagcttgaactcataccagaaatcgaacatgtcgcccagcaagtagacggccgctgcccgatgcttgatactgtccaaaaagttcaccagcctgcgctcctgcgtacgcccgtgtgcaatggccctcgaacccaagtgcgcatccgaaagaaaatatacattcttcatcgcatccataagccttttcttacaaaaatcctaattccagttttgcctcctcggtcatcatatccttgtcccattccggttcaaagaccagattgaccgtagcggcagtcactccttccaccgattctactttctgacgcacatcttccataataaaatctgctgccgggcagttcggggcggtcaaagtcatgtcgatagtcaattctccgttttcctgaaggtctatcttataaatcaagcccagatcgtacacatttaccggtatttccgggtcgtatacggtcttcaacatatctatgattttttcctcaatcttcaacttcgtttcgttgtccataatctttaatctttcaatctttattctttccgcaaacttagggaaaaatctccattttttcatcttcgaccgacaaaaaaagacactaaaggcggccttcatctccataactgtaataatcgccgtccgaaaccaccacatggtcgagcaagcggatgttcatggtacgtgcagcttccagcagcgcatgggtcaggcggtcgtcatcctgactcggacgaatatttcccgaaggatggttgtgacaaagaatcatggaagtggcccgtttcaagagtgcctcacgcaaaatacaacgcacatcgacctgcgtggaggccagtcctccccgactaattttaaccgtatcaatcaccttggctgcctgattcagcaacatcacccagcattcttccaccggcaagtcgcacatcaggggataaaaaaaggcatacacatcttgtgagctggtaattttcttccgctcagaaggttcttcctctcttctgcgcctccccaattcagaggctgccagaatgctcacggcctttgccggaccaattcctttataacggcaaagatcgtccaccgtatattttcccaactcactcaaacggttatggcagtcatccaacaccttccgcatcagttctaccgctgtttcttctgtattgccggaacctatcaggatggccagcagctcggcattgcttaaagcagccggaccatgcagcagcattttttcccgcggacggtcttcttccgcccactgggtaatgttcagtttctcgttcatgcatcaatttcttaataaaaacaccgacgagctaccgaacattttattggggacaatgtcttatttatagaatgttttttcgaaagccgagaaggactttccgccacatatacaacgtttccaccacgcccgcaaaaagccggaaccgtagcccgtcaattgtataaacgcagcaatgacagatagtgcaccaatttttatacttttattgcgaatagaagcatcgataaaaataaccacggcaaacaaagccaacaagagcaagctccacggacagataaacgcaaccagcaataccatcacgactccaaccgtaaatacagccggaagcagatgcacgagcttcaatgattcaggatatttcttatacaaatcaatgcgagcgataccggaattgtgtacctgcttgaaaaactttttcaagtccgtacgacgcttatgccatacccaggcttccggaaacagacggcaacggtaacctcctttaaaaatacggatactgaaatctatgtcttcgccaaaacgcatcgcagagaatccacccaatgccttgtacacctcggcacggactcccatgttaaaactgcgaggatagaatttgtccatttttttcttgccgccccggatgcctcccgtggtaaagaaagaagtcatggcataattaatagctttctgtacatccgaaaaagaatcgtgtgcccggtcgggacctccaaacgcatctgccggttcccgctggagttccgcttccaccgcagccaggtacgtttcaggcaggatacagtctgaatccagaatcagcagatactctccgcgactgcgctctgccgcatagttgcgcgtctgtccgggtcctgaattcggtttctcaaaatagtgcacatccagcatttccgtatacttcttgaccacctgcttgcaaggaatggcagaaccgtcttctacgaccaccacttcaaagttttgatatgtctgaccgcacagactctgcaacaactcatccacttcatccggacggttgtacaccggaatcaccacagaatacttcggattcatcttttatcctcctttaatctttttcaattaataccgtagcataggctgaaataccttcctcacgtccggtaaatcctaatttttctgtagtggtggccttgatggacacgtcgtccacatccacctccatcacccgtgccagcacttcctgcatctccggaataaattttttcaacttcggacgttcggcgcacaccgtggcatccacattacctacccgatacccttttccggcaatcaattttacggtctttgccagcagaatcttgctgtcaatgttcttgaagtcggccgaattatccgggaaatgataaccaatgtcacgcatgttggcagctcccaacaaagcatcgcaaatggcatgaatcaacacatcagcatccgagtgtcccagcaaacccatttcgtgttccaggcgaataccacccagccaaagttcacgccctgtcactaacttgtgcacgtcgaatccaaatcctactcttatcttcatcgtatgtaaaaatcaagaagtttttcattttccaaaaatccctccaggtggttcccgatttgcacggggcctactcccaccggtgtaccggtaaacaacaggtcaccgattttcaacgtacagaaacggctcacataagcaataatctggtctacagaaaacagcatatcagctgtattgccctgctgcaccgtctttccgtcaatattcagatggaaattcactttctgtatgtcattcagcttttccactggcacccagtcgccaatggcagccgaactgtcaaaacccttgcacagttcccaaggctttccttcagcacggaacttacgctgtaagtcacgggcggtaaagtcgatacctaccgtcacggcatcgtaatagcgatgagcaaaacgttcggaaatattttttcccaaacggcaaatgcgcaccaccatttccgtctcgtagtccacctgttcacaaaaatcgggaataaaaaaaggcttgctgtctttcagcaaggcagaatccggcttcataaaaataaccggttcctggggcaaggcttctcctgcatgcaactcatggcaatgcaggctatagttcatgcctatagcaataattttcatggagttatttctttataatttcattcaaacggttgaacatcactgccagatgtgcatacagtgacgtgttttgtacgacaatcgtttccggtacacggatacggaagggagtaaagttccacacagcctgaataccaccagccaccatcttgtccgtaatatcctgagcaatgttaatgggcacggtcagcacacctattttcactccgtcctttgcccgccgttcttcaaactcgtcggtatggtaaataggaattccctctacggttgtacccaccagattcgggttaatatcgaatgctcctacaatctgcagcccgaaatgtgacagaccggagtctctgagcaatgcgcctcccagacttcccacaccaaacagatacgccttatgcagattcgtgaaacctaaaaaatcctccagcacctgaatcagcaaatccacttcatagcccacccttgtacgtccggaaatatccacatacgacaagtctttggctatctgcgaagcatcaatatttatctgtctggaaatctgtgtagaagatacatacttctcccctttctctttcatcagcttagcattcgaaagataccacgggagtctgcgtaaagtaggctcaggaatcttgtccgtcattttacgacttcgtaccgccattcggagtgtgttcaattaatcaataatgcaaaattaaactatttcttgtaaaccctgaacacgattcctgaaaaatgtcatacttttgaagcagattaaattaaattcacatgaaaaagaacgactggaaagaccgtctgaacattgtatattccactaacccagacttcaactatcagcttgacgaagaggaagagccggcaactgtcgacccgaagcaacaaaaactgagggtcagtatcgagaaaaaaggacgaggcggaaaaaccgttaccgtcatttccggatttattggtccggaagatgatttaaaagaactgggaagactgcttaaaaccaaatgtggtgtgggaggtgccgtgaaagacggtgaaattctcattcagggagagttcaaacaacgcataatcgacctgctgaaagcagagggattcagccagacaaaataggcacataaaaacgcctttacgtttaagacaaaacgtcaaagcgttttagtcaaaacgcacttgcgtttgaaagaaaacgtccttgcgtttttcttcaaacgcaaggacgttttttcagggcatcttaaacttcttattttgaagcaattactttatccagcaaagtagcaagttctttcactttttccggattctgcgatgctacattttctttttccgtaggatctttacgaagattatacaactgaggttcaggcgcgttacccagttcagtcttggtccagaattccaatgcaggcttatcactgggctgaagatatttccattcaccctgaataatggccagcgtattgttcagattctgttctaccacatattcacggtcagactgatcctttccaatcaaagcctgcgaacgtgcatgactgtcgggggccactcctttagccaacggcatttccatgatttctgccagcgacgcaaatacgtcaatctgagagaacaatccctgttgcttgcaaggctgctgaatagctgccggccagcgtacaataaacggtacacgagttcctgcctcatacaaactgtattttcctccacggtaaatacccatcggcgtatgtccgttcaacatttcgcaagcctggtcctgataaccgtcatcaatcaccggaccgttgtcgctggtgaaaataaacaaggtgttatcggcaatgcccagactatccagtgtattcataatctcaccaatggtccaatccaactgaaggattacgtcaccacgggtaccgagaccactctttccggcaaaacgcggatgaggaatacgcggcacgtgtacatcctgtgtacccatgtacaagaagaacggtttatcagtagacgaacagataaagttcttcgctttttcagtgatgacatcggcaatttcctcgtcattccacaaagcagacttacctccagtcatccatccgatacgaggaatgccgttgataatggtattgttatgtccctgactcggtttcagtttcaccagttccggattctcttcacccgtaggccagtcgcctaccttatggtcatagctgacagtaatcggatcggaaggatccagtccagctactcttccgttttccacaaacacacaaggcacacggtctaccgtagccggaatgataaattcataatcaaatccgatactctgggtattcggcttgatgagcccgttaaaattagttcctccaacaggtcccagtcccaaatgccattttccgaccgcaccggtatgatagcccgcttcatggaacacatcagccagtgtaacacatgtggtatcaataatcagctcagaattacccggagcgatacctgtattttcctttctccacggataacatccggtcagcataccgtaacgcgacggagtactcgtagccgaagtggcataggcattggtaaactgtactccctgagccgccagtttatcaatgttcggcgtagaaatcttcgtagccccgtaacaactcaaatcaccgatgcctaagtcgtccgaataaataaaaatcacattcggacgcttcaggttaggagcttcctgcttctgcgcctgaccacatccggtcaatcctgccaatccggaaagggcagaaatacaaactaaaaggtcttgtttcatctttctatatttaggttagtaaaatacacgtcattcttctccctgccggtaagccatcggtgtcagttgatatgccttcttgaaaagcttactgaaatagcggggtgaactgaatcctgtctgatcggaaatctgggttacattcagctccggattgttccgcaaaaggaaggccgcttttttcaatcgtaaggtaataaagaagtcattaggcgtctggccagtaatcgccttaatctttgcatacattctcgtacgcgaaaccagcatttgctgggccagcatatcaatggtaaagtcagaatcatccaaatgttgttcaaatacagcaatcacctcatcaaggaattccttatccagcggattcgtagccaacaccggagtctccacagtaggctgcttggtgaaatactcctgcaacttacggcggttattcaccagattgttacaacggaataccagcaaacgagaatcaaaaggtttcgtgatgtaatcatctgctccgattttcaatccttccagattctgttctatttcagtacgggccgtcagcaacaccaccggaatgtgacaagtgtccaggttccctttcaattgcttcaccaattcaatacccgacatgcgcggcatcagcacgtcactcaatataatatgcggagaagcctcctctaccttttccagcgcatcctgcccgtcgactgcagtcgtcacctcatacataccctcgaacaactcagccagcatacgacgaatagaatcgttatcttctacaatcaagatatgaggacggaagccttctttttctcctacaaaagtttcttctgtctcaaggattttctcagataactccgtatctaattcttttttctgggcatcaagcgtcaactggctaaccacagcattttcaccttcttcaataatttcatccgctgtataaagctccttgcccaatggtatacgaacaataaacttagcccccttgccttgggcgctttccacagaaatctttccatggtgaagttccacgataccttttgtcaaagccagtccaatccccgttcctgcattaatctctgtatccactgaactttgataaaaacggtcgaaaatcttatcaatgtccgccggctgaatgccactgccattatcttccactgagaaccatgcttcttcatcggtcttgccaacctccatgacaattttaccttgggaaggtacatgcttcacggcattcgacaacaggttatttatcaccttacgcatctgtttccagtcaaaccacaattctatttcatcctgcgacttgtgaaactccaaatgtatctgcttgctttcggcataaggctggaaaagcaaataagtctcattcaggaaattgaccaggttcattcgacacaccttcaatttcatctttccctgttcctgtttccggaagtccagcaactcacctatcagttcctttaactgcactccgctcttataagccaacaatacatttgaataaacagaaggagaaagctgagaggtctgcatcagtttttccaactgcccgatgataagggtaagcggagtacgaaactcatgcgaaatactggtaaagaaacgcaacttattctgattcaggcgctctatatcttgcaaatggcgctgttcataggtcagtgacgcctgcagttttacacggctctgatacatccgcatcaaataatacacgattcctcctactatcagggcataaagcagaaaagcccagtttgaagcataaaatggagatttcaccacaatttccatgctgatgggactgcttaaactcttcggattggacgaacgtacccacaatgtatacgttcccggatttaagttcgtataggtaataacaggacgatctctcaccatggtccattccttggagaaaccttccaacagatattccattggttccttattctccgggatatagttattggtagcaaaataaatgctgaacatattctggtcggcacgcaaagtaatttgtgacgtatggttcaaagcacgctttaaaataccagaagcatcattgacttttatttccttgccatttactaccagacggctccacataatagaataaggcttcgaacgataatttaaactatcaagagcaaacatcaccattccggaagtaccacctaagaacacctctttcttctttgacatgaataaggcattctcatttaaagaatacatcgggaaaccattctccgacaaatagttgcgtataactcctttatggtaatcaaagcaagagaatccctgattggttatcatcagcagctccccacgctctccttcacaaactttatatacacagtcgccaggaaggccgttacttgccatatcatagttacggaaggtattcgtcttctggtccagacaatccaatccactacctgaagtggcaaaccagattttattctcgttgtcacagaaaatactgttcacattgttattgctgatacctgactctccgttacgatatacatagtgaagcaattcatccgtcttcaaattatacgagaaaacaccttcaccggttacagccatccacagaactccattccgatcaaactccagatcagctaccatgcgaatcagttttccctccttatggttcaggaacagctggcgacattttccggtagtccgggaaaacaagcagacaccagcctgtgtagctaccaccagactatctttataaggtacaatatcgcgtacaatatccgatggaatggtttccttatctccttctctctttcgatacactgtaaatcgtccggtctttatatccaatttattgatacctcccaagtgcagtcccaaccatatacagtcttccgcctcatcataccagatggatttcacattattatgcgaaatgctattggcagccggacgatgaacaaaccactggaaagtacctttttccggatcaaaccgattcaatcctcctccctctgtacaaatccaaatatgccctctcttatcttcaagcatatttcctacaatcggactgctcagtccttcagaaggattgtcttccttctggaagaaacgatatatggcatattccggattaaaatagttcaccccaccaaaataagttccagcccaaattgtcccctgaccatccttctggagacaccatacagaagaatgggtcagtccatacgaatcaaccccttcgctgtagtgttccacacggcctgtacgggtatccaggcaatccagtccggtttcagtccctatccaaagacaacccttgttatcttcttcgaaacagcgtacaaaatcagaagaaagggacgatttacctgatagcaacgcacgtatgttacgcactgtccctttattgtcaaaaaggaaaatacctccgctccaggtaccaatccagatattatgagaagaatcttcaaatatagacgacacatgctgtccgtttacaagatgtacaggctgcacgccttccgcccaacgataaaggccatcgtgctctgtcccaatccacagacgttttgacgaatcgaagaataaggaagaaatgtttccgttatcagaaggaagccgaaaaaagctgtcaaaattaccactctctttgttgtaacgaaagacctcatttccacacgctatgtaaagcccttcatgataggtaatggcatccacttttccactgagtagtgtagcaaatctgcgggtatccatatcaaaactggccaccccttccatacacaataaataaagatgtccttccccatcgcccgtaatgcgtagcaaatgatttgagaacaaactatacggattgtccttttccagccggtagattgcaatgtcatttccatcataacaattcaatccttcacgcgtaccaatccatatcaggttattttcatctacataaatatcatttactgatatttgcgacaagccgttatcagtagaaagatgcttgaaagttatattttgagccgccagacgaggaaatagtccgactaacgccaccaataaaagacaatttaaaagtattttcttcatttcccttagattcgtagaagctattacttgcaatattcgataaaaatcctgaaatatacaagtccataaaaacaaaatatacaatatacatacaccatttgtacaatttagggacatcaatccccctaaaaattcttttatttgtttcttagtaaatttcaattcagaaaccattttaaatataatgctatgaaatatattatttcaatcttgcttatagctacatcactaattgggaaggctgaaaaatacagctttgaaaaaggaattcctacacaatttcaagtatcagaaaactcccaaatagaactcagcccgctttattacaaggatgggacaaaaagtttacagtgggactatcagtcacattccttcctgacactagacgccccacttacattaacgccaaaaacagaaaagaattacggtatcacattatggatttataatgaaaagatacaaaacgactcacttgtctttgaattcttaaatgagaaacagcaagtacagtataagttcagtttccatctgacagctattgggtggagagcttgctggattggatttgaacagatgaaaggaaaaaaggaagacaagaacctaacaacttgtcgaatcacagcacctgcacagaaaggcagaatttttctggacagacttacgtttcctgtaaaaaaaatgaatgcccgtacaactcctgatatgcaaatgccagaaaataactcgttagcaaacagagacctatggcactggtgcagactttgggaatgggaacaatatgaacgtcccactacgaataatatttcgctcacaagctcagataagaaggacttacaaaagatagcacaaagattaaccgaatactgccaggaaaatctgtcaaagaaattcatcaaaaaggcaagctcattatatgaggaatgtcacatcgaaaaatcaggtaatggctacactggaaaaccgcttgttgcccctgatgaaaaaacatcacaagatattacgtggcaatacattgaaaacatgctgagcggatttgcagcagactatctgaaaaatgggaacgaccaggcaaaagagctttatttcaacacattccgttatgcaatcaaccagggatttgcctatggtagtggaatgggtacaaatcatcattacggttatcagacccgacagatttatatctcagcctggctgatgagaaatgagatctatcaacagcctgacaaaaaagagattttagacatgcttacttactggtctggtattcaagaaacaaggaaaccttacaaagaaggtagagatgaattactggacacttggcatacattactcattcccaaagtagtagctgctcttcttcctgagaaagaaacagagcaaatgtgtcagatgaagcagctatcggaatggctttctacctcattatgtttcactcctggaacattaggaggaataaaagttgacggaaccgcattccatcatggaggattctatccgggatatacaaccggagcacttggagctgtaggcagttatattggctttacccttgataccctttaccaaatcagcccgacaggacgaaaagtattccgtacggcattggaaggcatgcgtaattattgcaacctacaagagtggagtcctgcactggggggacgccatccgttcagtggaagaatggagaaatcagacatcgaagcatttgccaaacttgcattggcagaaaagcctgaaggaaaagaatttgacccacaactggcttcagattatcttcgcctgcaaacaacttctactccatcaggagagttctttcgttcaaaaggatgtcaaccagcgtcgaatccggaaggtttctttgttttcaattatggttcagccggaatctatcgttaccaacaatacatgattaccctgaaaggatataacaccgatgtgtggggagccgaaatctaccagaaagacaaccgctacggacgttatcaaagttatggagctgtactgattatgggaaatggacaccctgtatccagaaaaggaagtggcttcaaggaagaaggatgggactggaatcgcatgcctggcacaaccaccatccatcttccatttgaattgttagatagccccctcaaaggtactaacatggcacggtctaaagagaatttctcaggaagtacatccctggaagggaaatatggcatttttgctatgaaacttatggaacgtgaattgaaaaacttcactcctgatttcgtagcacgcaagtcggtagcttgctttggcaaccgaattatctgtctgggaagtggtatctcgaacagtaacgtaaactaccccacagaaacgaccttgttccaatgtgcattaccggcaaaataccaacctgcagttttagaagattcttgtacactgagagatcctttcggtaattatttttacatacaaaaaggaaagcctcaccagacagaaggcttgcaacattcatttcataataaaagccggaaagcaactgaagggaagttccttacagcttggatagaccatggaaaggctcctcaaaatgcagaatacgaatatttaattctgctccgccctacagaaaaagaaagaaaggaagccagacaaagctatatcatcaagcaacaggattgtcaggcccacattgtatttgacaaactcacacaagtgacagcctgcagctttttcgagtcataccaaaatgcaaaggcagacctgatacaacaagcagatgctgaaacacttgtcatgtacaagaaaaatgaatcagacatccagctcagcatttgctctcccaatctgaatattgaggaaaaaacttacacgacctctcagccaagccgaccggtcgtaaagcaaattacgataaaaggaaaatggaactccacaggaaatccccaagtcaaacttcaaacagataaagaaggtaatacattaattcaagcaacctgccaacatgggcaaccgcaagaaatcaccttaaagcctgtttcacaaacagaataagacgctttttggacaattttaccctataaaaatcaagtaataagcctaattttgaaaacaaattcaaaacaatctttttaatacaaccttttatgaagatcaaacagcacttaggattcatcagcatgctggccatcgcttttactgcctgccagcaaaaaccagcggagactgacaacttcctggaaaatgaaatcaaaaacatcgaagctcaacacactttgcagactgacctgattgaaaaaagtggtaaaatcttgaaccctcgtaccatcgacgaaaagggaaatatagtatatgtacctatcgatgactggaccagtggtttcttccctggaacaatgtggctggattatgacctgactaaagatgaaaaatggaaaaaactggctgaaaaatatacagaagacctggactctgtgaaatacctgaaatggcatcacgatgtaggcttcatgattggatgcagctacctgaccggataccgtttgtgcaagaaacctgaatacaaagatgtcattgtgaccgctgcacaatctctttctacccgcttccgtccagtagccggagttatccagtcttgggatgcagacagaggatggcaaggtgaacgcggatgggaatgtccggttatcatcgataacatgatgaacctggaactcctgttcgaagcaactcgtctttctggtgattctaccttctataacattgcagtatcgcatgcaaatacaaccatgaagaatcacttccgtgcagacaacagctgctaccatgtaattgactattctctgaaagatggaagcgtaagaaaccgtcacactgcacaaggctatgcacatgaatcagcatgggctcgcggacaagcatgggccgtatatggatttactacctgctaccgttatactcatgacaagcgttatttggatcaggcagaaaaaacactgaacttctatctgaatgacaaaaacttgccgaaagatttgattccttactgggactttgatgctccggaaatcccgaacgaaccaagagacgtttctactgcagcatgtattgcttctgcattgtatgaaatggatggctattgtccaggaaagaattataaggaacttgcggataagattttgaagaacttatcaggtcctgactacaaagcaaaagtaggagaaaacggaaactttatcctgatgcactcagtaggaagtatccctcacggagctgaaatcgatgtacctctgaactatgcagactactattacgaagaagcattgattcgtaagagaaacattgaaaacaatcagccattctctttcgtaaacgaataaaacaataaacaacaatagccatgaaacacctttcctactcactaatagggggaatcggattgctttcattgcaaagttgtgccagcaaacagcaagttgctgaacaagagtaccccaatgtcatttacgtatttccagaccaatatcgtaacatggcaatggggttctggcatgaaaatggatttaaagaacacattaactttgcagccgatccggtacacacccctcacattgacaaatttgcaaaggaatcactggtactgtcttcagccatgagcaactgcccgctgagcagtccgcaccgtggctctctgctcactggtatgtacccgaacaaaagtggaattcctttgaactgtaattcgacacgctccatcagctcacttcgcacagatgtggaatgtgtgagcgacgtattcagcaaaaacggttatgactgtgcctattttggtaaactgcatgcggatttcccaactcccaatgatccggaaaatcctggagagtatgtagaaaccaaacgcccggtatgggatgcctatacaccgaaagagcgtcgtcatggatttaactactggtactcttacggtacattcgatgaacataagaatcctcattattgggatacagacggaaaacgtcatgacccgaaagaatggtctccgcttcacgaagccaaacaagtcatttcctacctgcgtaatgacaagaaccaacgtgacccgaaaaaaccgttctttatcatggtcggcatgaatccccctcatagtccataccgctctttggacgactgcatggaagaagatttcaatctgtataaagaccagccaattgacagcctgctgattcgtcccaatgcagacagacagcgggaaaaagctgaatcggcccgttattattttgcatctgtcagtggagtagaccgtgctttcggacaaattctggattgcttgaaggagctgaaactcgataaaaatacaatcgtagtatttacctccgaccatggagaaaccatgtgcagtcagtttacggatgaccccaaaaattcaccgtatgctgaatccatgaacgtgccattccttgtccgttatccacagcacatacgtccccgtgttgacaacttgttgttgtcttcaccagacattatgcctaccctgctgggactttgcaacttggacaaggatattccagcaaacgtacagggaagtaattacgcaccgattttctatgaagattccgtgcagaccgtcgttcgccctacgggtgctttatacatccaaaatatggatggagataaagataaagacggaaatgtcatttcttatttcccccgttccagaggtatcaagacgcagcagtacacattggcattatacatcgacagagaaaacaaactgacaaaaactcttttgtttgatgatgtcaaagatccttatcagctgcaaaatctttcaccggaagagcatccggaaattgtgaaagaactttaccaggaactggcaaaacaattaaaggaaattgatgatccctggtatcagcaaaagatactttcggatattctttcttattaaattacctcataaaaaaatccggaactgaaaaacagctccggatttttttatgataatatggtactttgttactctacttgtcccaactgattgccatattccatttcaccctgtacgacaaagaaaattgcatccgggtcaaacgggcccattccatccttggcagactctttaacgatgtagttcacaatctcatcctgatcgatgttgatatacccttcatcgtccggctgtgcatccagacaaccactcgtggtataataatccacaatcaaatctaagatgtaatacaaatcatcgtccgagaaagcctctttcatgtcctgaggcaaatagttctttatgaactcgatggttttttcatcgtcctcatcttccaacaagaaatcgtcttccattcccataacttatctgtttttagttatttcaacaaagcttctacctttgcctgcaaagcagatttagtggtagctcctacttgtttgtccacaacttctccgttcttgataaacaatacggtaggaatgttgcgcacaccaaactgtgcaggaaggtctgcattttcgtctacatcgcatttaccgatatttaccttatccttatactcttctgccagttcttcgatatatggagcaatttgcttgcaaggaccacaccatgtagcccaaaaatccaacaccactggtttaccttcagctacaatagcctcaaagttgtcatctttaatattcaatgccataattatctatgtttttaagttctctacgcaaatatatactaatttattttatagtccaacaatggctggttttttaaatagttgaccagctctttctgtacagaaattttcatcgtgcgtgacatcagatttacatacatctgcccgtcttcatcccgaaccaggaaatgaagttcggcattacccggactgtctttcaccaaagaagaaaattccatgatcaactggtcatctatggctgaaagcggagctgttaccgtcagtttttccaccactctctccttcacttcaggaagcagttcgatactgttgattttcacttcccactcctcctgtttccactgcttgggctggcactttcctttcatgaaaaggaacataccttccatgaaaaagttcttcttttccacccattcgttaccgaagaaagcaaattctgccgttcctgagtaatcttccacttttgcaatgccgtagggctttcccgtcttggtatatccttcacgtactccagtcacgattcctcccagcaccaggtcatggttctgcagcggggtcaagtcggtcagttcggccatgtgtacgttgcacacattttccagaatcacggcaaactcatccagcgggtgagccgacaaataaattcctaccaaatcacgttctttgttcaaacgctccaaatcgctccacgacggggccggcacaatctccggagtagccacctctaccgcatgttctcctccgaataaagaattggcagccgcagccttatccaactggtatttgttaccataacgcaccagtatatctgaaaaggattcatccttcgcatttttcacaaagaaatcctcacgcttgataccagagaaactatcaaacccaccggccaatgccaggttttcaatattcttacggttacaagccgacagatttacacgctgcacaaagtcaaagatatttttaaactcaccattcttccgtctttcttccaaaatactctgcacagccgactctcctactcccttaatggctcccaatccgaaacggatatcaccgtgataattgactgagaatttcaggttactttcgttcacatccggtcccagcacctttacacccatcgacttgcattcatccatgagcttcgtgatttcagtgatgttcgaaatattccgactcatcgtagcggccatgtactctgacggatagttggccttcaggtatgctgtctgataagctacccacgagtaacaagtagcatgcgatttgttaaacgcatacgatgcaaacttttcccagtcggcccagattttctccagcaccttagggtcatgtccgttcttctttccaccttcaatgaacttcggcttcatgtgatccagcttgtcacgcaacttcttacccatggccttacgcaaggcatccgattcaccacgcgtaaagtcggccagcaagcgcgacagcaacatcacctgctcctgatacactgtaataccatacgtatccttcaggtatttctccataatcgggatatcgtactcaatcggcttccggccgtgtttacggtcgatgaagtccggaatgtagtccatcggtcccggacggtaaagggcgttcatggcaatcaaatcctcaaacgtactgggctgaagctcacgcaggtacttctgcatacccgccgattcaaactggaacgttccgatggttcgtccttcactgtacaagcggtaagtagcagggtcatcaatcggtacttcatcgatattcagtacgattcccttactctgacgaatgttctcaatggcctccttaatgatggacaaggtcttcaagcccaggaagtccatcttaatcaaccctgtatcttcaatcaccgaaccttcgtactgggtaaccagcattttttctccggtttccttgtcatctgccgtactcaccggtacccagtcggtaatatcatcacgacagataatcgtaccgcaggcatgtacacccgtgtttcgcacgttaccttccagcatcttggcatatttgatggtatcgcgcaacaccggattcggagatacttccgcttcctgcagttccggcacgtaagcaatggcattcggtagattcagtttcttatcgggcagtttatccggaatcaacttacacagacggtctgactccgacaacgggagtttctgcacacgggccacatccttgatagccaacttagtagccatcgtaccatacgtaatgatgtgcgctaccttttcctgtccatacttctccgttacccagttcagcacgcggccacgtccgtcatcatcaaagtccacatcaatatcaggcaaagagatacggtccggattcaagaaacgctcaaacagcaaatcgtattgaatcgggtcaatctgcgtaatacccaagcagtaagctaccgccgaacctgccgccgaaccacgtcccggaccgactgacacatccaactgatgacgtgccgcattgataaagtcctgcacaatcaagaagtatcccgggaaacccatggtcttcatgatatgcaactcaaacttgatacgctcctgcacctcctccgacaggttctcgccataacgtcgtttggctccgtcgtaggccagtttcgccagataatcggcttccagtttgatacgatacaatttctcatatccgcccagacgctcaatcttcgccttcgccgcagcctcatccattaccacgttgccgttctcatcgcgggtaaattcatcaaagaggtctttttccgtaagtttcttacgatattcctcctccgtaccgaaatcttccggaatggcaaacgtcggcatgataggcgcatggtcaattgaataaaattccaccttgtcacagatttcaaccgtattgctcaaggcttccggcacatcagcaaagacttcgttcatttcttcccgcgtcttcatccattcctgcttggtataaagcatacggttggggtcgtccaggtcttttcctgtactcaggcagataagccggtcgtgggcttcggcattttcctcgtccacaaagtgcacatcgttcgtacataccagcttgatattgtattttttggcatattcaatcagtttttcattcaccacctgctgcatgggatacacctcatgattggcacgtgccaccgtcgccttgtgacgctgcagttccaggtagtagtcatctccgaaaagattcttgtaccagcggatggcctcttctgcctcttcaaactgtccggccgtgatacgtcggggcacttcccctcccaaacaagccgaacatacaatcagtccttcgtgatacttctccaactccgcacggtctgtacgcggacgcatgtagaatcccttggtccatgccttcgacactaatttaatcaggttatgataacccttcagattcttggccaacaccaccaagtgatacccgctctggtcaggcttaccttccttatcttccagacggcggcgagctacatacatttcacaaccgaaaatcggcttgaacagcttctttttcgcagcctccaactgttccttgcaagctgcaatctcagcttcggggttttccgactcttccttaccactttcgagggcggcaattctcttcttcaaatccttaatctccccattcgtacccccgttcttcttgttgacatagttgaagaactccttgataccgaacatatctccgtggtcggtcactgcgattcctcgcatgccgttggccatggccttgtctaccaaccggggaatagaagcctgtccgtcaagaatagaatactgcgtatgaacgtgcaaatgaacaaaatcctgcatgagtatcaatgttaaatgaaaaacgagtcaaagatacccatcttttagggaagagacaagacagcccgaaacttttaaagaaaaatttcgttggctttactgcttaaaatacagtttccccaataaccaataaatagaaatccaaagattacttagaaagtttattcgataattcttttatgaatatatctctattttcacaacttaaaagatagttcttattctgcgtcaaaacaaaaacctgctgctgaggattctttacataagaataatatttaccataaggagtactccccataatccctatatatcctaaaaatccgttacttccaaaataacgcacatcttcttgaactccattataggcaaaaacttctttaattaccgaataaggaatagattttttacctaataccctctttattgttatgccttcattatctaactctatagccgatggaataatcatcaataaatatatatagataatcatcaacaaaatacccaataaaagacttgctatttgttctatagagtatggtaatacaaatgaccttacaataaacattacaccagccattaatagaattattttcaaggctaatgcatagcgcttcattataggttggaaatcggatttatacatacacattataatttataatcttacgtttactaaatgatttatcttctattacaaagttatatattttctataattttctctatcctttacaggagaattcaaaaaaataaattccttacctacactattctttctcctcccacacttgccagtcatctatctgatcaataagtcgtgaaacagcacgtgtgcaactcacaggataagacaaagactgcacaaaccagagcttttgccgttgcacatatttggcataaaaacgatagccctctaccggccgatggttgatataaagaggtccggaaagaaggaaataatcacttccacaccgccgttcagtggcatgctgttccatggcaaaatgttccattccctgccgcacggtaaatccttcaaaattagttatgacaaaagctgtctgagcaatcttcagcatattcccaaaatagaactggcaacatcccgtttcatgaatgagtgaatccggaacctgttcgaagaacgcaggataatgtatctggtaaccataaaaagggtcacagtgcacattcatcttcgtacgacacatcatttgctccagtttatcaggcaaagacgcatcctctttcttattataagaaataaagaatgatacaaatcctattataaaagaagacagaataataaaccgacgcatacccacgtaataccttttcttttccatatccagctatattttctaaaaacaaagctatgcactcccttcataagagcaataaaatcttactgacatcttgctgacatttacccgatatacctctgttcacaccattacacatagcttatactcccacccaaagagtttacatcttcagccataaccttaattttaaaactataaacaatcaaaaaatagattcatattcaaccgattttttctatatttgtagaaataagctatcaaaactaacctaatgttgaagtatatgagaaaagtatttattgtggccgcaatggccttcctggcaatgggagctcaggcacagaatttagtaaagaacggcaactttgacaccccgttgaataacgaaaagacttatgcatccattccttctacagaagactggtttgcatttgacaagacaaacggcgctaccactatcagccctgcaacagatgacgaaaagcatggcaatgccgtccagattgaaacaacgactgacaactcatggtacaaagcttatctaggccagcgtatccaaggagcagaaaaagccgtatatacattgtctttcgacatgaaagccctaacagacggagcacaggttcgtttctttatccgtgatgcaaaaaacgataaccttttcatcatgcgtgaaggatttgacctcagtgacgaatcaaccaaaaaccagtctgctgcagcttatagccgtgtcatcaaaaaagcaggaagatggtctaaagtttctgcaagttttgatttttcaaaaacggtcaatgcttttgccagcatcaaaggcgtagaatcaaagggtggcacagttaccgaagctcctgtatctgacgctaccttgggcgattttgtcatcgtcatccagctccagacaaaagactccaaagcattgattgacaatgtttcattgactaagaaataaattcattcttattcataaaaagataaaccgcaagaggacttatgatttcttttgcggttttctttttccttatacaaactcttgcaaatccctctttatctatctgttagcttcccatcactatttatgtttccccatctgaaacctatgtttccccaatagaaaacatacgtttctgctccctgaaacataggtttcgcataaggaaaacataaaagagtacgagccctttataaaaagataccacaagagacgtaaatcagtgattcacactataaaaatgaataaaacctatcacttttattgaaatgtccaaaagacaaaagcacacacacttgctcaggtaaaaaacaatccatatttttgcggaagaataaatgacaaattcactcactatttacacaaaaagtacatgaatactacactgctgtttatgggtatcggtacccaggaatttttatttcttgctttaatcatcctgctgctgttcggcggaaagaagattcccgaactgatgaaaggtattggcaaaggtgtaagaagtttcaaggaaggcatgaacgaagtggaagataacctgaaagaaacagaccaaaagaaggaagaaaccacttcgaacgagaaaaaagaaaaataactgccgtgaagccaacgcaaccaacggaactgactttctgggaccacctggacgagctgcgtaaaacgattatccacatcgcttgtgcggtaattgtgcttatgctgctggccttctgttttaaggaagaacttttcggcctcatccttgctcccaaagagggcgacttctgtacctaccgtttctttgcgtggttaggaaggatactgcatatagccggactggaagcggaagctttgccggtaaaacttatcaacacgcaactttcaggacagtttctcacccacatgagtgtttcgttctatgcgggtattctgctggcttctccttacatactctatcagctttttcattttatttcgccggcactctaccagaatgaaaagaaatattcccgctggctgatattctggggttatctgctcttcctgacgggagtactattcagctatttcctgatattccctttcacattccgcttcctttcgacctatcaagtgagtcaggaagtggaaaataccattctgctcagttcttatattgatacgctgaacatgctgagcctgatgatgggtatcacgtttgagattccgattcttacctggctgctggccaaactgggcatcttgtctgccgatttcatagcacaatacagaaaacacgcctgggttgtcgcaatgattatcgctgctatcatcactcctacctcagacgtgtttactatgctgattgtaaccttccccatcgtgcttttatacgaagtcagcatctttctggtgcgccacaccgtaaagaaaagacgaactaaaggggaaaactaatctgcttatttatagaacgtcaatgtgccgccttttaccaggtcattgtgattaatccggtaacctgttttcttgccgccaagttctatcttctgaatatacccttccggtgaaccattctccttcttttcaatgatcagcttatcttttccataaaattccggattcaaacggatggtaatacggtcgaaagtcgggtcagtcaacgtatattcgggaacacccggacaatcagggtagaagcccatcatactgaatacagcccaggctgacatggtaccagcatcgtcatttcccggaataccgtcaggtttgggagtgaagtacttagccagcagttcacgaacggttttctgtgtacgccattcctcacccttgaagtaactgaacagataaggataagcaatatccggttcattggccgggtcataataacctttgtcgaataccatctgcagtttgtcgataaacttcttctgtcctcccatcaggcgagccagtccctttacatcatgcggcacgtagaaggtatagttccaggaattaccttcgtggaatcccggactcggttcaaagttctgtccctgaagcggatcgaacggagaatagaattttccgtccggcaaaataggacgaagtgtgccgaattccttgcaataataatgcttgtatcccatagaccgcttgtagaacaaatcggcatcctctttctttcccatgctctttgccagcgtatacaaagcataatcggcaatgtaatattccaaagcatgcgatacggagttatcgaactgttccatcaaaggtacatagcctttgctcatgtaatcatcgttgtccggacgcatcaggttttcctttccaggaagagtagccgacttgcgcatagcctcataggcagtttccatatcaaagtcacgcagacccttcatccaggtatccacaatcaccggcaaactggggtcaccttccatcgtgagggtttcacgtccgtacaactcccatttaggtaaccacccatgctctttgtacatatcgaccatggtacgtaccatgtcaatctgacgttcgggatacaccagagtcatcaactgatgcaggttgcgataggtatcccacaaagaatatacggtgtaacgattgtttttagtcgtcttcgtttctccggtttccatggctgggtattccccatttacatcctggaggatattcgggtgaatcagcgtgtgatacaaggcagtatagaacaccgttttctgttcctttgtacctccttctacgatgatacggctcaaatcgtcgttccactgtttccgtgcgctggcatagatttcatcgaatccagctccatgctgctcagcttccaaattctgacgggcattttccatacttacaaacgatacacctacggccacttctatctgttcattttcttctgtatcgaaagtgaaccatgcaccgatgtcgtcgccagccaaatcccggtcatactgcgtgtacaacttgtatttgccattgtctttgtcccattcggcttccacccccgtcatcttgcgctggaatttccaataccccgtctgcttaggagccttgttgatacgcatgacaaaataaatagggaacacagcctgaggattatagcagaatgttcccaagaacttcataccctcaatttcacggttatttatccggcgcagataagctcccgattcattggtcagtccttctcccaagttcatcaggatatggctcttcccctttggaaaagtaaagcgggtaagccctgttctcaatgtagaagtagcctctaccttaatattatatttggtcagttgcaagctgtaatatcccggtgaagccgtttccttttcatacttgcttccgtaatgatgatagtcgacattcaattcgccggttgtgggcatcagcaacagagaacccatttcaggacaacccaccccactcaggttgacatgagagaggccggtaaaatagctgttcgtgtattcataaggagtagaccaccagcgagcgtctttatcataggaattttcatccgaccccatcacattaaaaggaacgaccgacattaaaccattcggacagacagctcccggattacaagtaccataattggttgttccaataaacgggtctacatagtccaccgggtcctgcgcattggcacaattccagatgaacaaaaagctcagagatgcgattagttttttcataggcctaaaataaaaaaggctactcccatagcgtctggctacaggaacagtcttattaaatatttacatttacaaaatagaagtacgctttacaaaatcaatgatttcggaaatataaccgaaagccattcctaccacggtatcagcagcaccgtagtacacagctactctttctccatcctgaagagcagcacacgggaacactacattaggcacatctccctgcagttcataaggtgcagcaggtgccaacaggtagtcacgggtacgataaagcaccttttccggatggtccttatccagaatagctgctcccatagagtaacggaaaccgttgcaagtggtaataaccccgtgatagaacatcagccagccttcttctgtcaggaaaggcacagatccggctccaattttcgtacactgccaggcactttccggaaaaggagtcactttcattacacaacggtgctcaccccaatacttcatatcgggactgtagctgatataaatatctccgaaaggtgtatgaccgttgtcactcggacggctcagcatggcatacttaccgttaattttctgcgggaacaatacgccgttacgattaaatggaaggaaggcattctcgcactgatagaattccttgaaatcgaatgtataaccgataccgatagtaggtccgtgataaccgttgcaccatgtaatccagtaacggtcttcaatccaagtgacacgagggtcatatttatactctgaatctatcatctccgtattgccgggcttaaagacaatcggctcatgattgatttcccagttgataccgtccttgctgaaacccgcaaagatattcatctgtacagctcggttgtcgcaacggaataccccagcaaatccatctttgaagggaactaccgcactattgaaaatactattcgatgaaggtatctggtagcgtccgatgacgggattcttcgaatagcgccacattacttctttacagtctgccgggcgttcttcccagggcattacaaatttttcattcatatccagttagtttaattgataattatacatattctttttcgccttccagcaaatttcccccattgtcatatttaaacggaaggaaataagtaatcaggaaggctggaattgtagcaatcagcacaaagataaagaaaggctcgtaacctcccggcttatcaaaccatgtgccaagactttcgcacacccagccgcttaacattcccggaatcatcactccaaaattcatgattcctgaagcaaatgcataatgagccatctgatgcttgccaggagccacctgctgcatcataaacagagaaagtccgacaaagccgaaaccatatccgaaatactcaaaaacgataccactgcatattatccaaccactttccggctggaagtaagcaaacaaggcatacaccataaaaggaaggttgaaaatacagcacaacgagaaaatcgtttttttcaatcccctacgggcaatataatatcctgccagcaaagaacccaacacaaaggccgcagctccgtacgtaccataataaagtccgatttccttttcattgagccccaatccgcccatctcccggtctgctttcaggaacagcggcacaatcttcatcacaaatccttctgcaaaacggtaaaggatgatgaagcagatataataagtgatgtgtgtcttgcggaaaaagtccatcaacacctgccccagttccttcatcacttccttgttactccgtaatgtttttctggaagaagccgactgggtagagggcagagcaaacaaatgatagattcccaaaagaatcatggttacggaaagaatcagcaagataatcatccaggctcttttgttggctgtcagcaatccggcatctgcattcagttcgataaaatacccagccaggtacaccaaaccacctgttgccaaaatctttgctatgttataaaaagctccctgccaaccaataaaccttgcctggtcttcattggacaactcactcatatatactccgtcgcaggcgatgtcgtgagtagctccgctaaaagcaacaatggccagcaacgcaatggagatactgaaaaaatgggacaggttcaacgcaaaagctaccaacccgaaagtaattcccgtaatcaactgagttacaatcacaaaaaatttctttgtccggaaaagttccagaaaaggactccacaatggtttcaatgtccagggcaaaagaatcaaagacgtccagaaggtgattagcttatcatccacctcaagccctttaaacattaacacggtaaccatattgagtacgacaaaaggaagtcccatagcaaaatatgcagtaggaacccatgatataggtgattttttcttcgtattattcatagccaaatttttgttacacatttctcatgtagaaatctattcggcaatctgcccccatgacaggccatttgcttttccataaacagactctcacataaaacagttcaaagatacgggaaaaaatccacaagacaaaggatatatcaccattaccccttcttacgaggtattaataaaaacaaaaggagctgaagatgcacctgacacatcttcaactccttcctataaggataatttgaatgttatttcttcatattggcttcttccagtccataatgttttttgctgtcttctacacgaagcaatgtagaaataagaatggcacacagaccaaatactgcaaaaataaccatcggagccgtatagtcatagcctacaattacaccagcttcgttgcgtaaagtagcaaaatgttcaatcacccatccaatcagccagggcaccattgtcaatccgatattctggatatagaaaatggtggcataagcagaacccaactgcttcatcgggataattttaggaactgaaggccacatggcactgggtaccaaagaaaacgcaattcccaatacaatcatgacaataacagcaaaccaccaatagttcattaccggaagggcaaacagcacgtgaacgactgtcaacatgactgaaccgataatcatcaaggtagctccgcgaccgatacggtcgtataaagaaccgaatacgggtgtcaacaaaatggttccaaacggcaataaggcaggaatcaatccggcaaaagattccggtacatcgtacttataaatcatcagttttgtcgcaaacttcagaaaggggaacacaccggcatagaacatcaggcacaacaagttaatcagccagaagcccttgctacagaatatcagtttcaaatcggacagcttgaagccttcttcttcggtctctccattttccatgcgaacagctgcggcagaagcatcttccttgcggtccatcacacagtaaatcatgtatgaagcaaatcccacgcataataaaatggctccgaacaacaccggataagaaacatcccccatccaacgggctaccggcaagcttacggccaaagccacggctgtaccaatacgagccattgccacctgaagacccatggcaagcgccagttcctttccagcaaaccattttacaatgactttagacgcagtaatacctgtgatttcagctcccattccgaaaattgcaaatcctaaagaagccaatgccacctgcatgtccattccaaagagctgtgcatctccaaaatcagaagaaagggcataccatttaatcaaagctcccataaacatcaatccagaagacatcattccggtaaaacggattcccattttatccagaatcactccaccgaagaacagcatcagcaagaatacattaatcaagccataagctcctgaaaagaagccatattctgtacttgaccagccttctcctctggcgacagaactaattgtcttttccgtctgtgtctgtgcgccattctgcatttcataatactgtactttacttccttcctcaagttgctctacggtcaacaacgaatttgaaagcatttcttccgaagaaaagtaattcactttggccaccagactgtctgccggcatggaggtatcatctgtaaaatataccacctgaccctttgttgtcaacaagttttccaacggtgacatcacatccgtcagaaaataaccacacatcatggtaaacgaaacgataaacaaggctgtccagcgtgccgtcttcgaatcgctcaatctcttctgaattgtttctttcattctatttttatttaatcattaatttctctcaaaaaacagcgcaaagatactatttttttacctttttctttcataatccaaaataacttctaactttgtaacaaattgtaatagcaaaacgacaatacatataaaatattaacccctaattgaaattgcgtatgaaaaaactaaaactctcagctgcctgtctgattctaagtggcagcattatatgctcctcatgtatcggttcatttggtctatggagtagtctgaaggactggaacaacaacattggtaataaattcgtgaatgaaattgtctttcttgcattccatatcgtacctgtatatgaagtagcttacttggcagacgtcattgtactgaactctatcgaattctggtctggttcaaatcctttggctgatgtaagtagcgtaaaaaccgtaaagggtgaaagcggagaatatcttgtacagaccaacgaagatggctacactatcacaaagaagggtgaagaagacaagccacttaccttgatttatgacaaagaaaagaatacatggaatgcttctgccgaaggtcagacatttgaactgattacaatgaatgaagacggaactatcactttcaaacagcaggacggcacgccggtgactgtatctcccgatttgcaaggtatgatttctgcacgtcaggctaatagccagtcaatgtttgcttctcgataagcagcatcctaaaaccataaagaggctgtctcaaaatagagttgagatggcctcttttgttttatttcaaattgaagtcatttggatttttctaaaaaaaag

SEQ ID NO: 3791 - DNA, 62643 bp, Unknown
  gut microbiota DNA sequence
aaactgggaatcatggaactacatcgctttttccgttatgctattgagaaaatgtgcaaggaaaagaaaagtttaaatcacttcgataaataatattattatgaaacgaattatttttattctggtattatttttctttggtagtaatatttgtgcaaaagaatattttgtacactctccaaataaaagaatcgaagtgagagttaatgttagtaatggcgttagatataatgtgttttttaataatgatactgttcttaaagactgttcaatgtcgctaaatgtattagatgatgaaaaacgaatcccacttagagttaaaaaattgaatagatattcagtaaatgagaagataaaaaaggagattccactaaatggtctttatgcttataataaatgtaatgttttggtattagagcttaataacgaatattgttatgaatttaggacttttgataatggttttgcttatcgatatgtttcaaataaaaagggaaatattgatattcagtctgaggattgtagtattaatttccctgaaaattatttagcacatttgtctttgacaaaatctttttggagttcttatgaagaaccctattctcatgtaaagacaagttcttattctgagaaagataaaatgacttacttaccagttcttttggaaagtcctaaaggatataacatcctgatttctgaagcagatcttaaggattatccatgtatgtttcttaaaagtaatggaaataatggtatgattggtgctttcccaaaaacgcctttggagtttggatttgggaatgatagggctttaagtataaagaaagaggctgattatattgccagaacttcgggaaaaagaagttttccttggagattctttgtgatttctgataaagtagaagatattattgaaaatgatatggtgtatgtactgtcttctccttcagaagtttctgattgctcttggatagagccaggacaagtgagttgggagtggtggcatgatgcacgcctttttggcgttgattttaaatcaggttataatactgattcttataaatattatattgattttgcatcaaaatatggtatcccttatattttgatggatgaaggatgggctgaagatactcgtaatccatttattcctaataaaaacgttgatgttcatttattagtgaaatatgcaaaagaaagaaatgtaaaaattatattatggcttccttggttgactgtagaaaataattgggaactttttaaaaccttttcagattggggtattgctggagtaaaaattgattttatgaatagaagtgatcaatggatggtgaacttttatgagaaagtggcaaaagaggctgccaagaataaattgatagttgattttcatggctcatttaaacctgcaggtcttgaacgtagatatcctaatgtactttcttatgaaggagtcttaggtttggaaatgggagctagatgcactccttctaatagtattttttatccttttatcagaaacgctgtaggtgcaatggattttactccaggttctatgatttctgcacaacctgaggataacaagtacacaagagcaaatgctatgggatctggtactagagcatatcagatggctttgtatgtagtatttaaaagtggtttacaaatgttagctgataatcctgtttattattatagggagaatgattgtactgagtttatcactgatattcctgtaacatgggatgaaacaagaatactttcagcaaaaataggagagtatattgtattagcacgtaagaaaggtaaggattggtatgtaggtgcgataactaatgattgtggtagaagtattgatattaatttagattttcttgattcaaaaaatcaatatgaattgacttctttctcagatggtataaatgcagacaggcaagctatggattataaaaagaatgtagaatctgtcggtcataatgataaggttatgattaaaatggttagaaatggtggttgggctggaaaacttaaggctttaaataaataatatggatgaaaacaacaaaataatagatgattttataaatgttgattcataaaaaaaaggacatttgtctagaaatttgatattaaacctttatttaaatcttcattttatgaataaacatggattcgattctatagttgtttatagtattactgcttatagtttttttgtaaatagaatggcttaggaaaacttgttagtgagaattttttgatgcattcttttaaagaaatactattttattgaatttgatatgagaagtttatactgaaatattaacctttaaaattctacaagatgaacaatttatttaaaatgaaagacacatgcttcataaagaggcatagtaaatgggagaattatagttggggaatgtttctcttttgcattggggctttttcttatccattgcattcttattctgtagaaagccagactttttctgtaatgcaacaagaccaaaagcttcatggtaaaattacagatagtaaaggagagccaattattggagctaatgtaattgtaaaaggttctactaatggtacgattacagattttgatggaatgtttaatctttctgtgccagctaatgcggtaattgtgataaaatatatcggttataagcaacaggagatttcagtaaaaggccgttcaactattaatgttgtattgaaagaagataatgaaatattggatgaggttgttgttgtaggttatggcacaaaacaaaagaaatcgttaacagcatctgttgagacagtttcaacaaaagagatgcagtcaatgcctgttggtaatgccagtaatgcttttgctggtagagtcccgggtttaattactgtgcagaataatggagaaataggggctgatggaacgaatatcatgatccgtggagttggtactacaggaaattctaatccattaattgttgtagatggagtacctagaggctcattgaatgaaatagatattaataatgtaaagagttatacagtattgaaagatgcagctgctgtagcaccttatggaataggaggagcaaatggagtaatcttgattgaaaccaagagtggtacagaaggaaagcctgtcgttaattataatggttggataggatggtctagtccgacggttgatattgagtacatgaattcttatcagtatgcatctacttatgataaagcgcaggaaatggcaggagtaccagctagccagcgtctatatagtgcagaagatttggaaatgtatcgtagaagtgtgaatggtgatccttctgtagatcagaatttatatccgaatgctaatgcccatgatttcttgttacggaagtctgctcctgttactaatcataatgtgagtatttcgggtggaacggaatatgtaaaatattatgttggaattaataccttgtatcaggaagaacaatggcatggatctcatttgaatagaactggtgttgtaagtaaaatcgatattaaagcaactaatacgacgaaatttggactttctatcaatggatggactcagcgcactaagaaaaagcagaatggaggaactgctttttatagagctactcaagattggattcctacagatccaattcaatatgtgacaaaagatggagaaattttagataatgcaagttcaaaagcgttggtcttgtcagatttgaaaagattgggggactatgtgacagataaaaacatgattatgctttctggctacatagaacagcaattagcaaaaggattgacatttaaaggcgttatatcatacgactggacattgcataataataaaaactggtctgagcctgcatctacttattataaaatagatacaagtacaaatccatattcctttagagaagttactaataaaaatcttccttctttacaagaaggtatgaatcaaataaaaacatatacttaccaaggaattttaacctataaaggaaagtttggtgatcatagtttgaatttgttaggagtgggtgaggctattcagactaaatacaatgatttctgggctagcagaagtaattatcagattcctattccagagttaaatttaggatcttcagataaagaatatcaagcgaatggaggaggatcatacgaagctgcacaggttggttttgttgcacagattgggtatgattataaaggtaaatatttattggatttaactggaagatatgacggacactattattttgctccaggttcgagatggggatttttcccggctgtagctgtaggatggagaatttcagaagaacagtttatgcagaggtttgaaaatttggataatctgaaattgagattttctgcaggtcaatcgggagctttggctggaggagctttccaatatttaacttctttccagttgtatggtgattcttttgcagagggtggaagttccactcaaggggtaaagcctgttatagaggggaatccgaatattacatgggaacgtgctacaaaatataatgtagggattgatgtagatctttttggtggccagttatcaggaaaagtggattatttctttgaaaaacgagataatatgctggtatctcctcaggcaaccgtaccagaagaatatggtataggattggctgcagtgaataatggaagaatgcaaaatcagggaattgagtttgagattcatgggcataaatctataaagaaagacttgttattgagtgcgggatttaattttacttttgctcgtaataaactattggagatatatgaaaatgaggctactcgaaataatcctaacagatctcgaacagggcgtccattaggaagcatttttggttatgaagcggatgggctttttcaggtctcagatgataaaaatggagatggtgtaattgatagcaaggatgggtttgtagaacagcagttaggtggtccggttactcctggaagtataaagtataagaatctttatgatgtggatgggactgctgttatagacctgaatgatgaaacttgtattggacatccaactattcctgaaattatgtatggttttaatttaggcgcaacatggaaaggtattaatttggatttactcttccaaggagctgctcattctaatgctttgataggtggaacatttattaatccttttggtgaaacacataatttgaccatagataatttggatttctggacaccggaaaatccagatgctaaatatccgattgttcgtcctaatggtccagtgggtaatgatgtcgccagtagttctttctatatgcttaacatgaattatttaagacttaagcagttggaattgggttatacgttaccgtctgcgtggttaagtcgttgtcatattaaatcagctaaggtttatgtagcagctacaaatttatttaccttatcacatacaagaggattacttgatccagaacaagatgggggatccacaactggcgataatgcaaatcgtggttggagacaacctcaaaataaaacaatctcattgggtatgaatattacattttaaaatttgacttatgaaaaagtttttgattatacttttacctttccttttgggaagttgtgaggattttttggacgtaaaaccaacagatcagttgacagaagagaatgtgtttaatactgaatcgggagcagatttgtttttaaatacaatttatgtgacattaccttgtcctgaattaaatggttcaaatgcagttattgatggaggcctatcatacgataactgggattttatgtctccgtataatgtttgtcggtatgcttggggacgtacgtctgtttattatgggacttatgcatatacagcttctgaatataatccgggtatatataatcatatgtatccttctattttctttcaatacaattatattactgggtatatacgtaattgtaattattttattgaatctttggaaaagtataaagatcaatattcggaatcttggattacgaaacgtgttgcagaagcaaaatgtttgcgggcatattattatcatttattatggatgtattatggaggtgttccttatataacaaaagttttagatacctcaatgggggatgagatgttccaacccagtatgagccaggaagatatgtataaagaaatgactactgatttatcaaatgctgcaaaggtacttccaaatgaacaaggtgggggccgttttacaaagggcgctgctttaactttgaaagcatggatagacttatattggggcgatattatcaaggatcctagaccttcatctattttccctgctgatcctcagaaggcacttgacgcttataaagcttgtgctgaaacatgtcaggaaattatgggattaggtgtttatgacttgatgccgacaagagaagatgcctttaaagaagaaaataataattgtaaagaacaagtttttgcatatcagtgtaataaaactttccctaaatcacgtagaagtaaaatctttgggccttataatgaggcgacaggtgctaccggtgattatatcggagcgggtgcacctactcaggcattggtggatatgtatgggatgaaaaatggtttacctatagatgacccgaattcgggttatgatcctgagcatccgtttgagaatcgcgaacctcgtttctatgctgatattatatatgatggaagtgtttttacagggcataagttttctttacatcctgaaagtgctgaggaacttggtttggtgcctaatgaggtagattggtttacagggtactttagacggaaaggcattaatgagaatttaagttttgcagactttgaaacagaaggggtaaatttttctttcttccgttatgcagatgtgctgttaatgtacgcagaggctcggattaaggctgctgaattaggaggagaccccatagattatactgtgattgatgcaatagatagaattcgtatgcgtccagcaagaagtacggacaatgggttgccttctttggaaacaacttatggaggacgtccttctttggataaactgaaagagattatatttaatgagcggattgtagagctttcctttgaattcaaggcttatacggatgtacgccgtttccgaagaggagatttattgaatcagcctaaacaagcaatccgctgggatagtaatcaaggaggatatgtattaaaaactttgtctgagggaaatttctgggatgataagctttatttgattccgatttaccaagaatggttggagaagaatcctgcttggatggatccggaaaaacaagtagatggaagaacaaaagggcagaatccaggatggtaaataaattatagaatggaatatgagctataagacgtaattaatggcttataagttactggagatggcctcaatggtaagaatatatagtcggacttacgcttgtagctcattttctatttgggtaaattagataaaaagtgtatcgtgtaataataggtagaaaacgagaatgaagaatattttttcactgttaatattatgtggcatttttattgtgtcttgcgacacaaaaggacctgctactaggatgataaatatgattccgtttgaatcagtagaaatacatggagagttgagggagcgtgttttgcagaatttgaatcgccttgaggaagaaaagtatcaaccgcagaatgttttccttacagaagaacagtcaggaaattggccaggggatacagaaggtagaaccattttggggttggtaatggatgctcaagcttcaaaacgttcacctgtatatttagagagaataattgatatgattccttctaaactgaataagaagggatacatgggggttgtatatgagggtaagatgagtgaacagcaactatcaggcaatggatggatgttgagaggattgtgtgcttattatgaatggaaacaagatgaaaaggtattagagtatataaaatcaattgctaataatctgtttgttgccggaaagggattttatacggaatatccgattgacccaaactttcgggataaaaatgtagggggagaagctggaactattgaagtacgaggtacggataaatggattttatcttcagatgttggatgcctttttattggaatggaaggtttgattcatgcttatgctcatttaaaaaccccagaagtaaaggctgtgattgatgaaatgttcgcgaagttgagagaaatagatattcttaagattcaggcacagacacatgctactttaactgcttgtagagggatgattcgatatgctgatataacaggtgactatagttatgtggaatgggcagaaaaagtctttaatttatataaggaacatggaatgacagaaaatcatgcaaactataattggtttgaacgctttgatacttggacagaaccttgtgccattgtagattcttatatgctggctgtacaattgtggcaacatacggaaaatcctgtttacaaggaagatgcggaactgatttattataatgctttgtcacatgctcaaagggataatgggggatttggtactgataattgtccgggaattgcatctcaagaaaattgtttgcatccccattcctatgaagcacattggtgctgtactatgagaggtggagaaggcttaggcagtgcagttcagtatgctgcttttattcgagaagatacggtttatttaccgttcttccgtgattgtgagcttaatcttatgttggaaaatggtaaattgagcttattagagaaaacaaactatccgtttggaacatttgcagaatttattgttactgaaaatcaacagggtaaggttactcttaaatttccatttatgtcttggatggaaaatttaactctattgtataatggagagcctcagaaattggttaaggagaaaggtttcttggctcttactaataagtttaaggcaggtgatacaatacaggtaaattttgaaatgaaactgcgcaaacaaaagactcttaatagtactaatactaaagatagtcagtataaaatgtattatggtccattattgttgggagatgaagagatagcaactggagaatataagaatatgttgtttaacgttaatggaagagaacttactccggtatatcatttaatgaacaataaggtgcggcataaagagtataaaaagcaaatattatttgaggagtagctttgtgcttgagtgattttttaattacgcattaaatcaataagttatggattatacaagacctaaatattggatatcgtttttgttgatttgttttcagtgtgctacgctgaagttatatgggcatataggtaaggtcgtcaatgatacgatgtgttattatgtggaacaatgtgggataaaaggggatgggcttacagatgccctctctgatttaaatgatttgatagcatgtgcttctcgacataatatacctgttaagattgtgtttgataaaaataaagcgtatcgtatagatggaagaggaaaagatctgtatcgaagaatttttctgaaccggaataaggatattgtattagatggtaatggatgtactttgttgattcatccatcttcaagagcatttgctgtctatcgttctgaaaatattattataaggaattttaatattgattattctcctcttccatatactcaaggtcgcgtaacaaagattgattcgaaaaactattatttggaatttgttgtggatcagggatttcctcttcctatagtaggtgatgaaacctattataagggaggaaaaatggtggactgtattacggcgaacggggaaactaataaattttatcaagggcactcttgggtgaagaaggtggtgaaactgggtgacaggagatttggcgtgaaatatgatttgcgcgatcaaaaacagttgcgtgtaggagattatttctgtatgaaggtggaatttccattcccagatgttctgaagaatcaagatgcagagaataaaaaagagcttaatgagtggctctttacgaattggggtagtatagaagctttggagtcaaataatcttgtgttggaaaatatcacttcttttgcatcgccggtgatgacatttctttttaggggttgttctcatcataagataaggggatgttcgattatagctaagcctggccgtattgtagctggttgtagcgatggaatacatttgaaagggaatgaacatcagcctttaattgaggagtgttattttgagagaactatggatgatgctattcatattaaaatctcgggagatgttattgcagaggttttgtcaccatctcggttcaggattgttcacatggacaatgagtcggataataccaacttgggtgttggtaaagaagtcatgttatttgataggaaagagttaaagcaattggcaatgagtaaaattattgattatcaggctatcaatcatagagaaggaattgtaacactggccagtgagattgatggagtatcaaaaggtatgtgtttatatctgcaaggaattggaaaggcattgattgatcgttgtaattttggaactcagttacagcgggctatattgactcaccaacctacaaaagtttcgaattgcaatattgtagataatggaaagggatttgacttagctttaatgagtgaaggtatagaaggccctccaacgcagtttctgcaggtggaaaactgtttgtttgaaaatttatcgtatgttggattatgcgtggattgtccatcgttgaattatgaccagaaaggaaaaccgcaattgcttataaagaactgtacttttaaattgcctaaggatattcctatcttgcagataaagaattctcagggggtgtctttaatagggaataaatattatattcataaaggatcttctaaagtgaagttatttgaatttcagaatactttgttaatagaggattctaataatacgtacatagaaagatagtaaatattgtaaaaatccagtgtatgaaatatcgtttaacattttgcatattattgcttttatttgttgccgggagtatgagtttaatcatggctcaaacccctcagtggattacggctagtgagagtcagagtgaaacaaatacatggttaggctttaaaaaagattttgtggtatcttccgtaccacaagtgttgaaggcacgcatcgctgtagatagtaaatactggttatggcttaatgataaacttattgtttttgaaggaggtgttaaacgaggtccaaatagaaatgatacctattttgatagtattgatcttgcgccttatttaaagcagggtgataatactattgctgttttggtttggtattttggaaagcagggtttctcgcataatccaagtggtcaagctgctttattctttgatgcagaatctccagaattgtctttggtaagcgatgaaacttggactgcttttgtacatccggcgtattatactccgctgggggaaaaacctaattttcgtcttcctgaatcaaatataggatttgacgctaataaagatatagaagaatggtttttattgaaagacaaaagaacttttcagccagctaaggttttaggtacggaaggttgtgctccctggaatcgtctacatcctcgtatcatacctttatggaaagattatggttatgcagattatcgctctgtgattcgtcgtcaagggagtaaatgtgatactcttatttgtgaacttccttataatgcacaaataactccttacttcaaagtgaatgcccataaaggagatattatatctattaagacagatcattattatggaggtggtcctgccaatgttcgagctgagtatatagcaaaggatggtattcaggaatatgagagcttcggctggatgaatggacataaagttatttatatagtaccccaaagagcagagattatagaactaaagtacagggaaacatcatataataccgattttgcaggttcctttaaatgtaatgatgagttctttaatcgtttctgggaaaaagcacgacgtacattgttagtgacaatgcgtgacacttatatggattgccccgatagagagcgttcgcagtggtggggagatgcagtaaatgaaagcggtgaaacgttttatgctttgtgtccgcaaagtcatttattgactaaaaaaggtatgtatgagttgataggttggcagcaggaagatggaactctttattctcctataccttcttctaactggaataaagaacttccaggacagatgctagcaagtattggatattatggcttttggaattattatcttcatacaggagacttacaaacaataaaaaatttgtatggtggtgttaataagtatctaaatatatgggaaaagaatccagatggtacggtaaaagtacgtcagacagcttgggtatggggcgactggggtacaaatattgataaagaagccttgtttaatgcttggtattacatagcactgaaaggggctcaaaaaatggctgtagcattgggatatgagaaagacggtacgtctttatctaatcaaatggcggaatttaaacaagcatataatgaaaagttctggaatggaaaagtatacagaagtccttcttatacagaagatactgatgatagagtacatgcattggctgttgtaagtggattagccgatagcaaacagtttccatctatttttaaagtttttcagacaaaagaatatgctagtccttatatggagaagtatgttacggaagcattatttcttatggggaaaggagaatatgggctacagcgtatgaagaaaagatttaaggagatggttgaagatccacaatgtagtacattatatgaaggatggggtattggtgaaaatggttatggaggtggttctagtaatcatgcttggagtggtggaggcttaactgttctagctcagtatgtatgtggggttttacctattgaatcaggttatagtaaatttatggttaagcctatttttgcgggacttaataatgttgccttaacgatggaatgtgtaaaaggtaagattaaagtatcatgggagaagaataaacaaaatctagttttgaaaatatctgtaccacttaatacacaaggattgattgtagtccctaaaaataaaataaaattaattacgtgtaatggaaaagatgtttggactaaatacggagtttcgaatgcctcggaaattcgctgtttaggagtgcatgatgagaatatagaattcttggtaaatggaggggattatttgtttaattgtagcgaataattcgatagatgtgatgtataggttaaatgatagctttgaattatgaaaaaatatcttttattactattgcttttgggcaatatgtatgatagttggtcactgggtataagtgggaacatgtcagagaaacagcaagttaatatgattgataacggtaaggcattagttaatccagatatggggtggactatgcatttttattcaaatgtattagctaattatggatcgaaattggagcctagtgatgttatagaatatttcccaggggtaagtactgtgtatttacgaattccttggtcatttgtagagccggaagagggtaagtttaattgggaaattttagatactccagctcaacgctggatacagagtggaaagaaggtagcatttagaataacatcaacagaaaattggacacggcaaggaactccacaatgggtttttgatgcaggtgcaaaatattatgaagttaatggatttttagagccggaatatgatgatcctatatttcttcagaaactagaaggttttcttatgaaaatggcagaacggtatgataataatcctaatgtggcttttatagatattggtcattttggtatgtggggagaggggcataccgtgataactactcctcttcatggtcattcatggggtattgaaacccaaaaaaaatatatagatttgtattgtaaatattttaagcatgtccaattgtgtatttcggatgattttgcagggcatgatttgaggggacattatttcccaattatgaattatgctttgtcgcgtggggtcactatgcgtgatgatagtatattagtacagcctgagccaagatgttggtatcataatgaaatggcgcaatatttttggccgataatgcctgtgattttggaacatgagcattatgggggatctgtacagagaaaagcttgggataaaaacttattattaaaagcagtagaagagtatcatgcttcttatatgtctattcattggtggccggatatattgttgagggaaaataaagatgttatagaaaagataaatcttcgtttagggtaccgtattcaggtccctcatatagagtggcctaaaaaagtgagaaaaaatcagccttttattattaaatctagttggaaaaactctggggttgctccttgttatcctggtggatacccttgttttacgttaaaagattcaaaaggtggaattgtgtctgttttagttgacgattcatttaatgttcgggatctttcagtagatgctcctggtcgggctcaaaataaactgttagaatcagaatgtataatagctaaggaggttgggttgcaattgggagaagttggaaaatcattctcacgtacatgccttcctggtacttatgaactttatatctctgttggtacccttgatggaactcctgtcttggaattgccttatgaaggttcagactctcataagcgatataaattaggaaagataattatagaataagattgatttgtaatttgtgtgtataccatcatgttccttaaaattgggataagttaaacagtaatcaaatacttttgggaaattagttcttttgatatcattgcaattaagttttatcggacaggtctcttaaatgtgttttgtttgttaattaagatgtagagaatttgtaagatctcataagtcgtgtgtctaagttgtatgttaagtccgtttatttcctaataccacataattatgatgtaccccaattgttcaaaagaactgttttcccgttttgaaggattattaataatataaattttaatttttattcttatgagaattaaaatatttagaatcattttatttaccttttgtattggatttattttgatttcttgtggtaaatcttcaaaagaggtctttcgtatagattctcttaatgattcatgttggcaatcttcattatggatatctgttgctaatgcgcctgttgttaaagaaaaagtgtatgatggtacccgtgcagcagatggtaccagttggttcatgtctacagttaaaaatgataagaaagttagtcgtgcattgtggatgacaacgggattaggtgtatatgaaatatatgttaatgggaaactggtaggtgatgaaatattaaaacctggttttactcattatgaaaagaccaaactttcttttacttatgatgtgactggttgctttaaaacagcttcaggtgatgaaaatgttctttctgctcaagtcactcctggatggtgggctgataagataattactcctggagggcatgatggtatgattggaaaaaaatgtgcctttcggggagttcttgaattgacttatacagatggttcgaaagaattgtatggtactaatatagaagattggaaagctggaattgcaggccctgtaactcatgctgccatttttgatggtgaagaatatgatgcacgtattcctcttggatatgaaactcctgagaaattgagtacaccagaggtcaataatgaatttaaaggagaaatatttccttcagatggtgctgaagtttatttccgtcaagatttatctttagctccagttaatgcatacatctgggaaagtgttgaaggtaaaaatgaaaatgattttggtaagatagtcataaagaggaaatataatgcaggagagcctatggagataaatccaggagagaatcttgtcatagatttcgggcaaaatacagctgcagttccttcgtttatttttagtgcagcagaagggacagtattgaattgtgttacgtcagaattattgaatgatggtaatggggctaaagaccgtggtatggatggccctgaaggaagtgtccatcgtcttaatcttaggattccagatacagggatgaaacttaaatatatttttgcagattcagaaggagatgttaactatacaccacgctgcactttctttggttatcggttcatttcaataaatgtttcagataaagtagtgataaaagatataaaatctttacctgtaacttctatttcaaaagaaatggagattggatgtataaagacaggaaatgaacttgtaaataaactgatttcaaatactctttggggacaacgttcaaattatctttctatacctaccgattgtcctcaacgtaacgaacgtttaggttggacagcggatactcaagtttttgccgaaacaggatcattctttgctaatacttcatcttttttccataaatggatgagagatttaatagatagtcaaggtgaaactggaggttttcctggggttgccccattgagtcagtatggtaatgatatgacacgccttggatggtcagatgcgggagtaattgtaccttggactatctggaaacagtttggagacaaggaaattgtagagctgtcttgggatgctatggaaaagtacatgtctcatataaatgaaacacgatatgatcataacacgctgataggtgagaatggtaattatcaatgggcggattggttgagttatgaacctttggaaagttgtggagggagtgcttttgacttgaatggtccattgcctgaagctatagaatattggaattatttaagtgcttcatattggttgcttgatgcaagtatgatgcgtgatatggctattggaacaggacgagatgcttctatatatgaatcaatgatattaaatgcaaaaaactatataagggataagttctttactctagggggaaaattcaaaaccgatattttgaatacgatgcagacacctgcattgtttgctcttaagaatggaatttttgaaggaaaaataaaagacgatataatattccgattaagagaaaattttgagaagcatggaaattgtcttcagacgggctttttaggcacttcaatacttatgccgacattgacagaaaacggtatgtcggatattgcttggaatttattattccagagaaaaaatccaagttggctttattcaatagataatggtgctacaactatttgggagagatggaacagctatatgcttgatcaaggaatggggcctcgaggaatgaatagtttcaatcattatgcatacggtgtagtatgtgagtggatttgggaaacggctgcaggtatatcgtcagatcctgtcaatcctggttttaaacatataataatgaaaccaataccagataaaagattaggctctatagaagcggtttataattcggtttccggtactataaaaagttcatggagatatgaaggtgataaatggatatgggaattttcaattccagatggttgcactgcttctgtaactattccaggagaaagtgagtcaagggaatacatttctggagattataaaatagtccgttgatgttttataatgttctccattatttagatttcatcatgcgactatataaaatggatttcagtaaatatctctaacaataaaatggcatatgaagataatagaccataattatttcatatgccattatttattgtggtttcttagtttcttcttgaataatctagcctgtccgtaatttttcttaattttccttgctctttcgctgtacgatgcgggcaccggcaggtacactttccgtcacccagatgttacctccaatggtagctccttcaccgatggtgatgcgtcctaaaatggtggcattggagtagacaatcacattgtcttccagtatcgggtggcgtggaatacccttgatggggtttccctgttcgtcgcaagggaaactcttggcacccaatgtgacaccctggtacagtttcacgtgattgccgatgatgcaggtcgcgccgattacgacacccgtaccgtggtcaatggtaaaatgatgtccgatttgcgcacccggatggatgtcgattccggtttcagagtgagccatttccgtgatgatacgcggaataagaggcacgttgagccggtgaagttcgtgggcaatccggtagttggtcactgcacggataacagggtaacagcagatgatttcaccaaagcaggtggcagccgggtcgccgtagtatgcagcttctacgtctgtagccaaaatccggcggatttccggcagacggctgataaactcagccgctaattgagtagccgtggcacggcaaggtgactgacagtcacactggcctgagttttccactccgaagcacaatccggcctgtatctgttcgatgagcagagaaaacagctcttcaatattgacaccaatgtggtagttgatggtctggctgttgatggtagagttaccgaagtagccggggaataagatggcacgtgacagttctacgatacgttccagtgattttccggaaggaagcggttcaccttctctgtgctgatggaacagcccacggtaagattggttgtcggaaagttcgtcaacggcctttgtcagtatatgtgtgtaatcaattgggctcataagcattcctttttgataattggcaaaagtaacgatattttgtgatgaatccaataaaatcttatttttgtagaaaaatcagaatggtatggtagtaaacaagaaaaatccgtttgctttcaaggcaaaacagagcaataagaaaaagacaagtggaaaacgggtgggaaagtcccgtccggagaaagcgaataaccagttgaatcgcagagtgaaataataaaaatccccgcttctttgtagaaagtttttgttctctaaaaagaagcggggaaattatttatttaaatgcggttcgtcaagtttcagccaatacgaaatccagctgtttcttagccaggttagcacgggctaccttaatcttaatcgggtcgccgaggctgaatttctggtggtgacgacgtccgatgaggcaatagttcttttcgtcgaactcatagaaatcgttgcccaggtcgcgcatggcaatcatgccctcgcatttgttttcgttgatttccacgtagagcccccattctgtgacaccggaaattacaccatcgtacacttctccgatacgttcacccataaattccacttgtttgtatttcacggatgcacgttctgcactggctgcagtctgctccattgccgaactgtgttcgcagagcgtttcatacttgtcggcctgtgcgcttcgtcctcctgccaggtaacgggtaagcagccggtgtaccatcaagtccggataacggcggataggagaggtgaagtgcgtgtagtaatcgaatgccagtccgtagtgtccgatgttataaattgaatagcgtgctttctgcatggcgcgtaaagacactgtttctatcaggttctgttctttctttccttcaatttcgcctaacaagtgattgatggacttggatacttcagctttgctacctcctgtgcggattttgtaaccgaagcgggcgataaactgattcaggttatccagcttgtcggggtcgggcaggtcgtggatacgataaggaagtactttcggctttttgttcttaggaacttttcctacgtattctgccactgtcttgttggctaacagcatgaattcttcaatcagcttgttggcttctttagataccttgaagtatacgctgagcggtttaccggtctcgtcaatttcaaattttacttcgcagcggtcaaagttgatagagccggcagccattcgtttttctcgcagaatctgtgccagacgattcagttgaagtacctcttccttgtagtcaccttctcctgtttcaatgatttgctgtgcttcttcgtacgtgaaccgacggttggatttgattaccgtatgacggatgcggtagtttttcacttccgccttttcattcatttcgaaaatgacagagtaagccagtttttcttcatcaggacgcagggagcaaataaagttgcacaaacgttccggcagcatcgggatggtacggtctaccagatagacagaagtcgcacgtttggctgcttccttgtcgatgatgcttccttcttttacatagtgtgatacgtccgcaatatgcacacctacttcccataagccgggtttcagggtgcggatggacaacgcatcgtcaaagtctttggcatctttcgggtcgatggtgaatgtcacgacatcgcggaaatcttcgcgttcggcataatcttccggcgtgatgtcggccgatagtttctctgctgcagcttctactgcctgcggatatacgtacggcaatccgtattcagccagaatagcgtgcatttcagtagtgttgtcacccgcttttccgaggatgtcgatcacttcaccaaacggattctttgcttcttccggccattcggtaatgcggacaatagccttatcgccgttcttcccgcctttcagcttgtctttcgggataaagatgtcgttagccagggtgctggtttccgtaagcaggaacgcataattcttactgactttcaatacgccgacaaaggtttcgttggcgtgttccaaaatctcgattacctgcgcttccagctgatgctttttacgtttggcacacaaggcaactttcaccttgtcattgttcattgcatgggcagagttgcgttccgcaatgaaaatgggttctcctccctcttcagggataaacgagttctttccattgcttttacgtacgaaggttccggtcagaatctgtcctttgtcattgattttatagcgccctttttcgatttcaatcaggaagttgtcttccaacatttcttccactacgtcgatgcagagcatttttcccggatgggttgtaagttttagagcttggaacaactgcttgaggctgaatgcttcattcggctttgtacggaaatagttgagcagtatctctacgagctcttttttcttcaggtgctttccgcctttcttttcttttttctttttagccatgttgttttgttttaaatcaacagctctctgctgttggtaagattatctttatacaaagaaagtgatttccggggaataaacgtggttttttctgttaagatgctgaaaaactattatctttgccacattctttttacaaaagtaagatatgaatgagattggaacatccgttcgcgaacgtgagatttacaaggtaaccctggtgggtagtctggtcaatattctgctggtagtctgtaagtttgcagcaggtttcggtggaaagagtgcggcgatgattgccgatgcggtacactctttgtcggatttgataacggacttgattgtcatcgtgtttgtgcgtatttccagcaaaccggaagataagggacatgattacggacatggaaagtatgaaacactggctacgttcttgattggagcggctttgctggctgtaggagtaggaatttgctggagtggaatagaatcaatcatcagttttgcaaaaggagaggcattacagtcgcctggctggattgcactggctgctgccattgtatccgtggtatcgaaagaaattttgtttcattacacccggctggtgggaaaacgctgtaatagtccggcagtgatagccaatgcttggcatcaccgcagtgatgcattttcttccatcggtacggccgtaggtattggaggagctatcctgttgggagaaagctggcgtgtgctcgatcctctggcggcagtgattgtcagtttctttattgtgcaggtggccgtgaagcagctgaaggcttgcattgatgaactattggaacgctcgttgcccgacgatatagagcaggaaattacgcagacggtattgtcactggacggtgtgtcgcagccgcatcatttgcgtacccgccgtattggcagtcattatgcgatagacatgcacgtgcggatggacggaagtatctcgttgcatgaggcacatgaaaaggctactgccattgagcagaagttgcgggatacttttggagaggatacctacatcagtatccatgtagaaccggaaaaataagtttatggagaaaaaaatattagtcaccggtgccagtgggttcatcgggagctttttggtggaaggtgcgctggagcgtggcatgcaggtgtgggctggtgtgcggaagagcagcagccggaaatatttgcaggattcacgtatccattttgccgtactggattttactgattccgaccgtctggccagtcagttggaggaacagaaacgccagcatgggaaatgggattacattattcattgtgccggagtgaccaaatgcctggacaaggccgattttgaaatcggaaattactgggctacccgacattttattgagacgctgaagcgattagacatgcttcccgtgaactttatttacataagttcgttaagtatatttggaccgattcgggaaaaagactattcatccatttgtgaaacggacactccccagcccaatacggcgtatggactgagtaaactgcataccgaggaatatctgaaatccttgaccaattttccgtatgtgattttccgtccgacgggagtttatggtccacgggaacgcgattacttcttgatggcgaagtccgtgcagcagcatgtggattttgcagcaggtttcaaacgtcaggatattacgtttgtgtttgtgaaggacttggtacaggccatttacctggctattgaaaaaaatgtcacaggccgcgcttattttgtgagcgacggaaaggtatatagtagtcatacgttttccgacttgattcggaaagaattgggagacccgtggatgcttcgtttcgtttgtccgttgtttcttttgaaagccatttcctttgtggcagagaatgtaggacggatactccgtaagacgagtacactgaattgtgataaatatcgtattatgaaacagcgaaactggcggtgcgacatctcaccgctggaaaaggagttaggatatgttcccgaatatccgttggaaagaggtgtaaaagaaatcattgcctggtataaaaaagaaggatggctatagaactgaagttatttgaacgagtagaaagtggaaagggcttgtttgctgtagaaagcattagcttgatttacaatgcactaaccactattttgattttgcttttgtatccccggatggatcatcccgggatgatgttgctggaacgtttgggcattgtggtcctgacgttcgtactgatatatttgtatcaggcattcccctgtcgtttgacggcttttgtccgtatggtcgtgcaaatgtcattgttggcatactggtatccggatacgtttgaatttaaccgcttgttcccgaacctggattacgtgtttgcttccgccgaacaggctatttttcattgccagccttcagtggaatttagcaagctgtgtccttccatgtggttcagtgagcctttcaatatggggtatttcttttactatcccatgatgctgattgtggtggtatattatttcctgacccgttttgaatggtttgagaagatttgcttcgtgctggtcacttctttcttcatttactatttgttctacattctggtgccggtagccggaccgcaattctatttccctgccatcggaatggataaagtgaacgcttgtgattttccggcaataggagattattttaatgacaatactttcttgctccctggaccgggatatgaacatggattcttttataatctggtagaagcttcacaggaagtgggtgaacgtcctacggctgctttccccagttcacatgtgggaatctctacgattgtgatgattatggcctggcgcgtgaaccggaaattggcctacattctgttcccgttctatgtactgctgtgctgtgccacagtgtatattcaggcgcactacctgattgattctctggtgggacttattaccgctttcttcgtatatcagctggctacgctgatgtataagcgttggtttatttctccggtctttaaacggatgtattaaaaaaatcggtaaggattattccttaccgaaagtagcttctatatggtctaatatgccattcaggtcatttaatgtttctgcgcgaagcatggcaatacgtgtctccttgaaattaggaatccctttaaaaagaggggatgcagctaagtgacggcgtacgtgcaggatacctctgcgttcatccagcaggtttacactgtcgagtacttcctgacgcaatacatccattcgccatttgaaagaaagaggcggcaactcttcacctgtttccagataatgttttacttccttgaaaatccagggacgtccgaaactggctcgtccaatcatgatggcatctactccatattgttcaaaacaccctttggcacgttgtggggtagtgatgtcaccgtttccgataatgggaatacgcattctcggattcttcttgacttctccaatcagggtccagtcggcttcaccggtatacatttgtgcacgggtacgtccgtggatggttagggcttcaattccacaatcctgtaattgttccgccagttctacgataatcttgtgttctgcatcccatcccaggcgggttttcacggtaaccggaatctttacggcatctactaccgcacgggttatttcgagcatcttaggtacgttctgcagcatgccggagccagcaccttttcctgccacccgcttcaccgggcaaccgaagttcaggtctaatatatcaggcttggcctgttctacgatgcgggctgcttccaccatggtatccgtatcctttccgtaaatctggatggctaccggacgttccttttcactgatgttcagtttcagcatggtcttccctaccgaacgaatcagggcatcgctcgatacgaattccgtgtacaccatgtcggcaccaaactgcttgcacatcaggcggaatgcagggtcggtgacgtcttccatcggtgccagtaatactggcttttctcctaaatctatgtttctaattttcattgccttgatattgtcgcgcaaaggtagtgaaattttattatatcctgaaaaaacgctacctttgcaccgtaatattacaatcacggaaatgagttatacaatcaaagattttgaaatcatggcgcccgtaggctcacgtgagtcattggcggctgcccttcatgccggagccgattccatttatttcggtattgaaagcttgaacatgcgtgcgcgttcggcgagcacttttactatagacgatttacgtgaaatcgccaagatatgcgatgaacatggagtaaagagttacctgaccattaacaccattatttacgacgaggatattactttgatgcgtaaaatagtggatgccgcaaaagaagctggtatcagtgcggtcattgcggccgatgtggcagtaatggcttattgtaatgaagtgggacaggaggtacacctttctactcagttgaacatcagtaacgcagaagcattgaaattttattcacgctttgccgatgtggtggtgttggcacgcgaactgaatctgaaacaggtacgtaagatttacgatgctattcaggagcagcaaatcaagggtccgatgggtgagctggtgcgtatcgaaatgttctgccacggagctttgtgtatggccgtttccggaaagtgttatttgagcctgaacgagctgaatgcttcggccaatcgcggagcttgcatgcaggtatgccgtcgtgcgtatacggtaaaggataaggaaagtgacattgaactggaagtggataaccagtacatcatgtcgccgaaagacttgaagaccattcattttatggacgagatgattgaagcgggtgtacgggtattcaagattgaaggtcgtgcccgtggtcctgagtatgtacgtacagtagtagaatgctacaaggaagctatccagtcgtacattgacggtacattctccgatgaaaaggtggccaactgggatgaacgtctgaagacagtattcaatcgtggtttctggaacggctattatttaggacagcgtttgggtgaatggagcaagaactacggttcggaagcaacggagcgtaaagtatatgccggacgtggaatcaagtacttctctaatatcggagtagctgaattcctgatcgaagcctcagaaattaaagttggcgataaattgttgattactggtcctactaccggtgccatgtatgtcaccttggacgaggctcgtgtagacttgaagccggtggatgtggtgaagaagggtgtgcacgtgtcatttaaagtgcccgaccgtatccgtcccagcgatcgtttgtaccgcatggtgcccgccgaagagttgaaggcaaaacggaaagagtaagtttatttgaagaatagcgatagtatcctgtcagggcttttaaaaaggagccttgacaggatttttttatgagaataggatataaacacctcggttaattacttgttgaaagacttgtgaatataattgttgatatcctaattttttattgattatcagcatgatgtgtaaattaacaggttgtgaattacttgtgaataataaataagtctctttgggatagcttgcttgttctcataattattttacatttgcactccagaacttaaaatcttatgtaatatgaaaaagatatatgtaaaagagtggatgttatttcaaccatacgaacgacaggatgaagtagacacgtactatgtaaacgttgccaatcatatagctggatgtttaaaggattttgttggaggacgttatccagaacattcagtgcatggaattgccatttatttgacgctctggtttcaggatgtgatttcacagaccggaatttggcaagcattctctgaagaatgccgtaagcggtatggctgccttgttccttttatgactccggaaaaagaaaaagattattatccgggagaagtgaatccggaagatttgcagtttctgctatggcattatcttcaatgcatggagaaacaggctggtggcgtattgaatccagagaatccggcttttgaggaattggctaatcaaatctatgattatttgtcggaagagtttcaggtagctccagagaatgagcggctgcatgcgatgttatatggggaggcctttggagaaaacgattacatgcgttatcgtagtgtactggagtggttccatttctgcagttatgtaggctttgaaaaccgaggtgagtatcagagagtggtagatacggttgcacgaatgggacagaatgtcaatccgcatattttgtcgtacgatgtaaagcagaacattctgtttgaaggacgcaagaacttgctttccttgacatcggtagaatggctggctttggtaggaaagagtcatcctgaaacagctttgtgggcggaagtaaaagctcttcctcaggaaatgtatctttatgaaggggaagatgaaaaattcctgtttgtgaaagatttgtcgaagaaagaaggagaacagctgagtattcggaaagactctttgaatatggattccttgaaagcccgtaaggaaggagtaaccatattaagttgccgactggtacagtacggaggagcctggtggcaagacggtatgctggttgtatctgatttacaggagaaagtgaaggaagagattgaacagcgaattgccgcacgtgaaggcataaagaaaacatttgatgaatttatgaaagcatctggtggcaaacaatttgtgttctgtaagtcggaagaagaagtgcaggacttcctttctcagaaattgggatataaggaaaaagaaggaatagaattgccgaagatggatgccacacacggattggttctgatggtttctccacataccggcatacatgttcaaatgcagttgtgtgaatgcatttcttcaccggataatacattttatgatgccgaagctgctaagaagcaggcggccatgtttatattgaatcccaatgtgataccttacgatttgagttgtgctttgcaggatgccgatacgcttccggatgcttgcctgaacagtgcgttgggtgaggaacacggacgggaaacaatgaagagaaacgcgcgtttctttacagattatttctttgaaaaatgtagagagaaggattgttgattactcaataatccctcctcccaatacggtattaccccgataaaatgcagctgcctgcccgctggcaatagaagccagcggttcatgcagttgtatatgcagtcgctggtcgtccagtaaggtgacagtgcatcggttggcttgtttccggtagcgtattttaacaatgacgtcttcgtgtccaagcactacatcaggattgatcaggttccagtgggtgagatacatttcgtttttctccagtgcgtgcagattgtcgctgataattactttattttcctgcggaatgatttctttgacaaagagcgctttgttcaagtgaatacctaaccctctccgctgtccgatggtgtaaaacggatagccttcatgtttcccgattttctgtccttgctcgtcataaaagtttccagggatgatttctccttcgggtacatgagctttcaggaaggtacggtaatccatcgggcaaaaacacacacctaagctgtcacgcctcttggcggctttcaggaatccgcgtgcggcagcgatttcgcgtacacgggtcttggtcagtccgcccatagggaggcacattctctccagaatggattgtggaagtccccacaagaagaaagactggtctttgtctgcgtcatttccgcaggtaatgtaccagtatccatctattttttgtttgttgacgtagtgcccggtagccagatgatagatacctttttcgtcagctatttgttgcagtaagggccatttcaggtagttgttgcagagtgtacagggtaccggggtacgtccggccatgtattcctgaataaaatagtgtatgattttttcctgaaacattttccgtgcatcgtaaatcaaatgaggtatgcctagcgtacagcataggtcacgtgcatcgtccaggtattctgtatttccgtctttttcaaaaaagcgaaaggtgatgccggtcactttgtagcctgcatcttgcaatagaagggcggcaaccgaactgtcggtgccgccgctcattcccaatagaactttgttattttctttcatcgggacaaagttactcttttctcagttccggcaatttgatttctgcaatttctgcacttccattagttatcaggatacgcaggtcactgcctcctgtcttgttgaaccgaatggtttcttcctgattgggagtaacttctccgcgttgtaccggaaggaattgtccgcctccgctggaaatctgaatctcgtagcgtgctccggcttccgcattcttccaggctacattgatacggtctaccttggcattttctgccagctcgaaggagatgtattctcctttttcacctttccaggtagtggaatagtctccgtcaaccacatgaatgatatgactcttgtttttgctggcactgataaagtcacgcgggtccgattctattatttcattggcagatgcctgtccgtaagctcggatttcaagtccttttttcagtcggatgtcttcggaagaagcccctatcataatctggaacatacccggctctacaacccagtgattgtctttgttgagtagttggaaatcacgtggaagtagctggaagctgacctctttggtttcacccggctccaagtgtacgcgttcaaagccgcgcaagttcttttcatacgtggtcacactgctgacgacatcgcgtgtgtacaactgtaccacttcatctccgcttcgtgtaccggtatttttaattttacaagtcacggtgaccggctctttgtcggtaatgacaggagaggagagttgtaagttgctgtattcaaaagtagtatagctcagtccgtatccgaacggatagagtggaccgttgatacgcgattgattacccttcatgccaggtgtttgtccgccgtctacttgtgaagcaggcttggccgggaaattaaaaggtatctgacctacggttttagggaaggtaacagtcagctttcctcccgggttgtaatctccgaagagagcttcggcgatggctgttcctccttgcgaaccaggataccaggcctccagaatggccggtacaaatttatctgcccagttgatactgagcggacgaccgttaattagtaccagtaccactggttttccagtggctactatggcctccaaaagttgctgctgatggccggggagatccaggctggtacgcgatttgttttctccacaagtgcggatgcctcctcccaatacaactacagctacgtcactttctttgacattatcgacagctttctgaatttcggttttttcctctgcggtaagtggataagaaatgatttccgattccggccaattggtatctacaaggtcacatcctttggtataggttacctttgtaccttccttaacctgttgtttgataccttctagtacggtggttacttctactgctacgggaccgtagtgggtaagtgcaaaggatgcttcatcagcatttggaccacatacggcaatacgcttgatttgtgatttatccaaaggaagcaggttgtttgcatttttcagcagcacgagcccttcgcgggaagcctgtaaggcaacttgttgatgtgcctcactgttgacttctttatcagctaaagcaaggtctgtctgataaggtgtgtcgaacagacctgtcagaaatttgacacgtaagatatctcttacccggttgtcaatggtttccatactgagtcctccttcctgaatcagctcacgcaacgggagtacgtatgattctggtgaacggaacgtacagcgtacattcagtcctgcttctacactctggcggactgcctctttcatgtcttttgccgttttgtgcttgctgtagagatattctaccgcgtcactgtcggatactacatagcctctaaatcccatggtgcctcttaggcgttgtgtcagccaatagtagctactttggataggaaatccgtcataatcattgtaggaactcattactcccaggataccagcctcctggattactcttgtaaaaggataagcatgtatgttttctacctctctccatgacatttgcgggtcaacccttgcaaaaccttcgcgggcgcctttgttattactataggcgatgaagtgtttggctgtagaagctacctgcatgtcggtttgaagtccctttcccatggcgatgcccagttctgctaccagataaggactttctccatatacttcttcgtagcgtccccagcgttggtcgcggcctacgtccaggataggggcgtatacgttggtgtaccccagtaagcgggcctctcgtcctgtgatgtagcctacctggcgtatcagttccctgttccaggtgtgtccgagtgccagttgggttgggaagttggttgcaatatagttttctactccccggataccttcattggtaaagtcagccggtatacccaggcgcgtttcttctacgaaaaagcgttgtacctcgttcagagcccaggcatggttcgaagctggccataccagttcattttgcattggagggacaccccatcctcggaacgcattcagatgctcatcgatagctccgataccgtctttccataactggtttttccagtcgggagtaggcaatgaatcttttaaaactctttgatatccataaagcgtgaccatctggcaggtcttttcctccatagtcatttgggaaagcaagtcttcaattcggtcgtttaatggtgctttaggatcttcgtaaatatctttccgaccatttttgttgaagtcaatccattctttatgatacatgcttttctttttgggaacatacgttttggaaacctccaatgcatgacctgttatactgcaaagcgatgtgcaagaaagaaggcaatagaataattgttttttcatgtgatacagctagaattagggttgttttacttgacctcaaaaatagaattattcagaaaataaatggtgataaaattgtccattcaaatgaactttccgtctttatttaagttaagggcataaaaaaaggagttccgctgaactccaacctttgttaaccttaaatctaatactatgaaaaacacgttgcaaaggtaaggcttttcagggaaatagcaagcgtgaaatatgttttataacatgaattaagaaaagaatagggcttattcagaccttttatacaaaattccatataaaaatattattctacatggaggaaaatgcaggaaatgtgtttttttgcaaccaaatcatctatgaaaatacgtatgaaaagaaaattagctgttgttttattgatttgtatctcttgtcatattggttgggcagcacaagattttgtctggaaatcggggcagaatatgaaggtggtgtgtgatactacagaagctccggtggtgaaagttgcgcttgatttgttgaaacgtgattgccggtcggtactttctggagaaatatctcgttcggagaataccggaaacatttatgtcggtacatggggagaaagctccgtgctacaagcgttagctgatactcgccagctggatgtagctcagctcgacgagcatagagaggcttttttattgaatgtacttcctgacggaagactggttgtggcaggaagtgataagcgtggaacggcttatggagtacttgaactttctcgtatgatgggagtttctccatgggaatggtgggctgatgcggtacccgaaaaaaaagaggaattttgtttgcctgcaggtttccggaaactggagtatcctcaggtagcttatcggggaatatttattaatgatgaagattggggactgactccctggagttggaaacattatgagccttccgagcggaaaggacagatagggccgaaaacgcatgcacgtatttttgaactgttgcttcgcttgcgggccaatactttctggccggccatgcatgagtgctccattcctttcttttttaccgaagggaataaggaaatggccgataagtatgcaatttatctgggtacttctcattgtgaaccgatgatgcgcaatactaacggcgagtggaaaacggccgggaagggggagtacgactatgtacacaaccggaaaaatgtcttgtctttctgggaggaacgtgtaaagcaactttgctactcggatgatatttacaccttaggtatgcgcggtgtacacgatggaaagatgcagggagccaagacactggaagaacagaagaaagctcttacggagattctggcagaccagcggcgtatgctggcaaaatataaaggaaaggatttgacaaaagtgccacaagtgctgattccgtataaggaggtgctggatatttatcaggcaggactacaggtgcctgaggatgtaactttgatgtggtgtgacgacaattatggatatattacccatttccctactgccgaagaggccgctcgtcccggagggaatggcatttactatcatgtgtcttattgggggcgtccgcatgattacctgtggctttctacggcgagtccttatttgctttatcagcagatgaagcaggcatacgaaaaaggtatccgccagatgtggattctgaatgtgggggatataaagccggcagagtatcagacggagttgtttatggatatggcatggaatatcggtcgggtgcagcagactggagtcaccggacatctttctcattttctgtctagggagtttggagctgtttcggcttctgctttgttacccttgttgcaggagcattaccggttggcatacatccgtaaaccggagtttatggggcatacaagaaccgaagagaaagatccgaaatacaaaatcgttactgaccttccttggagtgagggagaaatccggaagcggttgtcgctttaccaggctctcgaagaccgtgcggaggtatggagcagaagaatgcctgagacaaagcgtactgcttattttcatttggtacagtatcccgttcagggagcttcacagatgaataagaaatgtctgtatgcacagttggcccgtcacggaaaggctgactggcaattgagtgaacaagcgttcgacagtattgtatcgctgacacataggtacaaccaggggaaatggcaaggttttatggattataaacctcgtaatttatctgtatatcaacggattccgaaaagtacggctactgattctttgaaatccactcgctcctgtctctttaaatggaatggtctggaggctatggaaggtaatctgttgccgtgcgagggattggggtacgaaggtatggcagctggtatttcaaaagactcctcagtggtgtttcactttgacgggtgtccggcagactcggtagaagtggaacttcgtcttcttccggcacatccagtggttggaaatgaattgcgcgtgcaagtttctttagatgaggtgcagtcgcttcctgtgtcttatcgtacttatggccgtagtgaagaatggaaacaaaatgtgttgtccaatcaggctgtgcttcgtttgaaatttccattgcgtggaaatcgaacccatcgaattacgattcaggcattggatgagggagtggtattagaccagttgtatgtatatgaatggaaggattaattatgtaaacagagataacaatatgaaacagttgagattcttttttatccttatggcatgggtctgtatccataccacttggggacaggtgagtacgtcgtctgatccgttgtatggaaaacgtatcggagtcataggcgacagctatgtaagaaatcatcgtgagccggtggaatatacatggcattataagtttgcgaaaaagcatggaatgcaatatttcaattacgggcgtaatgggaattgtgtagccatgcctcgtgctcgtttcggcgaggcgatgtataaacgttataaagaaatgactgattcattggattatgtggtggtcattgccggacacaatgatgcttccctcctcgattctatcggtattgataattacaaggaaaaactgggcatattgtgtgaggggctgattgaaaagtatccttctgccaaactgtttttctttacctgctggacacgaaaaaatttttcaggcagtgcagccgagaaagtcgtggatgcgacattggaggtgtgcgggcgttacagtattcctgtttttgatgcagcacgtaagggaaatatctttgcgcaaagcgatgctttccgcaagatttactttcagaatgaaggcgtaaacgatacagctcatttgaatgcgaaaggacatgaccgtttcttgccttgtgcggaagcttttttgcttcaatattgataaaacatcttttcctttctgtatataagtcattttgctgtggcatattctctgtttcacactgtgaaatacaaaaaccacagtgtgggatacatatttcacactgtgggatacaaatcccacggtgtgaaacagagaatcgataaagggattctcgggaatatagaaggggtattttattttcatattgtgcgtcatgcagtaagtgtttttttttgtatgattgttatatatatgacaaacataaaaaatatacagcgatgagaacgatttttgtattgcttgggttgctggcggcatctgtaacggtgaatgcacagacattgacctcgcccgacggaaacttcaagatgcagtttcatctatcagacgaaggcaaaccagtctattcgttaatgtacaaagaaaaagaagtgataaatgaaagcaaaatgggcctccagataagtccttcgattgcatttgatcgtaactttagtgtggtggaaacgaagatagatagttgcgatacggtctggaaaacagtctggggacagaacagtgagatcagagaccaccataaagagttgtgggtggcactgaaacaagaaaaatccggcagacttctgaatatccgcttccggttgtttaatgacggtctgggtttccgttatgaattccctgtgcaaaataatctgcgtcattttaccctaaaagaagaattgacagaatttcagctggctggcaatcataaagctttctggattccggctgactacgataccaatgagtttcagataactacttcccgcctttcggaggtacctcttttaattgatgaggcccgcaatgagcctttggcttgtaaatcaccgactccgaatctggctgtgcagactccgctgatgctgaagtctgacaatggactgtatattaatattcatgaggctgcactggtaaattatccggccatgcatttgaacctggatgcagaaacttatcttatgagtgcacacttgacgcccgataagaatggaaacaagggatacattcagactggaagtgtgacgccgtggcgtacgattattgtgagcgacgatgcccgcgatatactggcttccaacttgattctgaatttgaatgaaccttgtaagatagaggatacttcatggataaagcctactaaatacgttggtgtatggtgggaatatttcacgggtggaggttctacatgggcctataccgacacgcaggatgtcgtgataggacaaactgattacaagcaactgaaacctaacgggcatcatggagccaatacggctcatgtgaaagaatacatcgactttgcagccaaacatggatttgacgccgtgctggtggaaggatggaatgaaggatgggaagataactatgcgtatgccaaagaatttatctatagctttactactccttatccagattttgacgtgaaggagttacaggcgtatgcggcttccaaaggggtaaagattatcatgcaccatgaaaccacctcgtctgtggctgattatgagcgtcagatggatgatgcgttccgtttcatgaaagataacggatacgatgcggtgaaaactggatatgtaggcccgattattccacgtagtgagcatcacgacggacagtggatggtgaaccattacaaccgtgtggcagaaaaggcagcccagtataagatcatggtcaattcgcacgaagcggttcgtccgaccggtttatgtcgtacttatcctaactggattgcacaagagtcggcacgaggaacagagtttgaatcattcaacggcattcgtccggaccaccagaccatacttccgtttacccgtctgatgggaggaccgatggattacaccccgggtatttttgagggagacttgtcagtgtatggcagtaacaaggcaaagttgggtactacactagtaaaacaattagctttgtatgtcacgatgtacagtccgcttcagatggctgccgatttgtatcagaattatgagaaatatccggatgcgtttcagtttattaaggatgtggcagttgactgggatcatacctatatattagaggcggaaccgggagattacatcacgattgcccgtaaggctaaagggaaaaatgaatggtatataggaggtattacggatgaaaacagccgtgaagcccttatcgacttcagctttttgccgaaaggcaagaaatatcaggccgttatctatgcagacgggaaaaaagccgactggcggacaaatccgaaggaatatgtaatagaaacacggacggtaagtcataagactaaactcagacaaaagctggcccccagtggcggggtagccatcagtataaaggaattataggtagaagattgttttcaggaaaataaaggtagctctttgatagaattgtcggcataattataaagaacaggtattagtggatgactttgcataaaagttgttgaaatagattttaaaatttatctttgtgataaataccaaatctgatcacttatgtctgtaaataattttgaaacaatatattatggtttgtttaaacagcattattctgaattgttgttttatgcaacccgtctggtaggtgaggatgatgcggaagatattgttcaggatgtatttgttgaattgtggaacaataaaagcaagattgattttgatgaccacatcaagtcttttttatataagtctgtttatacaaggtccatcaattttctgaagcataaatcggtagtggatagttatacttcggaggaaaaagaattttttgcccagaagattgcctattacaattatgaaaactctgaggtaatggcacggttggagaatatggagttgaagaaggaaattctgtctgccatcaatgatttgccggatcagagccgaaaagtatttaagatgagctatctctacgagatgaagaataaggaaattgccgacatacttggtatttccctgagaacggtagaagcccatatgtataaggctttgaagatactgcgtgtaaagctcagtcatctgcttttattattaatttgttttttaggtatatatgaataacattagtgacgatattatatggaggtatcttcagggaattgcaacagctgaagatatgaaggcgctgaatgaatatatcagtgcttctcccgataacaaaaagtatttgttttccatagaggagttgtatcatctgggaaggtggaaatacgacgaagaagataaaataaacgcagccatgcaacgactgaaatcggttgtacagcctgttgagatgtctgtgctttcggaaaagaaggtgaaaaaacagatgaagcacctctttttgtggactcgatatgcagcggccgtgcttgtgctggtgcttataggatggctgtcctttagggggttgacaagcgaggatatgataagggtttacgcagacaataagataagaaagattgaacttgcagatgggacgaaagtttggttgaataagggaagcgtgtttgaatatccggaaaactttgcaggcgataaccgaaaagtcagactgaatggggaagcttattttgaagtcgctcgtcagactggaaagcataagtttacggtagagagcaaattgatgaccgtggtagtgcatggtacgattttcaatatgaaaagttatgaccaagctaccgtcgcagaaacttctcttattgaaggagaggtgctcgtggagtcgggtgatgatgattcgaaaattattttgcttcccggacagaaagccattgtggaagaaagcagccataagatggttgtcaaagagaccaattcgcttatggatgggatttggcggaataacatggttcctttccagaatgcaacgattcaagatattgccaaggtgctggaagatttatatcatgtcaagattgaggtccgtaaagatatagacttgacacatacctattcaggcatgatagagaaaaaagaaaagctggaggatgtgatgaagaccctacagaatagcattccgataagatacaagatagagagtgataaggttttgattgaacccatggagtaaaatccgattcggcaaacacgcatttatgaggtgtttgccgatttttttatatttcccgaaaaaaataatgaatttgagtaagtgttttatatagggtggctgttatatatgtactattggaaattgtagtaataatttaaaataacaagattatgtttaaccttaaaaagaatttatttttagaagggaaaatgcaatccttatgttcgggaaaatatctcaggacattggtttttttaggcttgtcggcagctccttttcagtgggtttcggcgcagtttaatctttcactgactaatcctaatttagggagtgtaattaaagaaatccaggctcagtcggattatcagtttttctatgacgataagcttgcttctgttcaacttgaatctttgaatgtaactgattcttctttacaggaagtattgagcaaggctttgagtgggaaaaatatttcctataaaatagacgatagagtcgtttatctgtctatggataattccacggtaaagaagtcacctgcacagagtgctgcaaagaagacgattaccggacgtatagtagatgcgacaggtgaaccattgattggtgtgactatcatggaaaaaggaactaccaatggtagcattaccgattacgatggaaattatactgtgagtgtaccgggaaatgcggtgcttcagttctcttatatcggctataagagtgtcgagatgaaggtagaaggcaaagaagtgattgatctgactatgcatgaagatacggaggtattggatgaggttgtcgttactgctttgggtatcaagcgtgagaaaaaaatgctgggatacgctgtacaggaattgaagagtgatgaattgaacaaaacgggtgacccttctgtaaccagtgctttgcaaggtaaggtagccggtctgtcaatgaatacttcatctacaggtttgggtggttctactaagattactattcgtggtaactcttcattgagcgacaataaccaaccgttgtggattgtggatggagttccttttagtgacaataatacatcggatgcatctatgtttggtggtgttgaccgtggtagtgtttctttagatatcaatccggatgatattgagagtatttctgtgttaaagggcccgaatgcggcagctctttatggtagccgtgccggtaatggtgttatcttggtaactacaaagaaaggttctaaaaaagaaggttttggtgttcgttatagcgggaactttacttggtctaaggttgcagaaacattggatatgcagactcgttatggacaaggtcatatcaaccccacaggaggtgtggaatatagtgttgatgatagtggaagttggggacctgtattaaacggtgatatgtatactgcatggaatggagaagaaatgcctttctcaaattatggcaataagttgaaagactattttgatacaggcttttctcagacgcacaatgtttctgtaagtaatactacagaaacatcacattatcgtgcttcttttggagcagcagatagtaaaggtgtattcccgactgaaaaattaaatcgtgtaaatatagacctgaatgcaggaactgagctgaacaaatacttctctatggaaggtaaaatttcgttgtcccgtacaaaagggacagaccgtccatattatggtgtttatggtgctatcaatcagttaataggaatccctaataatgtacgtttggatgatttgaaagaatattcaaatgaaaatcaagtacatgtaaactgggtgaaaccatctgcatctatccgaaacccgtattatgtattgaatcagcgtcacaattctgatgagcgttggcgtgcatttggttactataatgcaaaaatcaattttactgattggttgcatttttctgcaaaatatgcatttgactattatcgtacacgtcttgaggacactaatctcggtgacggatttacagaaactactttatcagacattcatactgatgaaatgaatcgttcagaagaaaatttctttgaatcaaatgctgagtttttattgatgggtgataaacagctaacagataatttccgcttaggctttacagctggagccaattttatgtatcaaaaatttgaaacattgggagcaggtgtaagagatatgcttaacaagaatatgtggatgctaaacgcagcaaatatattgaatactgctaaagaatctggatatgaacgtgcaatgaactctgtatttgggtctgcacagttggcatggaaagaatatctatctttggatttgactgcacgtaatgactggtcatctactctgccaaagcaaaataattcattcttctatccgtctgctaacttgagttttgtaatctctgatttcgttcgctctttggataaaacattgcctgactggatgacgtttgctaaactacgtttgtctgccgctcaagtaggaaaggatactaacccttaccagctatacaatacttacgattatatctttgaaaacggtggtaaattgacagccaatatgtctaacgtgaaaatgaacgatcagttgaagccggaaatagccacatcttatgaagttggtttggatatgaagttccttaataaccgtttaggctttgattttacttattattatagtaaaacaaaaaatcaaatcatgaaagttcctgctgctgctccatggtcaggaggtaaatgggtaaatgccggtttgatttcaaatcagggtgttgaattgatggtgtattctactatcgtggatacaaaagactttacgttcgatttgaatgtaaacatggctcataacgtatctatggtaaaagaattggcagaaggtgttgattatttattctttgatggtgattctggcttcccgataaaagttggaactcgtgcaggtcataaattgggagaaatctatgcttcagaagtctatatgcgtgatgaaaacggaaatatccttgtgggcgcaaatggtttaccgatgagaagtcgtaaattgtcagatcgtcttgcaaacccgattggaaatattcaaccaaagcttacgatgtctgtatcaccttcgtttacatataagggcatttcattgtctgctatgtttgatatgagatttggtggtgacatttattcttattcagaagctttggcaacaggaagtggtctggcaaaacggacagaaaaccgtggagaggacaataattatatgatgatattcccaggcgtgcatgcagatggaactccgaatacgacacagattacagcttcaaactattacggaaatttgctgccagaagatttcttgtatgacgcgtcatttatcaagctgaaagaattgtctttggggtattcattcccgtcaaaaatgttgaaaaaaactccgttgactgcattgaatgtttcatttgtggcacgtaacttgtgttatctgttgaaacacactccgggtacaagtccagagggaggctatgacacgactatgttctctcaagctattgactttgcggctataccatttacacgcacattcggtttttctgtaagtttaggtttctaattctaaaaacaaaagtattatgaaattcaatatatataaatctattgctgtatgctcgttagtagctcttgcaggatgtcacgattttgaggaaatgaatacgaatccttatcagccgggatatattccagaagctacagaaaatgttagtccaaatgggtatgatattgattatcagctttcagagaaagcattggcttctttgaaagaaagagagtccggtatcggaagtactctttatggtttcttctatgacggggcatgggataattaccaaacaacaacgaatcttacccatgatatttatgctggatatactgggaataatgtaaatggttttttaacacaagctcctacttatgcatatacagaaggttggtctgctaatcgttggaatcaattttatgataaaagaagtaatgctgaatatagtgagttaatcaggacattttggttctgtgataaaaataaatatcatgctgctttttatatcagccgtatttattatgcattcttgttgtcaatgcagactgatacttatggtgatattcctttggaatattatatcaagggagctgctcctgttagtgagcaagtgtcatatactaaacaggaagatgtatatgctgctattttctatttgttggatcaggctatcacagaattaaataataataggagcaataattgggacggcttaaattcaacaaatgacatctattatggtggagatgtggataaatggatacgtttcgctaatactcttcgtttacgtttagctttacgtatttcgaatgtaaatccagaagaagccaaaaaacaaggtgaggcagctttaaatggtggtgtaatgcaaagtcacgaagaccgactggctcttattcctaagtaccgtaataatccgtctgaaaatcaaaatgtatttgcagaattctttagttggggaagtggatcaacggttctgcttacaaaagagatggaatgggcgtttaaaaatcaagctttaaaagaaggtgctggtaattttacggaggagtttaatacagaagaaagtaaatgttatctggatccacgttgtgaaatgttgtggtttcgtccttcttcatacgctgatttgaatcaagcaattccggagcagtcaaaaaaatcttttaatggagttagaaacggagctttaaatattggaggaagttacttgactacatattcatctgctcgttgttgtgttgcagatgatgcaatggatccaactcatgcgtggtggtataaaggcacggaatatgtatggatgggttatcctgaagctttatttttacaagctgaagctgcattaagaggatggaatggaggatcaatagctcaagctaaacaactttatttagatggagttaaggcttcaatggaatattatcaaatttcatcgtctgattatcagccttatattgatcacttgaacggtttgtctgcttttgatggtacagataaagaggcaattttggaacagattattacgcaaaaatggattgctgtattcccgaatggaaacgaaggatgggctgaagttcgccgtacagattatccacgttatttattggttgtcgaaggtggaaataactctggcggagaaatatatgatacgaaactaattaaacgaattagttatccagatagagaagaagagaatccgaacagacctgatataacacaaggtgatcgcgtttggtgggatgtagctgatacaatggatgacaatggtaaatggcagacgccgcacaatttcagataataacttttaaatgaaaaaagaaagccgttttagcctgttggtgttggttttaaatacattatatggctaaaacggctttttaatcattattttttcttaactttagtcgctgttgatttgcactatcttttaactattataataatatgaaaaattcactatgggtttttatgggtttggcaggtcttacgtgggcttgttccagtcctgtggctcccgtggaagaggatttgacgcagtatgtaaatccttttattgggacggactttaccggaaacacttatccgggtgcacaagtgccttttggcatggttcaactaagcccggacaacggccttccggggtgggacagaatcgcaggctattactatccggatagtaccattgccggatttagtcatacgcatctttcaggaacaggagcaggcgatttgtacgatatttcttttatgccagtgaccctgccatacgtagaggcagaagctcctctaggggtacattccaagttttcacatgagagggaaagtgcatcagtgggctattatcaggtctttttggatgattatggaatcaatgtggaactgacggcgacggagcgttgcggaattcaacgctatactttcccagaagcaaagtcggccattatcctgaacctgaaaaaggcaatgaactgggatgccactcaggacagctatgtggaagtagtagactctgtgactatccgtggataccgtttttcggacggatgggccagaaagcagaaggtgttcttccaaacccgtttctctgttccttttgagaatgtacaaatggatacgactcctatcttgaaggacaatcttcttatgggtactgcatacgttgcccggtttgatttctcgacgaaaaaagatgaacagataattgtttctaccgccatttcaggagtgagtatggaaggtgcagccaagaacctgcaggcagaagttcctgaaaacgattttgacaagtaccggttactggctaaggaaacatggaataaggaattgtcgaagataaaggtagagtcggaagacaaggatgacaagaccgtgttttataccgcactttatcatagtatgctggctcctactatttattcggatgtagacggacaatattacggaccagatcagaaggtacatcaggcagagaattggaccaattacagtacgttctctctttgggatacgttccgtgcatcacatccgctgtttacttatacgcagccggaacggaccaatgatatgattaagtcattcttggcattctatgagcagaatggtcgtttgccggtatggaacttctatggaagtgaaacagacatgatgattggttaccacgcagtgccagttattgtggatgcgtatttgaagggtatcggtgattttgatgccgaaaaggcattggaagcttgtgtagctacggcgaatattgatgagtatagaggcattggcttttataagcaaaagggatatatcccttacaatgtcacagatgaatataattccgagaactggtcgttgtcaagaacactggaatatgcgttcgatgatttttgtatagctgaaatggctgccaagatgggacggaaggacattgcggatactttctatgcccgttcgcagaattaccggaatgtgtacaatccggctacttcttttatgcagcctaaagatgataaaggtaattttatcaaggatttccatgccgaggaatatacgccacatatttgtgaaagcaatgcatggcattatttctggtctgtacagcatgatgtggatggtcttattagtctggtgggaggaaaagaacgctttagcgagaagcttgacagcatgtttacgtatcacccgacggacgaccacgaattgcctatctttagtacaggtatgattggacagtatgcacacggaaatgagccgagccatcatgtggcctatctgtataataaagtcaatcagccttggaaaacgcagcaatatgtgtcgcagattatggatgaactgtatctgaacaccccggctggtttgtgtggaaatgaggattgcggacagatgtcggcatggtatgtgttcagtgctatgggcttttatcctgtaaatcctgtttcaggtgaatatgaaattggaaagccgaaatttaaaaaggttgaattgcagctggcaaatggtaaagtatttactgtggttgcaaagaaccttgataaggaaaataggtacatacgtgctgtgaaattgaacggtaaggactatcatcagagttttattacgcatgggcagattctgtcgggtgcaacattggagctggagatgtgtaatgagtctggacatatatggtattaattgaaaatcttaaacttggaattcgttatgaagaaattagcattgttaattatgataatgtgctttgcccttcacggtaaggccaccaattatgcagattatgtaaatccgctgattggtactcagtctacttatgagttttcttccggaaatacgtatccggctattgcacgtccgtggggtatgaacttctggactcctcagaccgggaagatgggcgacggatggcagtatatgtatactgcgactaaaatcagagggtttaagcagacccatcagcccagcccgtggattaatgactacggtcagttttctattatgccggtggtaggagagccggtgtttgatgaaaacaaacgtgccagctggttttcacataaaggtgaagaagcaaaggcatattattataaggtgtatctggcagaacatgatgtagtgacagagctggttccgactgaacgggctgctctgttccgttttactttccctgaaaatgagcattcttacgtagtgattgatgcgtttgacaagggttcttatgtgaagattgatgcggcaaataaccgtattatcggttattctaccaaaaacagcggtggtgtgcctgataacttcaagaactattttgtaattgaatttgacaagccttttacatacaaggctacagtggccgacagctgtatctctgtaggcaaagctgaacaggaggcaaatcatgcaggagctattatcggtttcgctactcgaaaagatgaaaaggtacacgccagagtggcttcttctttcatcagtcaggcacaggctttagaaaatctgaaggagttgggtaatgacagttttgatgtgttggtagaaaaaggtaaaacagcctggaatgaagcattgggcagaatagaggtagaaggtggtaatcttgaccagtatcgtatgttctattcttgcttgtaccgttcgctgttgttccctcgtaagttctatgagatagatgccaacggacaggtagtgcattacagtccttacaacggacaggtacttccgggatacatgtacacggatacaggtttttgggatacattcagatgtcttttccccttgttgaatttagcttatccgtcaattaataaagagatacaggaaggtcttgtcaatacttacaaagaaagtggattcttccctgaatgggccagtcccggacatcgcggatgtatggtgggcaacaattctgcgtccgtgttagtagatgcttatatgaaaggggtaaaagtggacgacctgaagacattgtatgaaggattgctccatggaacaaagaacgtgcatccggaggtatcttctaccggacgtttgggatatgaatattataataaactaggttacgtgccttgtgatgtgaagatacacgagaatgcagcccgtacactggaatatgcgtatgatgactggtgtatctataaacttgctaaagaactaaagcgcccgaaaaaggaagtcaagctttttgcagagcgtgccatgaactataagaatctgtttgatttggaaaccaaactgatgagaggcaagaaggaaaacggtgaattcatgaagcctttctctccgttgaaatggggggatgccttcactgaaggaaacagctggcactacacttggtcggtattccatgaccctcagggactgattgacctgatgggaggagacaaagcctttgtgtctatgcttgattctgtattctctgtaccgcctgtattcgatgacagctattatggttttgtaatccatgagattcgtgagatgaccgtgatgaacatgggtaactatgcacatggaaaccagcctatccagcacatgatttatctgtacaattatgccaaacagccgtggaaagcgcagtactggttgcgtcaggtgatgaacaagatgtacacaccgactccggatgggtattgtggtgacgaggacaatggacagacttctgcatggtatgtatttacagctttaggattctatccggtatgtccgggaagtaatgaatatgtggtgggtgctcctttgtttaagaaagcgactattcatctggaaaatggaaaggacgtaacgattgaagctccgttgaacagtgaggagaatttgtacatcaaagagatgaaattgaatggaaaatcttatactcataactatttttcacatgaagatttggtgaatggagcgaaaatacaaatagaaatgagtaacttgccgaacgaaaacagaggtatagctgcagaagatgctccttactcgttttcagtggatgagaaataagaaccttcatatattaaatttaaaaccatgaataagaaatcattattgtttgttccggttttgtccttgtgtctggcttcttgtggaagtagccagaaagggcaagagatggaagatttgacacagtttgtagaccctcgtatcggtactggcggacatggacatgtgttttatggagccaatgtgccttacggatttattcagctgggtccgacaagcattcctcagtcatgggactgggtatcgggttatcatgtatcagactctacggtgataggatttccgcatacgcatctgagcggtactggtataggcgacttgcatgacatcaatgtaatgccggtagtaggagaagtgacctattcaagaggagatgcttcatcgtatgaaacgggtctgtggtcttactcagatcgttcgaaagaagttgtgactccgggttattatcgtacccacctgtcaagatacaatgtggatgtagaattgacagcaactaagcgtgtcggcttccataaatacaccttcctgggaaatgaaagtccggccattgtatttgatatggtaaacggtggctgctgggataaaaccacagaagccgtgatacgggtggtaaacgacagcactgtgagtggttatcgctattcaaagggatgggctgacgaccagtgtgtatttttccgtgcagaattctcacgtaagtttgataacgtagaatttattgtcaatgattctgtaaaggaaggtgatatggcaaaaggtgcacagctgtttgccagagtcaactttgctgcgggaaaccaggaaccagtgtatatgaaggtggcattgtctcctacttcagaagaaggtgcacaactgaatatgcagacagaactgagtggttgggactttgagaagacgattgcagatgctaaggctgcttggaataaggaattgaataaggtaaaagtgtataccacagatgaggcttcaaagaagattttctatacaagtctgtatcataccttatttgctccgtctgaattctgtgatgtgaacggtgattattatggagccgataagcagatgcacaaggacgaaggttttgtaaattacactacattctcactgtgggatacctatcgtgcagcacagccgttgatgacaattctgcatcctgaaaagatgagtgacattatcaataccatgcttcacatccatcagcagcaaggaaagcttccggtatggcatttgatggggtgtgaaaccaactgtatggtaggtaatccgggagtaccggtggtggcagatgccattttgaaggacatcaaaggatttgatacagaattggccttcaaggcactgaaagagtcttctatgttgcctgaacgtggaatggaacatcgcattgaatacggatttattccggcagacaagatgacggaagctattgcgtacgatatggaatatgctattgcagattgggcagtggcacaggcagctcagaaacttggcaagcaggaagattatgaatatttcctgaaacgtagcaagtcatataagaattattttgatgcttctacgggcttcatgagaggaaagatgctcgacggctcttggcgtactccgtttagtccttatgcatcttctcatagagaagatgattattgtgaaggaaatgcatggcagtacacatggctggtacctcacgatgtagaaggactggtggaatgcttcggtagtaaagaagtgtttgtgaacaaactggattctttattcctagcaaacggtgatatgggagaagcttcttctccggatattagcggattgattggccagtatgcgcatggtaacgaaccgagtcatcatacagtttacctgtacactcttgtaggtcagccttggaagacggctgacagaatcaaggagattcttcatataatgtatacagaccagccggatggtttgtcaggtaatgaggatgtaggacagatgtcggcttggtatatcctttcttctttcggattctatcaggtagaacctgccggtggcaagtttgtatttggttatccgaactttgataaggtagagataaccgttcctgctggcaaattcgttatagaacgtgaaaacaaaggccaacagaacaattacatacaaggtattgtccttaatggaactgaatataagaaaccctggattgaatacgccgatattatgaaaggcggcgaattgaagttcctgatgggagatgagccggtagtatggtattaaaataaaatgtaagtctgactatatattgggaacccgtcatcgagtttatagtttggtggcgggctttcttttttaagaaaataaaattcataaaggagttaggaagaaatatgaaaatttcttcctaacttgcgctccagaaataattaaccttaaaaaggacagatggaaaagactcttactaaagcaatcaaaactatttgctgttcattgacgggagtgctgacgattagtgggactcctcagcagttgtatgcggaaaatgcatccttgccttattggaaggatattcagactgtatcagtaaatcgggagacaccgaggtcggcttttatgacttatgctgacaagactcaggctttgactggaaaatatgaaaacagcccttattatgagttgttgaatggtacgtggaaattttattatacggactcgtatttgaacctgcctgcagacattacttctccggaagtgagtacagagggatggcacgatattaaggtgccgggaaactgggaagtgcaaggatttggtacggctatttatacgaatcacggatatgagtttcagcctcgtaatcctcagcctcccttgttgccggagaagaatccagtgggagtataccggcgtgatattaccgtaccttcagaatggaaggaccgtgatatttatctccatattgctggagcaaaatcaggatgctatgtatatttgaacggaaaggaagtcggttataatgaagactccaagaacccggctgaatacctgataaatgattatttgaaggaaggcaataatgtgctgactttaaaaatcttccgttggagtacaggctcttatttggaatgtcaggatttttggcgtatcagcggtatagaacgtgacgtattcctttattcgcagccgaaagcttcagtacaggatttccggattgtgtctactttggatgattcgtaccgtaacggtattttccgtttggatgtggagctgaagaatcatcgtaccaatacggctgggttgagtattggatatgagttgctcgataataacggaaaggtagtagccaatggtgaagaaactgtagatgtacttgctggtaaagaaggtaccgtatcattcagcaaggaactgtcggaagtaaaaacctggacttcggaagctcctaatttgtataagcttttgatgactgttaaggaaaatggaaaagtgaccgaagtgattccttataatgtcggattccgtcgcattgaaatcaaagaaattgatcagaaaggtaccaatggaaagaattaccatgtgttgtttatcaacgggcagcctttaaaactgaagggtgtaaatattcacgaacataatccgttgacagggcattatgtagatgaggccctgatgcgtaaggacttggagctgatgaagcggaacaatatcaatacggtacgtttgtgtcattatccgcaagaccgccgtttctatgaactctgtgatgaatatggtatttatgtgtacgatgaggcgaatattgaaagtcatggaatgtattatgatttgcgtaagggtggaaccttgggaaataatccggaatggttgaaacctcatctttaccgtgtggaaaatatgtttgaacggaataagaactatccttcggttacattctggtcgttaggtaatgaggcaggaaacggttacaacttttatgaggcttatttgtgggtaaagcaggccgacaagggactgatggaccgtccggtaaattatgaacgtgctcagtgggaatggaactctgacatgtacgtgccgcaataccccagcgcatcctggctggaatcaataggtcggttaggaagtgaccgtccggtagtgccttcagaatatgcacatgccatgggtaactctaccggaggcttgtgggaccagtggaaggctatctatcggtatcctaatttgcagggaggatatatctgggactgggtagatcagggtattttagtgaaggatgaaaacggaagagagtattgggcatacggaggtgatttcggaaccaacatgccgagtgacggtaatttctgttgtaatggtatcgtgaacccggaccgcaatcctcatccggctatgagcgaagtgaaatatgcgcaccagaatgtggcttttgaagctacagacctggcaaacggtaagtttaatgtactgaaccgtttttatttcacgaacctgaagaaatatatgatttcgtatgaagtgaaggaaaatgataaggtggtgcgtcgtggcaaggtttcactggatgtggctcctcaggaaaagaaagagttggcggtgaatgttagtggattgaaagccaaagtgggtacggaatattttgtgaacttttcagtaactacgttagaatctgaaccgcttgtaccgaaaggatatgagatagcgcacgaacagttccgcttgccgatagatcctgcttcacgttcattctctgtacaggggcccgctttgcagtgcagtgaaaatggcaacttgttgagtgtgcagtcttcacgtgtagcttttgtatttgacaagtcgactggtctggtaacttcttataaagtgaagggaacagaatatttccatgagggatttggtatacagcctaacttctggcgtgctccgaatgacaatgactatggaagccagatgccgaagcgcttgcaaatctggaagcagtccagcaagaatttcaatgtggtagatgcttcattggctatggatggaaaagatgcagtactgaaagtcagctatctgttggctgcaggtaatctgtatattgctacctatcgcattcatccttcaggagtagtgaaagcaaattatacatttacttctacggaaatggaagcagcgaagacagaagcttcggaagctacactgatggctacgttcactcctggaaacgaagcaatccgcaaggaaagttccaaactggtagttccgcgtatcggtgtccgtttccgcttgccagccgaaatggaacaggttacctattttggtcgcggaccggaagagaattattgcgaccggaataatggtacattggtaggtgagtatcaagcgaccgctgaacaaatgtatttcccttatgtacgtccacaagaaaacggacatcataccgatacacgctggttgatgctgaaaaagaaaagtggcaaaggattggctgtgtatgcggatggtacattggaatttaactcactccgtaattctatagaagattttgatggagaggaagctactcatcgtgactaccagtggggtaatcgtgatgcagaagagttgaaacatgatgtaagtaccgctaagaatatcaagcctcgtcatacacatatcaatgatattactcctcgtgatttcgtagaagtctgtctggatatgcgacagatgggtgtaggaggttttgatagttggggagctgtaccagatcctcaatatctgattccagccaataaggaatatcaatggggatttacgattgtaccgatgtaaatgataaaagcataaaataaaaattccgggcttgaaaagacttgttttcaggcccggaatttttattgttcagataagggcataaaaaaaggagttccgctgaactccaaccttttgttaaccttaaatctaatactatgaaaaacacgatgcaaaggtacggactttctggaattatgcaagttttgtgtgcgtttacacgtgttttataacataatttgaagttttgaccgtgtttgaaagacttattaataaaactacaatagcaataagaatcgttctttaaagaacattcatctaaaagtcatgtgttttacatggttctgtaatatgtttttttgttttttgttacagaattaatcaggactttgtatggaattaagtgttagggaacgtcagaaggcattgacggttacactggctatgctatgtatagcatgtgcttgtttgttttatctgggatatagattgtgcatgtattattagtagagtgaaaaaaggtgcgtctggatgattccggacgcacctttttagcaataaaagccgatgaattatttgctttcttttttaaacttgtagacagcaaatgtcatggcacctatttcggtattgagcgtatttccttcaattgaaatgctactttctttaggagtgatgaggttcggattgtcgagcgtattttctgcatccgggttttctgtatgcaaagtgatgctttttccatctcctaaagttacagacttcttcagacctttaaattccaggctgataggctgtgccttttctgacacgttggctactttgacaatgtaagtctgtgtgttttcatcccatacggcactggcgaaaagtccattctggccttcctgaccactaaccggttttttatccatagtcagaggaactacatttgttccggtattgtgaccgtaaagtgactgtacataccagctgcaggtgcgtacagaacggaggttgtcaaaccagattaagtctggacgccactgccagccttctacgtgagccaacagcggagcataagtagccatgtgtactacatctgcgtttctttctactccagtcaggaaagcagcttcaagcaaagaagcgtggaagtggttccatttctttccttttccgtggcaagcatattctcctgcaaatactttcgggcctttacggtcgtaattgtcgtaacggtttcctgatttcaagaaccagtcttccggacgatagaagtgttcgtctaccaagtccactttcagtttcttcatttccggccacaagtaatcgaagtcttttccttcagaattcggaccagatgaaccgataatcttgatttcaggatgtgctttgcggagagcttctacgaataacttcaaacgttcaggatattcaggtccccactgttcgtttccgattccgatgaatttcatgttgaaaggagccggatgtcccatatcggcacggagttttccccatttggtatcagttcctccgttggcaaattcaatcaggtcgagtgcatcctgaatgtagctgtcgaggtcgcatacttgtacatgtgctttcgggtcatcgttctgatactggcaggcaagtccacagttcagtacaggaagtggttctgctcccatgtcttctgacagaaggaacaattcatagaatcccatgccataagtctggaagtaatcagggaagaaacgatgcgggaaagtataatgccatctgttttcattgagcggacggttttctaccgggcctacagagtttttccagttgtaacgggttgccaggtctgtaccttccacgatacatcctccggggaaacggaatactcccggtttggtgtcggccaatgcctgtaccaggtcctttctcaatccgttttcacgtcctttccaagtatctacagggaataaagaaacatgttccaggtctacggtgcccggtgaatcgaggaatattctcaaatgagcttttgcttctgtctgggtcggtgtgaggataacttcatattttttccagtcttttgagttaattgtcaggttttgtgaagtgatgacctgagtttctcccatagacgcattgttgataagttctactcgtattttctggttttctcctcttgcccatacggtaaaacgatatttttcattggctttgagtccgataccgaaaaatccttcgtttgcaatacctgtgcgtttgtgtgcatgtccggggtctaccaggcgtacataatgtgggttgcgttcaaacggaccatcattttgcagagttacatttccaaaaatgtcccatcccataaaactttgagggaactcgaatgaacggttcttgattaattctgcatagagtcccccgtctgctccatagttgatgtcttcgaagaaatggccgtacatggtcggttgaatttctgctccaattttattggcttggataaccatctggttgacattctgtgcttgtaagctgagtcctgttgttagtgcaagcgcagaaagaaaggttaagtgtttgttcatggttttattattaaattaatgtgatacaaatttataaataaacacgagaaattcatggaaaaacagtgaaatatctgtctttatgaaatttaggcataaaattaggagcaatcatttttcctgaggtggacaaattcttctattgggtggacatttgtcttttgagtggatttttatcctctttttcagaaaaagactcgaaaaacggtttacctttgtgtaaaacagaataatttctatgaaaagaaacagcttacttctatacttgcttcttgttttttgcttatgttgcccgaatgggctactctatgcggtacaaaactcttctcgtttctcgttggcttctattacgataaacgatggactgccttataattttgtagatgatatcatcaaatccagtgacggctatttgtgggtggctacgtatggaggaggagtagcccgttatgatggcaatgagtttgtggtttttagtgccagcacaacggataaaaaaagactgttgcgaagtaattttgtggagaaattggcggaggatgcttttcatcgtatttggatggcaggagaagcaggcgtagagctcctttctacagataacttgcaattgttgcctgcagagtctttacagtcggcggaaatggctaagttgatgaagcaaccggtgagtttcttgatgactgccaaatctggtaatttatggttttgtagccgtggacagatttataaggtaatatttaatagtacaggtactgtgaaaaaagtgattcggatttcagatactccgatacatgagcgtggctgtgtgttgtatgaaattgacggatatatctggttctttcatcaggggaaaatgtgccggattagcgagagcgtggaaaaaagtcaggagccacagcccgtatctgtttctttgaatatttcttcttttgaatcggtattttgtatttatcattgtaagaacaatgtgtggattggtacaagtaatggattgtattgttatgatttgactacagacactagtgtgcatcatgtacataatgctcaaaatccttcttccttatcgcagaattatgtgacatccattatttctacacgagatgatcaagtgatagttggtacgttgttaggattgaatgtatttaatgcttctgcttctgattttactcgtatccaggcaagtgagggcatggagatgcacggcttgtcttgtaattttatcaataccctttatgcggatgatgaaaatgatattgtgtgggttggaactgaaataggaggaataagcaaaatgttttcttcccgtttgtctgtagtgaattattatcatcagcagaatctttcgggcagtttgtcacataatccggtcaattcgatagtggaagatgagtatcagacactttgggtaggtaccgtagaagggggattaaactgccgtttgaaggggagcgattctttcttgcattataccactgaaacaccagccagtttggcacataatactgtaagtgtattgatgttaggtgatgaggaccgtttgtatgtaggtacctggggcggtggacttggctggattaatcgtaaaccatctgcttctaaacgttatatgcccgttccgttgaatgatccttttgtgtcaagtttggcttttgaccctgtgagtcatttactttggattggtacaatgaataatgtgtatgtatataatccggctgatggaagtatttcagagcctttcttgaatgaaagtaaagaaattatcaatcagaatgcattaggaatgtgtattactcgcgaacgggaactttggatttcttctccgtttggtcttttaagagtaaatctttctgcatacgaaaagggacaattgaaatacaagaagtatgtctatcaattggatagtcctgattccggacatcgggaacgtatcacttctatttttcaggcaaaagatgggactatctggttaggaagtaacggaaatggattttataaagcattgaaaaaaggaaatgattaccaatttcaagcttatacgaagaatgatggtttggtgagcaatagtgtacgaggtatcttggaagactggtacggcaatatttgggtatctacggataatggtttgtcatgctttaatgtgaaagaagagtcatttcgcaattatagtcagattgacggtctaatctctgatcagttttattggaatgccggagctttgtcgtttgacaaggaacgtttgttctttggtagtcagaaagggctgacggagatacatccgatgattgaagctgagcatcagcgtaagttccctttggcttttactcactgtagagtgtttggacaggaagtcttccctcagtctggggaaatagtcatgcatgaaagtgacaagtcgttatcaatagagttttcggcacttgattatgctttagaatctcaggcgcaatattcatatcgtttaaaagggtttgatgacgcatgggtgactgtaccatctaatcgaaataatgcgacttataccaatctatatccaggaaaatatgttttccagcttcgatatgctcctgatggcaaacactggcttgcgcatacagaggaattggttatcgtagtgcgtccttatttctataagaccccctggttcctgctttctgtcttgtttattatcctgtttggtggttatcgtatcctgaggtggcgttatcaggctatgaagcgccagcaagatttattgcatcagatggtggaagaacgtacttctgagttggaggagcaaaagaaactgctttccaatcagacgcatgagctttcggaacagaatcagttactgaaagatcagaatgagaaaatcactacgcaaaagaatcagattttagagatgtcgcgtaaggtagaagagctgaccattgacaaactggcattttttaccaatattacacatgaattccggactccattgacgttgattgtcggtcctatcgaacgcgctttgaaattgagctataatccacaggtaatagaacagttgcatctggtagagcgtaattcaaaatatcttctttcgctggttaatcagttgatggatttccggaaagtggaggaaggacgtatcaaaattgccactaattatgggaatctgagagaatttatggccgagattgtgccaccttttgcagattatgcgaagaatcgtggcattgaccttcagctgtatcttcgccttgccgatccgattctgatgttcgatgaggatgtgatgcgtaagattatgacaaatttaatcagtaatgctctgaagtttactccaaagggagggaaggtgggcatatatgtaggagttattggcaaagaaaatgagaagaagctgttcattagtgttcgtgatacgggaaagggtattcctgagaatgatatggagcgtattttcatgcagttctatcaatccgataaccgaagccttgagtcggtcagtggtcagagtggtaccggcataggtttgtatttatgccggaagctgatagatatgttagacggtaagatttatgcgaagaataatccggtgaaaggagcctcattccgcattctcttgccagctttatatggtgagactcaatcccagccggattcttctgagatagaaaaagaagataccgtgatagatgtgcctcgtaatggaaagatggttgtactggtagtagaagacaataaagatatgcgcgattatatccgttctatcttagctgaatattataatgtgttggaggctgctcagggagaagaggccctgaatatattgcattctaataatgtggactttattattagtgacctgatgatgccggttatggatggtatggaattatctcgtcgtgtaaagaatgacttctccatatctcatattcctttcttgatgttgacagccaaaacttctgacgaagcacgtttggaaagttataaaatgggtgcagacgcattcttactgaagcctttcgatgagaatatgttgttggcccgtatttccaatatattggagaatcgaagacgtttccaacaaaagttctcaattgatatgaatactgattcgttggaggtggatgagaattctggtgataagaagttcctgaacaaagcaatgtcagttgtaaaagaaaattataagaatccggactttgaggtgagtgattttatagaggcagttggcatcagcaagagtttgttgaataaaaaaatgcagagcctgacaggacaatctgctggccagttcattcgcaattatcgtttgaatctggctcgtgaacttctgttgaagaataaggtaacccgtacaatgaatatttctgagattgcatacgaagtcggatttaatgacccgaaatattttactcgttgttttacaaagcattttaacgtaactccgagtagtttgttagaagattgagcattaatcttatttctttgtcttagtcg

SEQ ID NO: 3792 - DNA, 44489 bp, Unknown
  gut microbiota DNA sequence
acataattcatctactgtcgtccatacccaattattgggcatctcaaatgatacgttctcataatggggcgtatcggaagtttttattaggtgtagtgttgataaatgttattgaaatgtaaaaaatgagtttgatattttgaatcattcgggtaagtttattataaattaaagaatctcttttgtagcatttttttatattgtattcaaacttataggcgatattgatgccacaaaaaaacggattcacccgctgaaatccagcacggtgaatccgttttctatatagataaagaataagtttattccttgtctttcaatgcgtcaaaaatcagtttttccagttcgtcggccagttccggattatcctggatgcactgtttggccgcatcacgtccttgacctaatttggtgtcgttgtagctgtaccatgaaccactcttcttgatgatgcctaattcagctcccaagtcgataatttcaccgctgcgagagataccttcaccgaacatgatgtcgaattcggctttgcggaaaggaggagctaccttgttctttacaactttgacacgtacctggttaccgatgacttcttcgccgtctttcagctgagtagcgcgacggatgtccagacggacagaagcatagaacttcagggcgttaccaccagtggtagtttcggggttaccgaacatcacaccgatcttctcacgcaactggttgatgaagatacaagtggtgttggtcttgctgatggcagaagtcagcttacgcagtgcctgtgacatcaggcgggcttgcaagcctaccttgttgtcgcccatgtcgccttcgatttcagctttcggggtaagggcagctacagagtcgatgacaatgatgtcgatggccgatgaacggatcagctgttcggcgatttccagcgcctgttcaccgttgtcgggctgtgaaatccacaagttgtcgatgtccactcctaacttggcagcatagaaacggtcgaatgcatgctcagcatcgatgaaagcagcgataccgcctgctctctgtgcttcagcaatggcatgaatggccagtgtggtcttaccagatgattccggaccgtagatttcgatgatacgtcctttcggataaccgcctacaccgagtgcggcgttcaaggcgatagaaccggtcgggatgacttctacttcctgcacgtggtcgtcgcccattttcatgatagagccttttccaaagctcttttcaatcttgtccatggcggcctgcagggctttcagcttttcgctgttattgggtttcggggcattttcaatgccaccttcaaactctaattcgtctttttttgccataaattactgtaagatttgtgaggcatgatctttggtctttacttctttaggagaaataatccgttcgataatgccttcttcgttaatgatgaaagtggtacggaaggtacccatgtatttgcgtccgtacatgcttttttctccccatacaccgaaagtctctaccagcttgtgttccgtatcggcaatcagtgtgaacggaagctggttcttttcgatgaatttctggtgtgacttctcgtcgttgatgctgacgccgattacttcgtaacccgcttgcttgagttcggcatagttgtcgcgaaggttgcaagcctgtgccgtacagccggaagtcatgtctttagggtaaaaatagagtacgatttttttgcctgcataattgctcaggcggatttcttcacctttttcgttgattcccagtatttcgggagctttgtctccaatattcatatcgtaagggaaatttttagaaaaaaagaatcaggaacgaagaatgagtactccttcttcattcttgattctttttatggttaaggtaatgtgattacagttctaggtcaccgtcgaatacttcatgccaaggcaatccgtatttgttcaaagcttccatgaatggatccggatcgaattcttctacattccatacacccggacgcttccacaagcctttcaggaacatcatggcaccaatcatggccggtacaccggtggtgtagcttacgccctgcatgcctgtttcctgataagctgcctggtgagagcagttgttgtatacataataagtatgttcttttccgtctttgataccacggatacggcaaccgattgaagtttcgccttcgtagttttcgccaaggtcttgcgggttaggcagcacggctttcaggaactgcaaaggaacgatttccataccgttgtagttgataggttcgatgctggccataccgatgttctggattacacgcaagtgagtcaggtattcctgtccgaaagtcatccagaaacgggcacgcttgatggtcgggaaattcttgacaagtgattccagttcttcgtgatacagaagataagaatcacgcggaccgatgttaggataagtcaggtctttgtggaattccagcggctgggtagtaacccattgtccgttttcgtaataacgtccgttctgtgtgatttcgcggatgttgatttccggattgaagttggtagcgaaagccttgtggtgatttccggcattgcagtctacgatgtccaggtagtggatttcatcgaaatgatgttttgctgcgtatgcggtgtatactccacttactcccgggtcgaatccgcagcccagaatggcagtcagtccggcatcttcaaagcgttttttgtatgcccactgccagctgtattcaaagtgtgcctcgtctttaggctcgtagtttgctgtatccaggtagttcactcccgcctgaagacacgcttccataatcgttaaatcctggtagggaagtgctacgttaataacgatttcgggtttaaaactgttgaataaagacacaagttcatccacattgtcggcatctaccttagcggtcttgatgttggggttaccaattgctttgacaattgcgtcgcattttgactgtgtgcggctggcaatcatgatttcagaaaagacttccggatgctgagccactttgtgtgcaacaacggtacctacaccgcctgcaccgataatcaatactttactcatttattactttgaaactttaaatgcccggtaaacgttaccgttcagtatgcaaagatagaaaataattcaaaatatggtgcagtattctggggatatacgtatttttgtaaatgaacaattcttaaaaatggattgtttgtgaatttgtgattaagattaaaaaggaaaaacaagttatgaataagaagtattttgcagctgcagctttggcttgcgcactgatgagttgtggaaccggaaagaattcggtagcagtagtagactttacaggggaatggaatattgtagaagtgaacggagaaaaggtgagtgcggaaaatgcaccattcttgggctttgacaaggacggacaccgtttatatggtaatgctggatgcaatcgcctgatgggaagctttgagttggataccctgaatgccggaaaagtgaaatttggtcaggtggctgctacccggatgatgtgtccggatatgacgttggagcagaatgtgctggaagcattgaataaagtggctggatatgaaacagtaggtgaagatgtagcactgaacgatgcggaaggtaaaccggtaatattgttgcagaagcgtgaagtggcagaagtatctgtaaacgacctgaatggtgcctgggaaattgtttctgtaaaaggtaatcctgtgagggaagtggaaaaacagccgcaattggtttttaatgtagctgaaaaaagagtacacggtaatgccagttgcaatacgataaacggttctttcacacaggaagaaggacaggctgcttctctccgtttcagtcagatgatttctaccatgatggcatgcccgaacatggatgtggagtcttctatcttgaaagctttggatgaagtacgtagctttgaaatcaaggcagacggaaccgtaagccttttgggagcagacggagcagaagtattgtcattgaagaagctggccgaaacagaagctgaagcttgataaatctgccggctgtagtataaggtccgaggaaaaatattatctttgcagaaagaagcataaaccttataataatatgactaaaaaaatacttttgttgggttccggggaactcggaaaggaatttaccattgctgcccagcgtttgggacagtatgtaattgcgtgtgactcttatgctggtgcaccggctatgcaggtggcagatgcatgcgaggtattcagtatgttggatggagaagctttggaccgtgtggtagaaaagtatcgtccggatataattgttcctgaaatagaagcaattcgtactgaacggctttatcacctggaaaaagaaggtatacaggttgtaccaagtgcccgtgcggtgaattttacgatgaaccgtaaggctatccgtgatttggcagcgaaggaactgggactgaagacggcaaagtatttttacgcttcttcttatgaagaactgaaggaagctgccggaaagattggctatccttgtgtcatcaagccgttgatgtcttcttcaggtaagggacagtctgttgccaagagtgaggaagacttaaagtattcttgggaatacggatgcagcggaagccgtggggatattaaggaactcattgtagaagagttcattcactttgacagtgagattaccctgctgaccgtgacacagaagaatggtcctaccttgttctgtcctcctatcggacacgttcagaaaggtggtgactaccgtgaaagtttccagccggctcatatcgcaccggaacatctggctgaggctcagcaaatggcagagaaggtgactcgtgctttgacgggctatggcttgtggggagtagaattcttcctgagccacgaaaacggagtttatttctctgagttgtctcctcgtccacacgatacaggaatggttacactggccaatacacaaaacttgaacgagtttgagctgcatttatatgcagtgttgggactcccgattccaggtattacacaggaacatatcggagctagtgccgtaattctttctcctgtttccagccaaaaggcaccgcagtatagaggagaggaacttgtttgctctcagcctaatacttatctccgtattttcggaaaacctgctacccgcttgaatcgtcgtatgggagtggtggtttgctatgacaagaatgacggtgatttggatgcactgcgtgataagtgtaagtcactggctgccaaggtagaagtatattgagaattgatttatgtcatgaaaattgcataaataaacgaaaaacttcattgctatgttttagaaatatgttttaaatacatatatttgcgctcgcaaaattaaactaaacataaatggcagaaaacaaaacagtgaagtatcatattcctcacagagggatatatatgtattctcatgtatacgaaggaaaaactgaaatgattgtgctgaatagcactggttcagaacaaattctggatagtgagtgctatactgtcttaactaaggattctaaagaaggtagagatgtttcgagcgggaaaaagattgacttgacaaagaatttggtaatttctcctcgtaaatcattgattattgaattctgagaaatgtttataaataaggagactgtcgtgatgctgaatcggacagtctccttgtttttataccatatcgtctcctgctttggtgtatttcacgcgaattgtcttatggaacggtatgaaacgtgaaacaatggctatgaccagtgagatgacaaacagatagcctaatatgtgcttgagcgaaagcagaaggctttgctgctgtagagtggcatagagtgtctgggtagccatttgtgtagcttctgtatattcgtgcccttgtgccagatgctgtgtgagggactgattgaactggctggcagccaacgggtcggtctgactgattgtttcggatagggagtacatgtatttttgttccagccgatagagggtattgctgtaaaaagaggtcgccagaatgggggctagtactgaacggaagcaaatcaggaaaaaggcattggccagcaggaatttaggattcagctcctctacggcgaacagggcaaaggctatgatgagtaccagcatgcctaatcctcttaagaatacaggaagaaaaagcatctcgtatgtgctttcaggagaaaccgtgaaatacaatattccgaaaaaggctgcaaagcaactcatgcctccggctatcagaaagcggaaacgccagcgctgccagcggaaccaccagaagcagatgaatgctcccaatgcatatcccggcaacagatagatgtaaagctggtacgtgtgtgtactgtccaccttcagaatgctggtcatataattggtcagcagggtggtggaggtactgaaaaacatgaccagcatcatgtagaagtaacctacgatggcttttggctggtacaatggagctaggcttacatacggctgcttggagtgatattgtttccagatgaagaacgcaattaagatgggagcgatgaccagatagatccggatcttaaaggaagacgtccagtcgagtactttcccatagttgatgacgtacatcagcatcagcaatccggtggcaatgacaagcatttcccgaatgtgcagttccgaaagtcggatgggtttaagcggacggttatgacggaaacagacgatgacaatcaggatggatgccatgagcatcatcatcatgaagtaatacatgtattgccagttgtagtgataggccagctcagcggtcacaatcatggacacttgtcctccggcaaatactaacgggtagaaataggagtagaactcacttcgtacatttttcgggctgaaaatcttagtcgctcttcggatgaaccaaagcatgagaaatcctttcagaaagccgataaagaaactgcagatgatgaccaggtcaatgttttgcgaacgggcacatacccagctgagcaggaactgtatgctcaggtcggtcagtagcagaaacttggacgaaagggcatcaagtaccttgggtacaatggggtaggctatggccatcccggcagaagcggcatagtatcccatggtgatgtcttctgtattggttcccagtgtactggatacttcgagcatactgccggtgtaggagccgttcagcatggttacgggaaggatgatgaagaagatacatatcatccccaaccagtcgggaacccattgacgtacggggacgtcgagttgtttcatggtcatcatttgcgtaaggcttcagtttctaccatcattccggctctcagactgctcatttcttccggagttatgtctttcaggtcaattcttacggggatacgttgctgtactttgacaaagtttccggcagaattgtcggtaggaaccagcgaatatttggagccggtggcttccgaaatggccgttacagtgccgtgaaagacttttccagggagggcgtctaccttgatgcgtacttcttgtccgatgtaaatgtggataatctgtgtttccttgtaattggctgtcacccatttatccgtattccgaactagatacgagatggtttgtcctgcctgtacatattgaccgggttccagggttcggcgtcccatataaccgtcatacggagctgtcagtacggtatatgacaaattaagacgggtcaaatccaggctggcttccttgctcaagatggctgcttctgcgctggtggttcgtcgggtagtttccgtgaactgcgattgagccgcttttcgctgttctaacaatgcctgatagcgggcctgggctgcttcgtaagacgctttggcctgctcatactgctgttcgggcacagattcctctttgagcagtctggcaaaacggcggtagtcctgctccagctgccacaatttggctttcgcttcggcaatattggcatcttgcacggcgatgttggtttgtgaagtctctatgccggaatgaagtacctctttggaaccttttacatccagcagggcagcttccgcctctttcacctttatctgatactcacggttgtccagtatcagcagtgtatctccctggtgtacatactgatgttctttgaagcgtacttccttgatgtagccggaggcacggatgttcagcggacttacgtactggtcaataaaggcgtcgttcgtaatttcataatgaatgtatttccaaaagtaattggccacccatatcagtccggagccggcaatcagaatacatagaaagttgagcaggatgttctgcagtcttcttttccggagtttcttgtgtgtatcttgtagcgtcatattctttatagtttagtgaagttataatcttccgcaagctttttgcagctggtagtaggtgtaaatgattctggtgcgtgaagaagtcagttgtagttcggcattgagcaacacggaattggcatccagcaggtcggtgagtatggccagctggttcatgtaacggttttgcatgatgcggtagttttcctgtgcctggcggaccgacaattcccaggcttcttcttcctgcaaggcttccttgtggcgcaggatggcgttgtaaatatccatctgcagctgttgttttttcagttcttcttcttttttctgtacggcaacctgaagctggctttccttgattttgtgtccgttcttgaataaggaagagagcggatacgacacggaaagtccgatattccagttattgttgtataagtcggtcatggtccgcgtgatggggcgggccagggtgttcgacgcatacaggttgatgttcggcctgcgtgaggcacggtctatctctatctggttctgggccagttcagtttccttgcgtagcagctgcatgtctggtgcctgctcgtaggctgacaggaggtagtcgtcgtagctgtccagcggggtagcttgctgaagcagtgtcgcgtcgggcgtaataatcgggttacggtcgtttcctaacaacaggttcagttgctgcgacacgatgtgaatgctgttttccgtttcctgcaaagacagccggtcattggtcagttgcatttcgctgcgcaatacgtcattgttggtgataagtccctctttcttcatttgacgtatatcttgcagacgacgttcggattcttcgatgttacgggtaagtacaagatgctgtttgaataaggtgaaaagcgtcaggtactggttgagtaatcccaatttgatgtcggcctgattcgtcatccgttgcagtctggctatttcggtttcaatgtctgccttctggatggaacggcggatttttcctccctgataaagcggctggttaaagtcgaccgtataattctgcgaccagtccggagtatcagggtaggtggggttggaaagcccgttctgaaagaccacgggctgaccgatgatgcctcctttcagccctatttccaaatcaggaagcaggccggttttggcatacaatttccgttcataagccattctttctttcaggctgtcactctgcaattgcaggctgcttttgatgcccgattcgaacagttgttcgaccgacaagaataaagagtcctgctgtgcctgtgcggaaacagcccaaaacagactacctgtaaaaatcagttttcgtatgatgttagaaaccttcaaggacattttgtactgtttttaattcagataatatctttgccgttcgttcggtagacaatatttcttctgcattggcgtataccagattaagaatcgggcgaatctggactttaagtgcttccccttcaggagtgaggtacaccagtttgttgcgtcggtcgttcgtatcctctttccggtagacatatcccttcttttccaggttgttcatcagattggtcaggcaggctttgtccttggctgtacgttcagccagtgcctgttgggtaatgccctgttcatgccagagactgcttaaaacttgaagcatttcgaaggtgatgccagcattattatcttttagggtgcgttgcatggcgcgtcgaaaggccatgcgagtgcggaaaatttgtatcatgagttcccggaactcgtttccttctttcattttatgaggtgattttttagttatccggctacaaatatagctccttttttttgaagtagtaaaatatttgactattttgtagggagaaacctgtgctttcatttgaaagcggagggggaaattctcagtacttccgaaggagtactccagtactttcaaggaagtactcgaatactttcggggaagtacttcagtactgcctaagaagtactgaaaagtaacaataggtttataatgagtgtgttagaatttcaggtaaccgttctcttgccggatgatttcctcggaaactaagtaggataccactttaatcaggtggttttcagttacttgcattttgtcctttatctcttgcaacgaaagcggattttctttcagtaatgcttgcaattgctgactgatggcttcaaactctcccgactttaggccggactgatgttgctgcaggcatacgtcacattgcccgcaattgtgctcgttcttttcaccgaaatagcgtaacagcatccggcttcggcagcggttctcgctttctgcatattctatcatggcgttgatacgctgcacatagctttcttttctgtcttcgtagacttccttacttaaataaacgcgttccgtttcttgtctttcgcgcgtatagataatgtaaggtgtcttttttgcggggatataatgcaggatatgctgccggctcagcgagagcagggtttcatagatttgttgtttgctcagtcccgaacgggtcgacagattgtcttcactgaaataagcatagtccgtgaaaagcccggtgtaggttctcagtaggatacgaagcagtttctctgtgtcttcgctttgttcgcggatgcggtacagttcttccttggtgatggtgaacatgatgcgcgaagcattatcttgctcatcggtatattccagatagcctgcgcgagtcaggattttcaaggcactgtcggtctgtacgggaaagtgcctgaagttacggcagaattcatcgatattgaacgcgaaggtgcagcctcttccgtctcccatggccatttggtaatagaagttgatgtcttcgtaaatttttcggatataacttttctcgggaaatgtatcgcttacccgctgtttgagtgtgattttatcgcgggcacagaacagcagtacggcataggctttcatgccgtctcttccagctcgtccggcttcctgaaagtaggcttcgggcgagtcgggcacatcggcatggataaccacgcgtacgtctggtttgtcaattcccataccaaaggcattggtggctaccattacacggaattctcctttcagccaggctttttgtcgggaatctttggtctcgtcgttgagtccggcatgataaaaagtggctgtgatgtggttgcggttcaggaactgggaaatctctttcgtctttttccggttgcgggtatagacaattcccgacccgtcgacgcgttgcaggatgtggagcagttcgctttccttgtcttccgtatgacgtaccacgtaggccaggttcttccgttcaaagctcatgcggaacacattttcctggcggaactgaaggcgttgctggatgtcgctgaccacttccggagtggcagtggccgtcagtgcgatgacgggaacttccgggagtagctgacgtatatccgctattttcaggtaagcagggcggaagtcgtatccccattgcgagatgcagtgtgactcatccacggtgatgaggctgacgtgcatgctgcggagtttgatttgaaagatttcggtgtccagtctttccggagatacataaaggaatttgtagttgccgaagatgcagttctccaatgcgatgacaatctcttcgcgcgtcatgccggaatagatggcggttgctttgatgccccgttcgcgcaggtttctcacctggtctttcatcagggcaatcagaggggtaatgaccaggcataacccttcttgggcgagggcgggcacttgaaaggtgatggatttaccacctcctgtgggcatgagtcccaatgtgtcccggccttcgcctatgctgcggataatgtcttcctgtatgcctcggaaattgtcatatccccagtattgtttcaggatttttcggtagtcagtcatgagtcgctaacttcgactgggcttgatgtcttctatctgtagttggatttctccccgcttatgggtattttcctcaatggtataacagatattgaacgactgtttggtcttgatgtaacgcacctgtgaactttgtccgaaagcgataccgttcatgacgttgttcgacttgttgtccaccagttccagtttgatgtgttcctggtctcttcctaccaccttgctggtaccataatcgtacacattcaaggttgcgaaaacaggcttgtggttctctggaccaaatgggttgaacttcttcaggtcgaagaaaaacttcggagtaatgtctctgaagtccagttgtgcatcaatctggatggtagcgttggtctgctccggaagaatgtggttggttacgtattcttcaaaccgtctggtaaattccggcacattttccaccttcatggataaaccggccgcataggtatgcccgccaaaattctccagtaggtcacggcaatgttctatggctttgtatacatcgaagccggaaacagaacgtgctgatcccgtagccaggttctcggtacgtgtcaagaccacggcaggacggtagtagatttccgtcagacgcgaagcgacaattccgatgactcccttgtgccagtcctcattgaaaatcacgatagatcttctttcagacaagtcggacaggttatccacgattttattggcctcttctgtcatgttcttgtcgaggtccttacgcgtttcgttgtagctgttgatgcggttgctctttttcaatgcagacgcaaaatccttttcaatcagcaagtcgaccgcttcctttccgttttgtattcttcccgaagcattgatgcggggacctatcttgaatacgatgtcactcatcgtaatttctttttcagccagtccgcatacatcaataatggctttcaggccgatgctgggattagcattgagctgacgcagtccgtgataggccaaaatacggttttctcccataataggtacaatgtcggatgcgatgctgactgctaccaaatcgagcaggggagtaagctgatgaaactcaatgccgttgttctgggcaaaagcttgcataaacttgaatcctactccgcaaccagacaggtgttcgtatggatacgtagaatccggacgcttggcattcagaatggcggcagcaggaggaagtacctcatcgggtacatgatggtcgcagataatgaaatcgatgcctttttctttggcgtaactgatttcttctaccgccttgataccacagtccagtacgatgaccagttttactccggtagagtaagcatagtcgactcccttttttgacacaccatacccttcattatatcggtcggggatataataatcgatgttcgagtagaactgttgaagaaatttgaaaacaagggcgacagccgtagtgccgtccacgtcataatctccatacaccaggatacgctcttttcgtcccatggccaggtttaggcgttccactgccacgtccatgtcgttcattaggaacgggtcatggaggtcattaagctgaggtcggaaaaaccgtttggcctctgcggcagaatggatacctctttcctgcagtagcttacataaaataggactgatgccaatctctctggagagggctctggcagcttctctttcttgaagtgttggaggttgatagttccatttgtagttcatttatatatgttttttcttttttttcttttcgggtgggggttcgccaatctgccggttgtaagcctgtacgactttgttgcagtaaccaaatcggcaaaacttgtaattggataaaatcttcttatccacttcaatccgtaaaattagtaaaaagaaagaaaaaagcggctcattccatcttaaatttatggaacgagccgctttttatttataattagtctatataataggaccttagaatcctaatttttttgcgatgtgtgcagggattgctttcttgttcaccagtatgttcatggttttgtatttggcaaaagctttagatgcataccagatacctttgtacttgccgcttaatccccatgagtttttcaccatgtagtattctttgccgttctggtctttagcgataccgtagataagcattccgtggtcatcggtagtttcccagttgtcgaatgctacctgacgcatttcctgagtcacttcaatttcaggaagcggtttgctggtcagttccttgcgcttgtctgctttgctcaagcccagccagtgtgccatatctgaaccagtcagttcggctcctttttctgcattcggacatacggcaataccgtcgcgggtaaatccttcttcgctgacatcagctccccatgcgaaagtatatccgttgttgatggcattgtccatcacttccatcagttcatcgataggcaagttgtaagacaatgcgttgcgccagttgtcctgtacctcgatgctgaaggtctggtagaaaggatgatgtgtgtaagaagtcagtgatacatagtcgttcatattcagtccaagcacttcatctgcaaatgttctcggagtgtaagtctttcctttgtaggtaaattcttttggacattctcccaggtaagtatcgtaaatggctgtgacgccttttttccataccggactcagtttgctctgattgccttttccaatagcttgtacgtatgctccagctaccgcatccagctcattgtggttaggcagtgagtcaccgtattcgatacccggcattacgtcctgaggaaccataccgtaattcttgtagcagaaaacgatgtcttcaaagcttccgcccggtgagaacgaagcatctccgtgatagcgtacataatttaccgcacggtcttccatggttttgtgcactacaaacatttcagaaaggtcaaactctccttttccttcacgcagcaattctgattccagaaatccaaggctggagaatgaccagcatgtacttgaacgattctggttctttatggaagtaatagggttttcttttacggttgtaaatacgaatccttcttcagctttgtctttcttcggattttttgcatagatgttaccaaagcaaagtcctgcaacagctactaaaattagtttgttcattgttttgatctttatggttatagggttaataaatacgtaattattcattcatgatggcttctacctcatcaaacgtgatggggatacgtttttcgcccaagaatctggaaccgttttcggtaattagaatgtcatcttccaggcggatacctccgaagtccttgtatttttcaatttcgtcgaaattcaagaaattggtgtgtagtttttctgccttccatttatcaatcaaggcagggataaagtagcatcccggttcatcggtaatgacaaaacccttctggagttttcttcccatacggagcgaagccagtccgaactgagtggatggttgcacttcttcgtcatagcccacgtagcactggcctaagtcttccatatcgtgtacgtccagtcccatcatgtgtcccaatccgtgcggcaggaataaggcgtgagcacctgcagctacagcttcatcggtatttcctttcatcaagcccagtcctttcagcccttctgtaagtaccttacatacttccaggtgtaccgacttgtatgtcactcctggtcgtgccagttccagtgccttgtcatggcaggcaagtacgatgccgtagatgtcacgctggcgaccagtaaattttcctcctacagggattgtacgggtatggtctgaacagtaataattcatcagttcggctcctgcatccgtcagcattagtctgccttcttgcaagatgtgactgtggtcgtgattgtgcagggtctgtccgttttgtgtaaggatagtggcaaatgaaaccattcgtccgtaagaggaagcgatgccgtcaagcactccggctatgtattgttcggatactcccggtttgcacagacgcatggcagctgtatgcatttcatatcctacgttgcaggccttgtcaatttccgcgatttcacattcttcttttactgaacgcaacgatacgactgccttaatcagttcaagagaagcatgtttcttggtcatggatgcccggatacctgtcaaatcttccagtagcatcatgttgtcataacgatagggagggaggaagtggatttttcttcgctgggcgatggcttttcccacaaattccttcaacatgtcgaaaggatagctcttctcgactcccacctgtgcggccagttcttttacactgggctgcggacccatccagatgatgtcgtccatgtcgacgtcgttgccaaagaaataatctttgtcattatctatgtcgatgatgccggcataacctgggtgtgaatgtccgaagaaatagacaaaagaactgtcttgtctgaacttgtatgtgttgtcgggatagttggccggtgcttcattatttcctaaaataagaatgataccgttgctcatcttttcccgcagcgctttccgacgtttttgataagtaagagaatcaaacatagttatttctttttgatgtaatgtttgtgaaaataatgttgcaaatgtagtaaataaaatagaaaaaatggctgcggtgtaatggaaaaacatatatttgcaattaccaagattactttaaaaactgaggtcgtatgaatctggatttgcaaaaaacagggttggttctcgaaggaggaggtatgcgaggggtgtttacttgtggagtcttggatttcatgatggatcaccacatgcagttcccttatgtgataggtgtgtcagcaggagcttgtaatggattgtcgtatatgtcccatcagcgagggcgggcaaagtttagcaacatcgatatgctggcagaatatcattatatcggtttgaaatacctctggtatcagcatagtattctggatcagcatttgctttatgacttgtttcccaccaagattcttccctacgattttcaagcctattttaataatcctgcccgttttgaaatggtaacgaccaattgcgtgacgggaagggcttgttatctggaagagaaagaaaaccgggatggctggagattggtggatattgccaaagcttcaagcagtcttccgtatgtctgtccgattacatacgtagacgggcgtccgatgctcgatggaggtattgttgattctatacctgtcttgcgggccatgagtcagggctatgaaaagaatgtagtagttctcactcgtaacagaggctatcgtaagactgaaaaagatattcgggttccccggtttatttatcgccgttatcctcggctgaggttagtgcttagccgacgctgtgcggtgtacaatgagcagttggaaatggttgagaagttagaagatgaaggacgtatcatagcgattcggccggaaaagaaagtggtggtgaatcgtatcgagaaggatatcaagaagctgactgaattatatgaagaaggatatgcctgtgcggagagagtgttgacaccctatttgaaagtatagggcataaaaaaatccggaatgaacttccggatttttttattatttattttgcgaagctgactgcgcgggtttcacggataaccgtaatcttaacttgtcccggataagtcatttcgtcctgaatcttcttggcgatttcagttgataagctttctgtctgtttatcgtcaatcttgtcggcaccgacaatgacacgcaactcacgaccagcctggatagcgtaagtcttggttacacccggataagacatagccaattgttcgaggtcattcagacgtttgatgtaagcctctacaatttcccggcgtgctcccggacgtgcaccagagatagcgtcacatacttgtacgataggagccagaaggctggtcatttctacttcgtcgtggtgtgcaccaatggcattgcagatatctgctttttctttgtacttttcagccaatttcatgcccaacagtgcgtgtggcaattccggttcttcatcgggcaccttaccaatatcatgtagcagtccggcacgttttgcttttttcgggttcagacctaattcagaagccattactgcgcacaagttagctgtctcacgtgcatgctgcaaaagattttgtccgtatgaagagcggtatttcattttaccgataatacgaatcagttcaggatgcaatccgtggatacccaggtcgattgtagtacgtttacctgtttcaatgatttcgtcttccacttgcttgcgtacttttgcaaccacttcttcaatacgtgccgggtgaatacgaccgtcagttaccagctgatgcaaagccagacgtgcaatttcgcggcgtaccgggtcaaaggctgaaagtacgattgcttccggtgtgtcatccactacaatctctacacctgtagcggcttccagtgcgcggatattacgtccttcacgtccgatgatgcgtcctttgatttcatccgattcaatgtggaatacagtgacagagttttcaatggcagtttcagtagccactctctgaatagactgaattacgatacgtttcgcttcacggtttgcggtaagcttggcatcgtccatgatgtcattgatgtaagactgcgcttgtgtcttcgcttcttccttcagtgattccaccaagcgttcttttgcttcttcagctgacaggcctgagattgtttccagtttttctctttcctgtgcctgaaggttatctaattcctctttcttcttttcaataattaccagctgagcatccagattttctttgatcgcttctgtttcattgcgtttacgctgaagttcttcgttcttctggttgagcaccatttcgcgttgctttaacttattctcagcttgctggattttctgattacgctgggcaacctctttttccaaatccgcttttttattcaagaatttttcctttacttccagaagcttgttcttcttgattacttcagcttcagtttcggcttctttgataattgtgtcatattttgtctttaagccgtacttaaagaatccatacgacaatgcccctcccaccaggaaggccacaattgttagtattactgtcgtcaacattataattaatttaagtatataaataaaaaacgcataaactcatccgttgggaaaatcccttcgaataaagcttatgcgtgaatttcctgttataatatctttctataaaccttcgccccggtcaggttggatacatctttcaatatcctcttccagttctttaagtttttccatataaggtcgggtgtcatttcttcctttcatggatatattttcatacgccaaatcaagtgccaccatcttccagtgttgtatactgttgaattcaggaaaagcactgcgatatttattcagtttatagttaatctgtttggcagcttcccggtaagcttcctcttccgcagggagtatggacacaggataccgttcgttgtcaattagtagattaaatctctttttttcgtccataaaagtatatactttaccgcattgttattcattcagcaaagcgatgcatttatcgacttcacgcacaagtttcgccagtctttgtttcgtatcgcggaggtcattgtcgttgatactgagtatgcgggcgtttttcaagttgatatacttggcttccaattctttattattacattccaattgggctatttctgcactctttctgtcaatttcatttctcaatgagaggttttcttttttcaactcttcataaagaaacagcaattgtctgagtttgccttcgaaagtatgtaacagttttttgtcctcttccgtcattcgtatatcaaaaatgtgtatacaaatatactgtattggttggaaaatcaaaaatatttgttgtggattttattaaaatttgtgagatttcgtgggtgtcaaatctttgcgaatggattttttctatcagataattctttttacctttgtcgttgcattgaggtgacattaaatgcagtgttttttaatcttttaaaaatcaaaaagttatgtatacagtaattaaacgcatggaaatttcggcttcacatcgcctgaaactttcttatgagagcaagtgtgaaaacctgcatggtcacaattggattatcaccgtatattgtcaggcagagcaattgaatgaagatggtatggtagttgattttacgcatataaaggaagtggtaaaagggcagcttgaccataagaatctgaacgatgtgcttccttgtaatcctacggccgaaaatattgcccggtggatttgtgagcaagtaccccattgtgtaaaggtggaagtgtgtgagtctgaaggtaatcgggtgatttatgaaaaagattaatgagatattctatagccttcaaggagaaggcttccatgtgggtacacctgccgtctttgtccgtttctccggatgtaacttaaagtgtgagttttgtgatacgcgccataaagaaggagtcatgatgtcggatgaagagatactggaacaagtctgtcagtatccttgcaaaacggtaattttgacaggtggtgaaccgggactgtgggtggatgaagatttagttgctgccttgcataaggctggaaaatatgcttgcattgaaacgaatggcacatgtgtacttccggagtcgattgactgggttacctgttctcccaaattaggtgcctcgttacgtgtccgtcgtatggatgaggtgaaagtggtttttttaggacaggatgtatccccttatcttcaattaaaggcttcttcttattttttgcaaccctgttcttgtcggaatacggcagaggtcatagaatatatcaagtctcatcctcagtggcgactgagtctgcagatccataaactgattgatattccctgaattctgtcatacaatttgtaagaataagcattttgcggaagttgttgttttttaacatccttctcctccgtttttgttaataaacatatttttttgtttgaaacagatgaaaaaaagatactcctgctgaacactttcagcaggagtatcacaacacaaaaactaaactagacttaactaaactattctaaaagaagtttcacaacttccgttttattatgtacgtcacaaatatagggtttagattgattgtctccaaagaaaaacagtaaaaaaaacgattgtttcaaaaaaaaaggttgaaaatacaacaaaaactcaaatagtatgtttgttaacataattttggagctcttgtttgtagctgtccgatatagggatgtagtcctttccaaaaacaatccttcctttttctatgatttttattttttgtttttgcacaatgaaagaccggtgaatccggataaaccggttagccggtagtttgtcttccatcattttcatactgaccagtgaaagtatggggcgtggattatcttccagatgtatcttgatgtagtctttcaatccttcaatgtaaagaatcttatccagttcgatttgaatcagcttatagtcacttttcacatagatatacttcaagtcatctgacgattgtatgtcggctggtgatgtttcggccttttgaagcagttcaaaccattgcaccgctttgttgacagctttcataaaatctgtatagctgataggtttgagcaggtagtcaagggcatttaccttatatccgtctaatgcatattgtccgaaagctgtggtaaatatgatacgcgtatttcctgggacgattttggaaaattccagtccgttcaattccggcatttgaatatccaggaaaataagatccacgggatgctcggtcagcagctccatagcctgaatggcactggagtatgcaccacacagctcgagtgatggcgttttctttacataactttccagcaggccgagtgccagaggttcatcatcgacaatagcgcattttactatcatggcagtatctttttattgttgtcaggaattttaatggtcagtatggaactgtattctttctggttcgaactgatttgctggtgccattcatagcgtccggcatacagcagttccagtcttttgcgtacttgttccagtccgatgcccgaaccacttttatccattgcgttcttcggataattgctatttcgtattacgcaatggatttcatcatccttttctgttagcgtaatgtctataaagctgggttcggtaggagagattccatgcttgaaggcattttcaataagtgaaataaacagcagcggagctaccgggctttggctgtctggtcggatttgaaaatttgtattgattttgactgcagatgaaacccggattcgcatgagttcgatatagttttgaataaattccacctctttagtcaagggaacaaatgtttcctgattatcatacagaacataacgcagcagtttactgagctcttggatggcttgctgtgctttttccgtatcaaaggccgtcagggcataaatattgttcagggtgttgagcaaaaaatgcggattcagctggttgcgcaagtttttcagttctgcttctgttcggcttttcactgcttcacggcgttccagttccgtggcactccaacgcagactcatacggatggctacacttaatcctacggtaaagatcatgctcgtgatgtcccttatataaaatatgtattgaggaggtaaatgaggacgtcgtggagccgggggaggaaaggctatgatattatgccagtagcggagcccaatggataccactaaaataaggaggatattcaagagaataaactgtcccgtatgttccttaaaaagaactttaggaataaataacaggtaattgatataaaagataacgaagaaagaaagagacacgccagaatggttgataaactctctccagtcgatactgccgctgtcatcttgggtaaagaacagtggaaatccgaaaaacaatccccaacatataatgtggattgtcaattcaagtaagcggtgcttgttgtgagttatatgaaccatacggaattgatttaaaacaaagatacgattttttaataaaagtccggctacctcaagcggtttatgttgggaaacattcactgctgaatggcagccggacaggaaaccaaagttatgaagaacaaagtagttccgttatttattcatagcgcagtgcctcaatcgggtcaaggtcggccgcttttttagccggataccacccgaagaatacaccggtaaatgtacagacggcaaacgagagcaatacgctccaaggctggatgaagacaggccagtgagccacactcttgatgatgaagctggcaccgcaacccaagattactccaatcaaacctccggtgatactgatcaggatagattctatcaggaactgcgacagaatatcaattcctcttgcccctacagacatacgaagtccgatctcacgtgtacgttccgttacactcacatacatgatgttcatgataccaataccacccactaccagtgagattccggcaatgcaggccagcagggttgtcatcaagtcggttgtggtattcagcatggagctaagttcctgctgtgtacgtatggtgaaatcatcgtcgtctgcttctttcagtttgtgttcacgtcgtaaaatatttgtgatttcatctacggcttcttccgtcatgtcttccgtcaaggcagaggcaaaaataccgctcaggtaagtttgtgccagcaaacgtttcattacggtggtgtaaggagacaataccacatcgtcctggtccatgcccatagagttgtatcctttggatttcagcacgcccactacccgcaaaggcacctggttgcagcggataatctttccaatcgggtcctgaccgtcggggaacaggttgtctacaattgttttaccgatgacacagactttggcagccgtacgtatatcctcttcagtgaacatctcaccttgttctacggtgagctggcgaatcgtaaggtagccgatgctgactccactgacagaagaagggtagttgttggagcccgaaatcaactgtccggaggcagatacattcggactgatggccgacaagtacatacattcgtcgcgcagtgtttcataattctccagtttcagtgtctgcatgctcgaagggtcctgccggactccacctctcatttcagctcccggatgaatcataatcatgttggagcccatttcagaaatctgcttctggatgcttcgtttagagccttgtccgatggccagcatggcaatgacagaagccacaccgatgatgattcccaacatggtcaggaacgcacggagcttgttgttggccaaagctctgaaagctattttaaaaaggtttgttccgttcataagtcatttcttaattagtcacgtcaatcgtcgtcgtttttcggcagggcagctaatgcttctgctgctgacagaatatgagggttggttacatcttcaatgacatgtccgtcacgcaggcggatattccggctgctgtattgtgacagttccggattgtgtgtcacgaagatgatggtacgtccttcctgatgcagtttctggaaaagaaccagaatctcaaatgaagtacgtgtatccaggttaccggtagcctcgtctgccaggattaccgccggattgttgaccagtgcgcgggcgatggccacacgctgcatctgtcctcctgacatctggttggatttatgttccaagcggtcagccagccctacagctgttaaggcctcaatggcacgccgacgacgttcggctgcactgactgagctgttgtacatcagaggaagttccacattttctacggctgtagttttcggcagcaggttgtagttctggaatacaaatccgattttccggttacgcaatactgccctttgcggcttgctcatggtgcgtacggatactccgtcgagcagatactctccgctggtgggtgtatccaggcatcccaaggtgttcagtaaagtagattttcctgaaccggatgttcccatgatggtgacgaattctccttcctgtatgctgaatgaaactccgcgcaaggcatggactgtttcgtctcccacctggaaattccgtttgatattttgcaattctatgacagtctttttcataagagtatctccttatttctgttttttcttgtcacctcccggagggcctggcatgaacgggcttctttcactgccagccatttcatcagcattgttttcgaagcctttcagtacggtttctgttacgataggagtaccttcgttcagtccttccagaatttcagtatgacttccgtcgctcagaccgatttttacaggatgtgccgtgaatccgttggcgtccatagtccataccttgtgtgtaccttcgcagtctgtaatagtcttgttgcccaccaactgtttttccggtgtaaaacgcagtgccttgttgggtaccgttatcacgttgtcacgggtgtcggtgtagatggtcacgttggcagtcagccggggtttcagtttcaaatccgggttgtcggcagtaattaccacttcgtaagtgacaactgtttcgctgcttgtgctggtactgcttgaactgctgctgtttacactacccaagcgaatttggtatacctttccttcgaatatgtcatcaggataggcatctacggtaaaggttactcgggcactgtcttttattccggcaatgtcagcttcatccacatcggctactacctgcatctttgtcaagtcggccgcaatggtgaacagtgtcggagtctcaaaaccggaagccacggtctgtccttcttccacgtccttgctcgttacgataccattaatcggagaagtgatagtggcgtatgaaagattccgttccgctttggctaaggctgcttgcgtctgttcgtatgtacttttagcacgttcatagtcgtacacactttgttcgtagtctgtttcgctgatcagctgtttctcgtgtagtgctttgtttctcgtgtatagtttcttctggtagtcgtattcggcctttgcgccgttgtatgtagcttgcgctgattgtaaatcgctgagcagcgttaccttatccatctcggctatcacttcaccctgctttactacggagttatagtcaatatatatcttgtcaatgatacctgaaacctgagtaccgacctctacttcagtgaccggttcaatggttcctgtagctgtaatggaattgctgatatttcctcgtgtaactttttcagtcacgaagtctaccttgccctgtgcattcttctttccgaaaatccagaatcctgctacagccagcacgagtacgacaccggctgccaaaattatttttttcttgttcatattgtttggtgattataattcaatgtcttttcctgcataaaaatcgagtaatgtacgattcaaaatagccatatacttagcctgaatccgttgttgctgtgcactgagcaagttatttttctcggtcagcagttcaaccgtatttttcatacccagtctgaactgttcattgaccatatcaaaactggtctggctgcttttcagtttcacttcagctgctgcatattgttgctgtgcattgagcgcatccagccagagtgtttcaatctcggtgtaaagccctttttgcttgtcctgcaagttcagcagtgaagagttgtattggaactgagctttttctaccgcacttttggtctgtcggttattaaagataggtacacttactgtcagaccaatcatgttgttccatccgtatttcatctgttgtgcccagttgttctggcttgcattgttggtcatgctggaagtagatgccgataggctgatacttggataatacccgcttttagccgcagaaatagccaacttggaattgtcaatactcagtttgctgctttgtatttccggacggttggccagtgccgtttggtaaacctcgtcttgattggggagcagctgcatcactttttcatcgtcaagtaccggaagttccagctccatttccatgtttccgtccagttccagcatttgcttcagttgaagtttatagtttctcagtgagctttcggaggttaccagctggtactggtcattaccgacttgtgcttccagttgggccaaatctgctttcgaaatactaccctgattaaaaagttctttcgcgcgttcataggtagctttacttacttccagcgtacctttattaatgtttaccgattcatctgcatacagaatctgcaggaaaagtttggtaatctcttccttgagcgtattttccgtttcggctacggtcagttccgctatttcctgattcttcttttgctgtttgatgttgttcaggcgctgtccgccgttccatagtgtccattgtgcagacaaactgtagctgccgttataggtagttttattgttactgctgatgatttcagttccactgacagtggcgctgttttcctgataaggacggttcacaatgttgtgtccggtgttgaacgagaggcttggaaagagtgcagcctttgctgtctttacatccacttcgctttcctgtaaggaaatcttgttctgctgtaactggatatttttctccagcgcatagtttatgcaatcttcaagcgaccaggtttgtttttcctgtgcatttgccgacaggaaagtcgcgagcgcggcgaagaaaatgagttctctttttttcatatttcgtttaatttttacattgcaaatgtatttcataataaaaaaagaggcaaaatagatagatttacccacagaatatctcgataaacccttgttttttcccgataaagtacttactttgtaatcattataaaaatagattatgattaaaaagaatctcattcgtgttttttatttttatcgtgatggttttcgggagatgacctgggggcgtgtcctttgggcgattatcctgataaagctttttgtcatgttttttgtgctgaaactgtttttcttcccttccttcctgaaaggaaagacggaggccgagaagcaggactatgtgggactggagttgacaaaccggatggcagaataattataccttatttatattagtaactgataaagtaatttcttatgcttgaaacaatcgacacttcaatgattgactggtcgagggcacagtttgccttgaccgccatttaccattggctgtttgtaccgctgactttagggttggctgtgattatggctacaatggagacattgtatgtacgtacaggaaatgaattctggaagcgtacggcaaagttttggatgaaactgtttggaataaactttgccattggagtggcaaccggtttgattctggagtttcagtttggcacgaactggagtaactattcctggttcgtgggtgacatattcggtgctccgctggccatagaaggcattttagctttcttcatggaagccactttcgtggctgtcatgttctttggatggcacaaggtgagcaaaggttttcatctggcttctacctggcttaccggtttgggagccacgatttctgcctggtggattctggtggctaattcctggatgcagtacccggtggggatggagtttaatccggaaaccatgcgcaacgaaatggttgatttcatggcagtggccttctcgccagtggcagtggtgaaatttttccatactgtattaagtagctggatgctcggagccgctttcgtcatcggagtcagtgcctggtatctgattcgtaaacgtgaaaaagaatttgcacttgccagcatgaaggtggcagcagcagtcggattgtttgctgccctggtaacagccggtacaggcgataagtccgcgtatcaggtggctcaggtacaacctatgaaattggccgctatggaagcgctttatgaaggaggcacgcatgaacctctgacggtggtaggttccatcaagatacctgaaatgctttctttccttgctacgcatagcacggcaggatatgtgccgggcatcaacaacctgctggaaggaggctatacattacccgatggttcaacggctctttcggcagatgaaaagatggtgaacggcaagaaagccattactgcactggccgatttccgtcgggcaaaagaagaaggcgatgaggcttccatgcagattgcacgcagtgccctgaaggaatacatgccttatttcggctacggatacattcaggataaagaagaccttgtacctcatgtaggtctgctcttctggtctttccgtgtgatggtagggttaggtatgtatttcatactgttcttcctggttattttattcctcgtgtggaaaaagcggctggctgaacttaactggttgcactggatttccttgtggagcattccgttggcttacattgccagtcaggcaggatggattgtggccgagatgggacgtcagccctggacaattcaggatttgctgcccgtcaatgcggcggtgtcaaaactggaaacgggctccgtgcaaaccactttcttcattttccttatcatgtttaccgtgctgcttattgccgaaatcggtatcatggtaaaagccatccgtaaaggtccggaagaaaaataaactaaccgatacatcattttaaaaccgaaaaatatggattcaacttatatattcttgcagcattactggtggtttctggtttccttgttaggagccttgctggtctttttgctgttcgtgcagggaggaaactccttgctctattgcttgggacgcaccgaagaagaacgtacgttgctggtcaattccaccgggcgtaaatgggaatttacctttaccaccctggtcactttcggaggagccttctttgcttctttccctttgttttatagcaccagctttggaggagcttactggttgtggatgattattctcttcagttttgtgcttcaggctgtgtcctacgaatttcagtcgaaactcggcaactggttgggcaagcgtacctatcagttcttcctggtgctgaatggcattgtggggccgctattgttgggagcggctgtcgctaccttcttcaacggatccaactttgtggtgagcaaaggaaaccttaccgatgaaatgatgccggtcatcagccattggggtaacggatggcatgggctggatgcgtttgctgacccgtggaatctcattttaggatttgcggtgctcttccttgcccgcttgctgggaaacctctacttcattaataatatccgtcatgaggcgttgaatgcccgtttccgccgtcaactgatagccgatgcggtgcccttccttgtattcttcctggcatttgtgattcgcactttactgaaagacgggtttgcagtaaatccggaaacggggcagattgtgatggaagctttcaagtatttccataactttatagcgatgccttatctgctggtgctgttcctgttaggcgtagtcggggtgttgtatggcttgggaaaaagcattttctgtaagacctatacccgcggtatctggtttgccggtgtgggtacagtactgacggtactggccttgctgttggtggtaggttataatcatactgcttattatccttctacagccgatttacagagttcgctgaccatcgccaacagctgctccagccagtttaccctgaaaaccatggcttatgtatctattttagttccttttgtactggcctacattatttatgcatggcgtgctatcgaccgtaagccactgaccatggaagaaatcaaagaagacgagcacagctattgattcatgccgtctgtaacagcgtataacacaccgtcgtccgaagcagaaaatcgggcgacggttatttttttgcagaaaaatgcagaaatctcacgtaaaaatcttttctggttcgtatatagctttatacatttgtaattattgaagcttgaagatatgaaaagactgattttaaccgtactatatgttttcctgtgtctggggatgcaggcagccgcttctttcccgttccgccatatcggtattcgtgacggacttcccgacaattatgtgaaaaatgtattcgggcttcccgacgggcgtttgggagtacgtacgacttccttattgagtttttacgacgggaagaatttcaccaactatccgttgtggaaagccccggtatatggtattgaccaggaatcagtcattcctcttcagtatctggatgccgacggaagaatttggctgaaagaaaaaggaaacttgaaaatctttgatttggataagggcgaatttattcagccggatacgcttttagccggatggggcgtaaaagaaaagatttcaaatgtgttcattgattccaatcttcatgtctggctggtgacggcttctcagcgtgtgctcctttatgatacaaagaaccatcagttgcagaccataggaggagaccggcatttcctgaatggaaatggtacgctgatggcagtggagtcatatggtagtgtgagctggatactgcatgaaaatggcttgctgcgtgcctatgaccggaatcagaagaaatttatccgacaggaaactttcctgcagaatcgtttgaaggccgacctgcaggtagtaatccggatactggacagcggtgacttctggattgcgtggaatgaaggggttattttttatatgaatgccatccatgcctggaaagaaatagagcttccttctccttttggggaaattacttcatgtgatgtagaaaagtcgggtaatgcctgggttgggacatctagtcgtggtatattcttaatagataaatataatttctcgtttttttcggctgccccctttcacgctaccttaggaggaagagggtatacgaacgtacatagtatttatgtagataaaaagagcggaaccgtatgggctggtttgtttaacagaggattagcctattaccattccagcatgagtaactttactttatacaataaaaagaatattgcaggcgattggggtagtgatgatgtgttatgtatgttggaagccgatgattcttctatctttttaggtacatctgcaggactttatcgtttgtcggccgaccggacatcggtaagttgtccgtttaaggagttgagcagcggattgtttcgaactgcctataaggacttgaaaggaagaatgtggtttggtacttatatggacggactttattgtatagataaaggtaaaatttcacattatctattccctgttcgtgaagggatggacttgaataatattcgtacgctgaccgaagacatagagggtaatctgtgggtgagtgtaaacggtggagttgggaggtttgatattcggtcaggcaagttggatctgctggttgacaaataccccgaattgtctcgatttaagatagccaatacgatgtcttttgatgcttccgggcgcttggtggtaggagcagacaatggaatttatttttatgacataaagaaagatagtctttacattcccggacatgcaaaaggtaaagacccgtttcaggttttagcaggcgagaaatataattgtatgctgaacgatagccgtggattattatggatgggaacccagtatggaataaaggtactttctccagaccggaagattgatgtgttgggggaagaacatgggtttgaaaatctgactattcaggccatgcaggaagattataataatgaggtctggattaccacaatcaatgcattatataaggtaagtgtagcaaaagaaggtggacagaatgaatatacagtagtttgtttggaccggaatcacagtcgtgaatgggatgacttgtatgagttttgttccatgcggacccgaaaaggagaactttgttttggaaggatggatggattttatttgttttctcctgaaaatgtggtgtttactccttgtgttatttctcctttgtttaccggattccgtttgttcaacgaatcggtttcgtgtggagaagaatatcatggaagggttttgtttactcagtcaattgacaaggtacggtcggtaacactgaattatgatgaaaatttcctgacctttgacttttccagtttgaattttgtaaacccttcgcagacttatttccgttatcgtttggagggagctgacaaaaagtggaatgagataacgtctaataaaggacaaggaagtgtagtatataataatttgttacccggtgaatatacgtttcgtgtaatgagtgccggaaacgatcatgtgtggagtccggaatccatttttcaagtgacaattcttccgccattttgggctacgggttgggcttttgtactttactttttatgcctgataggggtagtcattctaggagtgaggtatgtgtatcggaaaaataatcagaaactgattcgattgaaagaacagcaggcagcccagcaaaaggaggagctgaatcagttgaagttccgcttctttaccaacattagtcatgaacttcgaactccgctcactttgatacttaccccattggaagtgcttcggaaaaaggtgaccgatgagcaggtacttcgtcagcttgatacggtctataagaatgcacaagagctatatacccttgtcaatcagttgctcgattttcgtaagatggagatgaaaatggaaaaactgcatcttaccgcgggcgatttggaagagtttgtgtcagcattgtatgctaattttcaaccctttgccaaggaaaagcagctggattttcgtctggagctttcagatgctcattggtatatgaattttgaccatgaaaagttgcatcgcattctcaataatctgctttcgaatgcattcaagtttacgccggaaggagggcgtgtagtgctttctttgtcagcagaggaagttgaagggcattcttttgccaatataacagtttcagatacaggaattggcatatcagatgaggcattgaagcatatttttgagcgcttttatcaagtacagcatccggacgacagcaaggttggaagtggaattgggttgcatttggtgaaggaatatgtagagttacatgagggaacgattcgtgtagaaagtcagctgggaaaaggaacgtcctttattgtacgaattccgatggatttgaagatgtcagaagaaacaactttagcttcggatacttccgatgaccggaaaaaacttttgatagtggaagataatcaggatttccgtcatttcctcaaggagcagctttcagaaacgtatcaggtaattgatgcaccagacggggaagaaggggaaaaacttgctgtcgaacagaatccggacttgattatcagtgatataatgatgccgaaagtggacgggctggagctgtgccgccgtatcaagcacaacgtacagacatcgcatatcccggttatcttgttgacagcccgtagtggagacgaggcaaaaatcagcggttatgcggttggggcagattcctatatatccaaacctttcagctttgatgtgctactggtgcgtatcaagcagcttatcgagcagcaggagggccggaagaaagaattccgcaagacgctgcgtgtcaatcccagtcgcataacaattacttcaattgatgagcagttgcttcagaaggctctgaaattgatagaagaacatattgataattcggaatataatgtagaacagctcagtgccgatatgggaatgagccgcatgaatctttaccgcaagttgcaggctattaccggacagactccgacggaatttatccgtaccattcgtttgaagcgggctgcgcagcttcttcaggacggaaaattgaacgtgtcggaagtggccgaccgggtaggattcagctcttccagctattttaccaagtgctttaaggagcagttcggcgtattgcctacgcagtattccgagacagatgagtctggtaaaacagatgaaaaataaggcttccaaaaacgtaagtgcgtttaggttcaaacgcaagtacgttttgatcaaaacgcaaggacgtttgagttgaaacgcacttgcgttttttttatgtgagagttgttacattatttctattttacgttacctctgttattagcttcatttttagtctttcctacatttgtagcatgttaaatcgtttggtcattaaatgttatggaatgtaagaaaataattttttcgttaggtttgttattttcctttttaatagtcaatgctcagttgtatacttatccggaagatcttcggacaggtattcctcataatgatgattttactgtaagagtgcgaacgaaaggtggggaatggaaagagacttttgagtataaggttcaagtagatatggataaggtgcaggatgcctcgatggtacagtttgatatgggtgaacctgtagaagtcatgataaaaaagaataatggaatgattcactctgtagatatcaggcccaaggcaaaaggaatagagtataagttgatagaaaattgtattttgttcactttagacaaacctcaatatctttctgtggaatttaatggagatcgtttgcataaccttcatctgtttgctaaccctgttcaggaggaagtatatgctcaaagcgagaaaggtataatgtattttggaccaggaactcataaaccggcagaccttcctaataaccaaatacgtataccgagtaacacaacagtttatttagcaccgggtgcagtgatagaagctaagctgcttgttgaccatgccgagaatgtcaggattataggccgtggtattatttatcatagtatcagaggtatagaaataacagattctaagaatgtgtatattgatggaattacggtattgaatccagatcattattcaatattcggaggtggatctgagaatataattgtgaagaattttaagtcctttagttgtaaaagatggtcggatggtatcgatgtaatgagttgtcagcagttggatatagaaaatattttcatgagaaatagtgatgattgtctggcgctgtataaccaccgttggaactggtggggtggaacaaatcatgtgaatgtgcggaaggcagtgctttgggcagatgtggctcatcctatcaatataggcgggcatggaaatccagaagcagaagtgggggaaaatattgaaaatcttacattccgtgatatcgatatattggaacaagatgaggatgattatccttatcaggggtgtatggctgtagtatgtggggataaaaacatggcacgaaatattctatttgaggatattcgtatagagagtattcaggaaggtatgatttttaatataagagtccattttaatcctaaatacgataaggcaccgggaaggggaattgatggaattacttttcgtaacataacttatcagggaataggagagaataagtcggtgatttttggttatgataatggcaggagagtaaaaaatgtaacatttgataatattgttatcaatggagaaaaggtagaaagcaccaaagattttctaataaatgagtttgttgaaaatgtaacgataaaataggaatgaaaaaatgatagaaatgcctgtagagggtattcctgcggctttttcttatttaaaatagatagttgttacaggatttttaattcttgttacctcctttttattcactttgaatataggagtatacttttgtatacagaaaaacaaactataaaaaatgaaagacacttcaactcatattacggttcagtttctgacggaagtctatgtgacttatcgaccattagttctccgttatattactggtaaattgaacggttgcctggaagcagaggatttagttcaagatgcctttttacgtttattggaataccgttctatgcttcgccctgagacagttcgttcttttttatatactatagtccgtaatctggtaacggattatcttcgtcggcattataagaagcaggaggtaattgcttgtatgcaagagagactttctgcttcggttgtagatacggaaagccagataatagtaaaggatatttgccgtcaagagttatttgtgcttcaacagctaccttttaaaactcgagccgtttattataaatcgcgctttgatgaaaagtctgcattggaaatagcgattgatttggatattcctaagcgtactgttgaagggtatttattaaaaggacgtaaagttgtacgagaatatattaaacaatgcatttaggttaatttaaatttaattgtatgaagaatgagttttttagtgtaaacaaactgcatgcattaccgattgctatggtttgtttgtcttgtgtgcttgcatcatgcaaggatgaagcggaaggacgtattacaatagatgatacacctccccagcaagtgacgaatgtgaaatattcttcaggtccgggggaagtttatttatcgtgggtaaatccggatacgctgagtaatcctagttttatgtacacaaaggttgaatatctggatgaaaaaggggttatgcagtaccatttgatttctaaggaaagagctgtcgataacgtcgtagaagatacaattcggggatttgctacaatggatgcaaaaacattttcattgtatacttgtacggtaagaggttatcatggagaagctgtagaagtttctgtttcacctaatgctccggcttttcaggaacttgtgcagactgttcgattgactcctgatttaggcggtattgtggttagttggaataatgcatacaatgtgcctgtaaatattgtactagattattatgctgtggtagataatagtaaatcaggaaagactattgtaaatgtgaaaggaaagggagagggtagtcagtttgtagctctgtcctatggtgataatatggtgctgtcaggagaagaatgtgtggtgaatgtaattgggcaggatgaagctgagaacagttctgaacctgtagagttcaatataacaccaaaggctgtggttaaattggatcgcagcgaatggactttccctggatatgtagataattcaaatgctcctaccatcggatatagttctcaggagacaattggtgaaggaggaggtgtatcacctcatggacgtgttattgcaatgttagatggtgatttatcaactttctggcatgcctcatggaaaactacttataaatatccacattggtttattgtagatatggggaaagatattacggtaagtagtgtagaaattaccagaagacagggtaataacaaaggacagataggacagcatttttatacttgcgcttcggctgatgctacagatccttcaaatccagataattggaattggactgatcagggaagttattcattcgatattaattcggatgctcctcagactttccgtttgtcacagaaccctgtatgtcgatatattaaagtttattttggagaagaacataaaggggcaggagatcaagctatggtttctgaatttaatgtatatggtgcagaataatataaagttaagtgttacattatgagaaaagaaaatatatttgtcacagcattctgtttatcgttattggtctctgttccagaaacgatgttagctgtagaaagtgtacagaccgtgttacagcaaggcagaacaattagtggaaaggtgactgaccagaatggagaacctattattggggcaaacgttgttgtaaaagggacctcaaatggagtaatcactgatgtagatggtaattttgaattgcgaaatgcctcaggaaaattggtcgtttcttatattggttaccaaactcaggaagtttccatttcagggaaaagtaatttgttaatacggttgtctgaggactctgaagtattggatgaagttgtggtaacaggatatggagtacaaaaaaaggcttctcttacaagtgctatttctcaaattaagggagaagaggctttcaagaacaaaggtattgcgaatgccacagtagccttgcaaggtgagattccgggactgaccatcacgcgttcttctacccgtccgggtagtgaaggggccgccatgaagattcgtggagatatttcggtgaacggaaattcttctccgttgattattattgacggaatctccggttcgttggatgaactgaatgcgatggatgccagtgatattgagaatatctctgtattgaaggatgcgtcggcggccatttatggagcccgctcagcttccggtgtggtattggttacgaccaaaaaaggaaagaaaggaaaagcgcagattacatataacggttctatcagtcgcaccattgatggtatccagccgcctattacgaccaatgcggaatggcttgatatgttctttgaagcgcagtataacgatgcggcggctactcgtcccaatctgactgatcctagagatatttaccagaatatggattggtggatattcaattcatttggagggcctactttagatacttcagacatcgatcctgaaacgggagctcccactatatataaaggatataagttgtttaatgcgctccgttcaggaaaggtgttgacattgcaaaacggggataaagtggaacgctggaatccgaatacatatatgcaggactatctgtacggacaggccacttcccataaacataacatcagcatttcgggggctgatgacaagttcagctaccgggcctctttgggctatgcggagaacaattctcagttgaaggtggccgaagatggggagaagaaatacagtgcccgcttgaatgccgattatcaggcattggacttcctgaagtttgaaaccaatatggcgtatgaaaagcgggatattgtcaatccgtcgaccgatgtgggggcaggttattttgacccatggttttggccaatctggaatgagaacggagacgtatatgatacgttcagtggaagccgtaacccagtgggaggcttgacgcagggaggacagaataagaattccttaactactttccgagggggactcaaggctacgctggatttttccaaatggggactggaagggcttaccttgtcgggtaccggaaactacaaactggtgcggcgtgatcagcagaaagtgtataataaggtacagtattatgattgggtaggtacggaaaccgggaataagcaaggaccgggttcactggaagaaatcatggagaaatgggaaaacatcacgctggggggctttattaattatgacagaatattcaaggaaaaacacagtgtgtctgctatgttgggtatgacggcagagcaggaaacctccaagaaagtaggtgccaagcgtaatcaggggccaatgtatccggggtcggatttgacagacttggatgtgtgggtaagtggagacaacaacggcgcttatggagggcagagttcatggggatttgtatcttacttgggaagagtgaattacgtatacgacgacaaatattctattgaattgttaggacgtcgtgacggttcctccaaattgtccaaggaacagcgctggaagaacttttattcagtgtctgggttctggagaatctcttccgaagagtttatgaaagattttacctggttgagcgatttgaaagtgcgctataactatggtaagaccggtagcgtaacaggtatcgacaactatgaacgctatgcgttgataaaaaccgggggaactattttcggtgtgaacccaacatcgcatacttctttgtggatagatggtattcgttcagaccaacgtacttgggaaacgattaatagtcatgatgtgggagtagatttcgctttcttgaataatcgtttgcgtggttcatttgattattttatcaaaagaaacaatggcatgtttatcaacgtggaatatccttctattctgggggctggtgcacctaaaacaaataatggtaaatttgaggctaaaggttgggaaatagctttaaactggaatgataagataggtcaggttacttataatctaggagcttcactttccgatgcatggtctaaagtgctagaactggaaaataatgaaaatgtgcctaatccgggtaaaaactctaaccgtttgattggaaagccaagagatgcgctgtatgtataccaaactgatggaattttccaaactcaagaggaagtagatgcttattatgaaatgtattattggaatgcatctcatacaggtccgaaacctaataatattattccggctcctcaggaagcttctgcggaaaccctgcgtcccggagccagaaaggtggttgacttgaatggagacggatccattactacagctgacctttactatgccggagacatggctcctcgtttgacttttggtattaaggctggtctggagtggaaaggcattgatgtggccgcatttttccagggagtagggaagcagacaattttgagaagtggttatctggccgctccgtggacgactaattatgtattgcagaatagtacgttcatgggcaagatgtggacacctgaaaatccggatgcggaatataccatcgcttcacgtaaccagaattttaataaatggaactataatgaaaaagatgtgcaggttcagaataaccgctacattcgtttgaagtctttggtgataggttataccatacctaaaaaatggacagctaaagctggaattagtaacctccgtgtctatttttcaggagatgatttatgggagtggacaaaagtaaaagatggatatgacccagaatatggagaaaactctaataatacgtttcctttcagtcgtttgctgacttttggtgtagatgtaactttttaattataaaataagaatatcaatatgaaaacaatatttagaatatctctgattgtttcggcattggctttaccattgtgttcttgtagtgatttcttggagaaagaaccactctcacaggggacagaggctattgtatttaagactccggaacattttgaacaagctgctaatgctttatataatatgaatggatggaggaacttggatggaaaaggctttgaaggaagtgcagtggaccagaatactgatatcaacggactaaccagcaatggtggtggagttgtgcaggaaagtgattggcattgggataaaccttattctcatattcgtacttgtaacatattattagctaaagcaaatgaatatgatggtaatcaggaagatattgctcagtctgtaggtactgcttatttctttcgtgcatggcaacatttttatttgttgcaatattttggtggaattcctattgttgatcatgtactggatgtgagtgatccggttttgtttggtgtccgtaacagccgttatgaagttattgattttattgcatcagatttgcggttagctattcctttgctcccaaaagaaaaagatattccagaaagtgataaaggcaaggttagtaaagaagcggcgaaagcattcttggctcgtgtattgctttatgaaggaacttgggagaaatatgtaccatcaataaattatgatttggatggagatggaaaaaatgatggagcaggttctgtaaagccggacaattatccttcaataacagatatgcttacagaagcaaaacagatggcaaaggaagttattgaggaagcacagacaggaacttttgcattatgggaagagtgtgataccttaagttactattatttatttaatatagatgataaaggaggcaatatatctaatttcagaaatgcaggaaaaagctctaataaagagtttattttctataagaaatatgattatgatttagctcgtggtggtataaatctggttcattcggttctgagtggatatgtgactaatatgagtgcacagtttggggagtctttcctttgccgtaacggacttcctattcgtataagttatacaggtaatatggcagatgcacagaataatcctcagttcttgggatatgagacatttgtaggtgaattcagaaatcgtgattatcgttttattggttgttgtaattccattccagatcgtatatcatatgcggctcaaaatccaggacgtgagcgcgtggatgccattttaccttaccctactcctgttttcccaaaaaataatgagatttttgactctaccgatcctgtatatagtagtgcttgtgctgtatttcatccgactatcagaaacaatagtacgatgggaacatatagtagtcgtaagttcttgatagaaggtgctaatcgacctgtaaatacagaatctgcagatttcccgttaatccgtttggctgaagtttatttgatttatgcggaagctacttgtgaactgaataatggagagatttcggatgaggacttgaatttttccatcaatcatactcgtgcccgtgcaggagtggatccgctgacgaatgctttgatagccaatgtgtgggatgcaggttattgggatcatgcacagggaaagaccgtttgtaagaagatgaacatgctggatgaaatccgtcgtgaacgtgcatgtgaactttttggggaaggtttccgtatggatgatttgaaacgttggggaatcgcacatattaatctgacaggtcagaaacttggtcgccatgtacttggaactgcatatgagacagagaaggcaaatgatgcttcttattttggagagccttgttattatccggaaaagtatccgttattatatggagtatatgaaggaacgggcaagacagatcctgactatggacgttctattgcaactttggctgggaatctccatttttctcagaaggattatttgaatcctattccgttaaagcagattcgtctgaatcctaatcttgcgcagaatccaggctggtaatgatgtggaactatttttaatgtaaaatgagattatgaaaaatataggatttatcttgatgatatgtatgatgactcttgtacaagtgtcatgtgataatgaagaacctgggcagatgtcggtgacttcaaacatgtttcttcaaataacaaacaggaaggccaaagtttcaaatgacgggaaatactatatcctgacagaatgtatagatgagac

SEQ ID NO: 3793 - DNA, 2765 bp, Unknown
  gut microbiota DNA sequence
ttgcatattccggcggatacccgttcagcatttccggtgatatccgttcagtccccagttagtattcagtgttgttggcaaagttaatacttctttcttaggctctctcctttaaggtcaaattttattgccttatgcacgattctgtccagacaggcttccgcaatgagctcgctttggaacacatcataccagtctgcaacgggaagctggctggccaggatgagtgccttccggttgtaccggtcatcgatgatctgttcaaagtcatgctgtatctggccgtccagcttgaccatcccaaagtcatcgataatcagcaggtcatgtgcgttcagcttccggaagaagtttgtttcccgtccttccagatgtgcaagcttcaggttctcgatgagcatgttcatcgtgaagtacagtaccttccggccgttcctgcatgccctgtcacccagggcacaggcaaagtaggacttcccggttcctgccggtccggtaatgatgaccgtcattccgcccgtgatgtaatttccggttgcaaggtcggctgcagagcaggcctgtatgccccttgccgtgtccgtttcaagttcttccatcgaggctctcagacggaagccggcattctttataagacgctggatgcggttgttccctctcgtgtcacgttcgtactggagcatgatctgcatgccttcacgcagggtaagcttgtccaactgatgtgtttcttccagagagctccagcagcttgccattcccggaagcttcagctcgtgcagtgttctttctgtttcgttgctcataatcatttattgttgttggtttatgtcatttcctgtaaaatagtcttttccgcgcatgttcccgtggtttgacggtgtaggcgcatggaagattaccgtctcgtctgcggatgcattcatgccgttacgtctgagtatggcttcaaacttgctgtaggagtaaataccgtactccatgcactgacggcaggtaaggtcaaacgtggcaaggtcatacttccttctgaggctgactatggagttgcacagcttgtaatacacctcttcaggctgtgcggtacgtttggggtcaaagattctttttacatattcatggcagtcaggtgatatatcttttgctttctccacataataggctgccgaacgctccataatcaccctgcagctggatgcgagatgttccctgactgtggtatagccgtatgtatggctgcggatatgtgaggccaccagtttctgctccacatagaccttgacccatgaacgcgtaaagactactcttgcctgttttcctacatggatataggggacggagtaaaaatgggtcaccttgtcctgtctcagctccacatggcagtttgcctgtactttcagatcggcatacaggcgcatctcatagggttccggtttcaagggtttcagcagctccttctccatggcatgaaaacgctcctcacggctgtagggacgcttctgcatacgggtctggttgtgcctttccatcagctcccatacggcacggttcagttccaggagtgaatggaaggtacggttacgcaatctggcatagacacggttatatgtaatccttacggagtcctctaccagagccttctgtgtcggcgatgccgggtcgcatggcagtaccacgaaatggtagtagttgcccatgtcctcaagagccttgttcagcttcggctcatgccggtcattgctgattacagccgatttgaggttgtcaggagtcagtatggaaggtacaccgcccagatgttccagacacatccttatggcatacagaaagtcctccgtcttctgcgaaggtacacataccacataggtatagtcgctgtaaggcatgcaggcgacaaacacctccaccttgacaatttctccggtttcggcatccacatagctgagcttgtcaccggcaaagtccaccatgagcttttcacccggtttgtaggtgttggccagtacggccgtaacatccttcttcgcaacgagattctgcttcagatggtaatagaactgtgacttgccgtaaccatcgggatgagtcgcacggtattcatcgaataggacctgacggcttacatgggatttggggtccgccagcagttccctgtatctgggtagcaggatcagaaactcttccattctcctgtccgtatatgccggagaaccagcatggaacatccgttccaattcgggatcgtcaatctcaaggaggtcgctgatgttccatccgttggcttttactgtattcacataaccgttgacggtttccttgtcaatcggtaacttgcggcttacaccgcggttggattctccggcctgcttgagctggagtacttgttttatcagactcatatcctttgttgttcctgccatgactgtgctgtttcttgttagcttaccagcacaaaggaaactgaaaccggggaaagaatgaacggatatgctccggaaacgaagatatacgctcacaattccatgcacggctgaacggatatactccggaaaatctgaaagcatacgtctaaagtgaacgggtatgctccggaaaaagggtgctacaacctgcaattctcggaggtgaacggatatgctccggaaaaattgagattttaatgtctggttatccattttttcatccttttaggggatgaacggataaaaattacgcttttaaggtatggttttataccctaataagctgccggaaagtgaacgggt

SEQ ID NO: 3794 - DNA, 300 bp, Unknown
  gut microbiota DNA sequence
tgtagtgtactaaataagttgacacaatttatttagtaacatgcgtaaaaatcgaaagtattcaaaagcagaatgtctgtcttatctggaagaatacatgtgttcttctcagaatcacagtgaatttgaacgtgaaaaaggtctgaaacgtaccacaattagccgctggcttcgtatctttgggattgaagataaaccaagtcccattatgagcaagaaactaagtcagacggaacaggagcttcatgaccgtattcatgagctcgagcggaaaatcaagtccctggaagtagagttgaa

SEQ ID NO: 3795 - DNA, 504 bp, Unknown
  gut microbiota DNA sequence
tgaagtgtactgaaaatagttgtcagtttgaagattaattcctgacaaagttgacaggttaaacattatattcctaaaaaggttgtcagttctgcaaaactacaacaaaaactcaatatccgtatattttctccctaaaaactcatcgctcggggagcgccgtgcggcaaggggcgggagcacccgtcccgacgagcacatcattcaattataccgatattccataagagggtttcctcctctgcctgagaaaatctccataggggtcttcattcccagtgccttgtgcggtctggcattgttgtacatcgcaacggatttactgacggcttcctctgcctgtctgaagtccatatcaccttcattgaagagccatccgttcttcagggtgttgttcatcctctcggccagggcattgtgaagcgggtctcccgtctgggtcatgctgattctgatgccttgtgaaagcagcaggtccgtgtactgcttcgaggcatactgcac

SEQ ID NO: 3796 - DNA, 784 bp, Unknown
  gut microbiota DNA sequence
cagtccaacatggcccgtgacgcctacgactgcatgattgaccttgcggaaaaggacctataaccattccggtaagaaaaaactcgtgccaagtaatccggggcctgtctcaaggcggacgccgttaccgcgtggcgtccgctttggcagattgcttggcatatcagcacagggatactacaagcatgactatgcctcaaacgaggctgacatactctctgccagcattgtattgtactgcctgtacgtccgccagaaggaacgtcttcccaaagcgggctgccgggaactctacacactctgccgtgaatacttcagggaaaagtttaccataggacgggacaggttttacaatgtgctccgttccaactcgctcatgctcaggcggacaaggtatcgtccgcgtactacggactccagacacggttaccgtctttacagggatcttgtaaacacttctcccaagtacacacctgcgggcaatggccggcttgtggtggcggacatcacctatatctacaccagagaaggctttgcctatctctcactggtgaccgatgcctacagcagatacatagtgggatattgccttagcaggagtctggatgcggagggaccgctgaaagccatgtacatggctcttgagacctaccgtgcctacggaatcagtacggagggcatgatacaccactctgaccgcggcgtgcagtatgcctcgaagcagtacacggacctgctgctttcacaaggcatcagaatcagcatgacccagacgggagacccg

SEQ ID NO: 3797 - DNA, 110034 bp, Unknown
  gut microbiota DNA sequence
ggggtctttgtaacaggatgtagcgatgataatggttatgcagatgtcgacggacaatcacctgttgcagagttaaaagctgaccatattcggagtggtgcgggtcatgacttcactattgaaggaactcttactgacgaagatggtatttcttttatcagattggagtgtaaagacttgtatctgaataagactatcgatcttattgagatttatggtgaaccaaagaaaacgtatgatttgagctattcattcgcattggcggctgatgaattgggcgagcagttcactgtgaaggtaactgtagtggatgttggtggtcgcgaaacatcacaggatgtgttgataacaatggatggtgattttgaaatccctgtattcgttaaaggtccgtcagaaggtggattgattccaatgattctggaagagactgaagatggtacattcacagttgaaccatacgtgatggaacttgagatgtctgatgaccgtggccttaaatcattgcagttggatattgaaggtgctgtaggttacgaggatcagacaatcgatttaggcggtttgacgagttcgacatatacatggactatagatttgccagctgtcaagaaggactatgaggctactctaattgtgacagacaaagaagaaaaggctgatacaatttcatgtacaatatccgtgacagacgttgtggacttccctaagatgtatttggcagatgtacctaaaggtgatgtagcggctcttacaagtgacgtgttcggtgttcctatggtgattaaccacacaggtgaataccagtataaggcacgttattataataaggctgcaggaacagagatttacttcctctctgacaagtctaatttctctcctgtttgttatggcttggatcctgcagacaatactaaacttctgaatgatcctgatttggctgaaccattcgttttgaatactcctaatgtatattatgagattactcttgatatattgatgctgacttatacagtaactacttatacagttgatgaggcaacaaatcctatgggacattacgtatatggtgagaaatgtttcgaccggtgggagaatggaaatgaagctgatttcattgaattctacattggttggggtagttctcctcaggatgcaggaaatcatctgttcgttcaggataaaagcaatccgcatctgttctattatcctgcggaaggtgagacttggtctttgggtgctggtgaagacttgaacttcattatatcaaataatcatcctgacggatggtgggaccatgtagaatggcgttgcgataattcagataatccagaaaagttcggctatttcagtaagaagaatgatgttaatcctaattgggaaggtacaaacagacagtgggaagatggtactgccgtaaatgacaactggattagtccgactgttacaaatgcaggaaactacagatttgaatttgatgctcatttaggtagaggcaagattgttccagctaattaattaaccaataatcataaaatatgaagaaacaatttttagttttatgtctgatgctgctttctatttgtggttatgcacagactataaccgttaaaggaacggtaacttcagcttccgataagctaccgatgattggtgcaactgtacaggttaaaggtgctggtgccggtacaatcactggattggatggtgactatatattaaataatgtagcgactgatgctgtacttgtattttcttcaatagggtacgatacacaggaaattaaagtgaacggtcagaaagttattaatgtggtgttgaaagaagcgtcagaattacttgacgaagtcgtggtaatcggttacggtgccgtaaagaaaagcgacttgacaagttctatcgctactgtaaagggtgaggaaatcacacagagtgttacaggtaatgcgatggatgcgcttcagggtaaagtaagcggtgtacaggtagccagtggtggtggtcctggtacagctccaaaggtgttgattcgtggtgtaaccacagttaacggtagtaacccgctttatgtagtagacggtatgcctgtgggcgataatatcaacttcctgaacagtaacgacattcagtcaatggaagtcttgaaggatgcgtcagcagcagctatctatggtacacgtgcgtctaatggtgtaatcttgattacaacaaagaagggtcagtcaggaaaggcaaatgttaattttacagcctcagtaggctttcagaatatcgcaaaacctaaggtagcaggtcctgcagaatataaagaagtatataacgcccgttatactaacgatggctcagtatctaactggaatgatactggtgccactacaaatcctggcggtacagactggtgggatacagtagtcaacaagactgctatggttcagaactacgctctcagtgtttcaggcggtacagataagctggtgtataacttcagcttgggatactatcgtaacgactctcagtttgattatggttattgggataaaattaacatccgtttgaataccgaatatacattcaacaagtatgtaaagatgggggttgatatagctccacgtatggaatcttgggacgatactcctaatcagttcggttcggcaatgtctatggaccctactactccagtttatcgtcctaaggaagaatgggatgacaatgagtataacagataccagcgttcatataacaatgaaacatggaaccctgtagcttccatagcacgttcaaatgctaattcacgtgagatgggtgctcttatcaacgcttatttgcaggttaatccaattcagaaactgactctccgtactcagttcggtactaacgcccgttttcgccgttcggactctttcactcctgagttcagacttcacgaacaggaacagcagcagttgaacgaagtttcacgtcagtcacaggaatggtttgactggaactggacaaatactatcacatacgccgatacatttgcggagaagcataacttcaacgcgatggcaggtttcacagctgaacgttacgcatggtacaataccaaagctttgcgccgtgacttgccaagcaatgatgatattatgcaggaggttgacgcaggtaaccctgacaatgcttcagcagaaggtactactactttcaacactatggtttctttccttggacgtgtaatgtataactacgccaacaaatattacatcacggcttcattacgtgctgatggttcttcacgtttcccagcaggtaacaaatatgcgttgtttccatctgcttcggcttcatggagaattactagcgaggaatttatggaagatcaggaaatattctccgatttgaagcttcgtggaggttggggacgtgtaggtaaccagaatattgccaatgacgctactttgactcttcttggtcaatcacaatactattttaatgatgtattggctaacggatactttattagtactgtgggtaataccaatttgaaatgggaaacagtggaagactggaacgtaggtgttgatatggcgttccttgaaaacagacttggtgtgacattcgaatacttccagaagaaatcaaaggatatgctttaccagaaacagaatgttcttgcactggggtatgaccagtggaacagccagatttggatgaatattggtagtatgaatgcgaaaggatgggaattgggtattgactggcacgaccagataggaaaagactttacctacaatgtaggcttgaatctttcttctgttcgcaacaaggctatcagattctctggcgacggtgctgtctatactggtggattccacggtgaccagattatcagtaacattgataacgctttgatttcaagattctacggttatgtagcagatggtttgttccagaattgggaagaagtttatgctcacacaaatgaacacggaacattggttcagccaaatgcccagccgggtgatatccgtttcaaggacttgaatcacgatggtaatcttgacgctaatgataagacatggattggtaatccttatccggacttgatgcttggctttaacttaggatttacttacaagaacattgactttgccgccaatttctatggaacaataggtaatgatatatataataagactaaagaaatgtactcaggtactgcaggacagaacgtctgggcgggtacatttgacaaagcatggcatggtgaaggaacaagtaatgatattcctcgtctgtcgtatggcgattataaccagaactacagccgcgtatccagtttctacgtagaagacggttcttatgttcgttgtaaattgcttcagattggttatacattccctaagagtcttgtaggtgatactggtttgcgtatatcattctcagcacagaatccgtttaccattacaagctattcaggtatggacccagagagacctgctatggatggtagcgtaatcgagactggtattgacaacacttcttatcctaatccacgtacattcttgttcggtatagacttaaaattttaattcttgaataaatatgaaaaagatattatcaataataacagtttttgcctcgctgacgtttgcctcttgtgaggacttcctgacagaggaggtacgaggaaaacagaatcttgatacttacttcagtacagctgaagaatgtcaggcatatttgactggttgttaccagagtatcacttttggtgactggtggcagaccaatacagtatggcttctttcagagatgtgtagtgatgatgcatggatgggcaatacctcacaggatcagactgattatatttctttggctcactatagaggtaatggagcaagcaacggtgtaatctccaacttttggcagtatcgttataaaggtattgcacgttgcaatgtggctatcgaccgtatccctaatgcaggactagaagatgctgctttgcaggaacgtttgatagcagaagcacgtttcctccgcggatatttctatttcgagttggcgagaaacttcggtggggtacctttgttaactcattttatgatgcctgaagaagttataggtataaagcgttcttctttggaagatacttataagttcattgaagatgatttaaaggctgctgctgaaattcttcccaaacgtagcgaatatgctccagctgatctgggacgtgctactagtggagctgctttaggtttgcttggtaaagtgtatctttatcaggaaaaatggcaggaagcgcatgatgtacttcagaaacttgttaaggagtctggttattcaggcgaagattcacagacagatgaatatgatttgcttcctgagttcggtcaggtttgggattgtaatcatgacaatagtatagaaagtctttttgaagtacaatatcaatatcacgaatctttgggcgttggaggttcgctttctacagtaactggtgcccgtaactcaggtgctgctcttggcgacggttggtgctggtgtcagcctacagctaatcttgaagccgcatacggtgaggatgatattcgtcgtcagtggactatcatttcttctggatgtacagagattgtgggagagacagccgaggactttgctaaaatcctgaaagacaacaagggtactataactgaccacgcaaaattagcagaacaatacggatgggatcctaactgtttgataattaatcctgttgctcataagtcaggacgtatcatacgtaagtattatattccattgaatgaccgtcctgaaaacttttaccagacaaagagtccgttgaaccaccgtattctgcgttatgctgatgtattgttgatgtatgctgaggcatgtaacgagttaggcgatgatacacatgcgcaggctgcattgaataaggtaagaaatcgtgtgaacttagcccctgttacttctacaggaacagcgcttcgtgacgcaatccgtcacgaacgtcgtctggaacttgctttcgagcaaaaccgtctgtacgatatccgtcgttggaaagatgacagcggcactccgcttatcgcaagtattcttggccctaacggctcatttgtaagatggaacactgaagaagcaacacgcgatccgtttgaatggaataaccaaggtgaggacagcaataagggcatatcattcgatgtaaaccgtgacttaattttccctatacctctttatgagattacaatgtctggcggctctatcgaacagaacccgggttggaactaatatttaattgatatactataatcttgtaagctgttgcaggtatatttgatatttgcaacagcttatttttaatatgaataatgatgagactttttgattacaaatttttgccgttggttttctgccttgctcttgtggggtgtagtgataatgagacttctgaagtgccaaatcctgaaaatgatgaagacattccggaagttagtgtcgataagattgtatctgtagatcctactgtcaagtatcagacaataagaggattcggggcctcggactgttggtcgcctaattatgttgggaagtattggactaatcaccgtgatgctatcacagaacttcttttctcttctgagatagtggacggacagcccaaaggtatcggtttatcacaatggcgtgttaatttaggagccggttcggctgaacaaggtgatgcgagtggaatagaagatgagtcaagacgtgcggaatcatatatgactgaaaatggaacgtacgactggaacaaatgcgagggacagcgttatttcatgaatcgtgccaaagaaatgggagtgcctgacttcatacttttcagtaacagccctcttgttcagtatactaagaatggaaagggattctctaatagtgggatgaacaccaatcttaaggatgactgttatgacgattatgccaaatatatggcagatgttgccaaacattatacagacgatggatataatatcactcatatctctccggtaaatgagccacagtataactgggatggtggtcaggaaggtagtggatggacaaacgatcaggtagctcggttagcaagagaacttgacgcaaacctgacggccaatggattgtcgaatactgatatacttcttggtgaagctggtgattgggagtatctttataaggtaaaaaatgagcaggaaagaagcgatgtcatttccgctttctttactcctggttcttctgcgtatgtgggcgatttgcagcatgtaaacaatcttatatgtggtcacagctattggactgacggtacatgggacggaatgagacaggtaagacttaatgtacacaacaaggctatagcttcaggtcttgaattgtggcaaagcgaatggagtatgttgggcgacggatacagctcgtctgagtttgtaggctatgatgctgctacagagatggatattgctctttacatgtcaagagtgattcataatgacctgacagtggcacaggtatcttcatggtgttattggacttcaattgatgtcacccgctgggctccgcataagaacaggttcctgcttatatcgttggtcccacaaggaggtgctgaaacaggagatattaaggacgaaggttcgttcaatgccgctccaacactatgggtactgggtaactacagtcgttttatccgtccgggatatgtcagggtggatttaagcatgaacgagagcatgaatttctttggctctgcatggatttcgcctgaaggggataagattgtagcagtatatacaaattattcggataaggctgtaaaacttattgacggcagagaaggatgggatagtcagccgacctctgttatgatatatacatcaagctcttccaagcatcttaaggagagaattgttccagaagatggtgacatttatgtcgatgccaagagtgtcactacagtagtctatgaactaaaataaaaaagttatatgaagaacaaggcattttttattattctcttggggctgttggtatgtactgtagtgcaagcccaagtatcttttggcgaagccaaaaaattcaatgagaattggttgttcagcttgtcagacgatagtctgggtgcttctgcatcgtatgatgacagtaaatggcgaaagctggatttaccgcacgactggtcggtagaaggacagctttctccttcactggcaagctgtaccggttatttgccgggtggtataggctggtatcggaaacattttcaggttaccgataaggccgcacgccattatatctattttgagggagcatataaccgcagcgaggtttatctgaacggacacttgcttggtaaacgtccgaacggatacatctcttttatgtatgacatgactccctacctgaaggaaggagataacgtgctggcagtccgtattgaccacagccgttatgccgattcacgctggtacactggttctggaatttaccgggatgtgtggatgatttctgctcctgacattcattttgcccaatggggaataggctggcacgctacttcgctgaccgataagcaggcggtagtggcagtcgatatggaagtagagaaacatgtgaaggctgctggtgcattggaggtttctgcggcactttatgatgcagaaggtacactggtagcacagggccgtaagaaagtggcggataaggctgaaggtattgcgaaagaaacagtatcattgaaggtgaagaaacctcgccgctggaatctggatgcaccttatctgtacacgttgaagacagagctgctttgtgacggcaaacggatagatggcagttcgacgaatgtaggtctccgtacgttgaagtttgatgccaacaagggatttgccctgaacggagagtggatgaaggtgaaaggagtatgtctgcatcatgatgctggtgtactgggagcagtagttcctcctgaggtatgggagcgccgtctgagaaacctgaaagaaataggtgtgaatgccatccgtatgagccataatccgcaggcaccggtattgtatgatttatgtgaccgaatgggcttcctggtgatggatgaggcttcggatgaatgggagttcccgaaacggaaatggataaagggatggaatgtcggtgagccaagctatgacggaacatttgatttctttgaagaatggattgaacgcgatgtgacggatatggtacgtcgtgaccggaatcacccttgtatattcttgtggagtatcggcaatgaggtagactatccgaatgacccttattctcatccggtgctggatggtacaaccattaaccagcctatgtttggaggatacaagcctgatgcgccggatgccatgcgtatcggtaagattgcaaagcgtctggctgcctgtgtacgtgcggtagatacttcacgtcctgttaccggtgcattggccggagtggtaatgtcgaatcagacagagtatcctcaggccgtagatgtagtaggatataattacacggaaaaccgttatgacgaagaccatgccacttaccctgaccgtgtaatctacggtagtgaaaccggtgtgggaattgaggcttggcatgcggtacgcgacaaggagtttattttcggacagttcctctggacgggtacggactatctgggtgaatcaggcagatggccttccagaggtttgtatactggtttgctggattttgggagcttccctaaaccacgcggatacttccgtgcttcgctttggagtgaaaaacctgtgacttatgttggtacgtatcctaagcacgactgggtatcaatggatgcatgggatttgtggaactacgaaccgggtcagttgattcgggtggtttgttataccaatgcaccgcaggctcgtttgttgctgaacggaaaagaagtgggccagatgaagccttacgacgataagagtggtatcatttattgggatattccttatcaggatggagaattgcgtgcagaaggttgtgatgcaacaggaaaagtgctttcatcttatgccatcaagacctctggtcgtccatacgccttgcgggctactgtggataaggaagtcttgtcaccggataaggctactgcacatgtaacgatcgaagtggtggatgaacaaggtactatcgtaaaattaggcgataacgacgtaacttgtcagattgaaggtccggcacgtttgttgggactggaaggttcaaataacggagatatgagtgattatacagataatcaccaccgtgctttccacggacgtttgctggcttatatccagactacaggtgagaaaggtgagattcgtgtgaaactgacttctcctcttttgaaaggaacggaagtggtattgaaggctgagtaatcctccttaggcagtactgctgtacttccgtgaaagtactggagtactgccagggaagtacttcggtactgcctaagaagtactgaaagcgtgccggcaggctgtctgaaaagcgcctgccggcacgctttgttttccggcatctgataaagtgatagcctgttcgtggttctggaacaggtggtgtgattttacagggaagccggatagtttaagttttcttcggtgagctgttccagcacctcatgcaggaacttggctgcttcccatttggccataggaagattcatcatcaggtagtttccgcagtcttttgcactggctcctggcacttcaccttcatagtcggcgatgaagcggaaagtttctgtcatcagcggagcaatgtctttggactgcaggtcaccttttactatcaggtagtttccggtcagacagcccattggtccccaatagataatcttgtcggcccataccggatgattgcgcaggaaagtagctgccaggtgttcaatggtgtggatagcggcaggacctaaggccggttcacggttaggctctttcatacgaatatcgaaggtagtgacgatttcacctccaacttcatctttgcgtgacacgaaaataccgcgttgcaaacgaatatggtctactgtaaagcttggtatctttttcataaagcgattatagtttgttgggtaatgctttcaggaaagtttcagtgacgtggaaagaacggtcggccatttccccccagaaattctggtattgttcaaagtgcttgtcagctcccggggtgtcactgatgatgcggaaactgatgaaaggaatctgatagaggtagcacacctgggcaatggaagccgattccatatctactgccagtccttccggaaagttatgcttgatttcgtccagttcgctgcggtcggtaataaacttgtcgcctgtacaaatcagacctccgtggatagccgtttctgtatcgagtgaaagggcacactggaagagggtttcatttccctggaagaaagtagggagaccctgaatctgtccgtaggcattgccttcgccgcaccatacgtcatggtacacaatctgctggctgactactacgtccatcactttcagacaagtgtcgattccgccggctactccggtactgatgatgcagtcgggctggaagttgcggataagttctaccgttccggcagcggcattcactttgccgatgccacattgcatcaggatgatggtattttgcttgatgtttccttcaatgtaggtgaagggaccttctttgcgttcagtcttgttctcgagttgattagccagttgcttctgttcggaagacatggccgtaatgattcctattttcatgcgttaaaaaagattttcagcggcaaatttacgacttttcaggcagtattgtgttatctttgcctgccgaaaacattaattatgaataatatgaacttgttcaagaaactattacccgatgtagtggtaatcgtgctttttgcccttatttcgtttgcgtatttctatcctgcggtaaatgaaggacgaattctggctcagcacgatgcggtagccggcatcggttctggacgtgaaatgagtgaatacctggagaagacgggggaacgtacgcgctggacaaactccatttttggaggaatgcctacctaccagatgtctccgagctatgactctaccgatacgttgggctggattcagcaggtatatcatctgttcctgcctacttacgtgtggtatgtgtttgtcatgctgctgggcttctacatccttttgcgtgcatttgattttaaggtgtggatgtcagccctgggtgccattatctgggcgttctcgtcttatttcttcattatcattgcggccggtcatatttggaagtttgtagcactggcttatattcctcctaccattgccggtatggtgctggcttatcgtggtaagctgttggctggggggattgtgacagccttgtttgtggccttgcagattgtggctaaccatccgcagatgagttactatttcttgtttgtcatgctgttcatggccattgcgtatggggtgatggcatggcgggaaaagaagatgcctcaatttatcaaggccagtgtggtactggtaattgccggcctgttgggtgtgtgtgtgaacttgtcaaacttgtaccatacgtatgagtacagcaaggagaccatgcgtggcaaaagtgagctggtgaaggaaaatagtgcaaaccagaccaatagcggactggaacgaagctacatcacacagtggagctatggcatcggagaaaccttctcgttgctggttccgaatgtgaaaggaggtgcttctgttcctttggctcaaaatgagaaagccatggagaaggccgaccctaactatatgggattgtatagtcagttgggacagtattggggggaacagccgggtacttccggtccggtatacgtaggtgcttttgttatgttcctcttcattctgggattgtttatcgtaaaaggaccgatgaagtgggcactggtgggtggaaccgtattctccatattactttcctggggacataactttatgggcctgacagatttctttattgactatgtgcccatgtacagcaagttccgtgcggtatcttctattctggttattgcagagtttaccataccgttgctggccattatggcgttaaaagaagtggtagaacgtccgcagttgtggaatgaatcacgtaagtctttctatattacttttgctttgacgggaggtctttctttgctgtttgcattggcgccaggcttcttcttcccttcgtatgtgtcttctgccgaaatgaacgcattgcagaatgcgattccggccgatcagctggctccgattttaattaacttggaagagatacgtaagtccatctttacttcggatgcctggaggagcttctttgtcgtattgataggagctgtgttgttatggggatactgtgccggaaaactgaaagcacagctgctggttggtttgctggctttgctttgtctggtagatatgtggagtgtaaacaagcgctatctgtatgacgagcagtttgtggcaaagggcacagaaatgcagcctttcctggaaccttcggagacagacaagcagatacttcaggacaagtctctggattatcgtgtattgaatctgtcggtcaatacctttaatgagaataatacagcctactggcacaaaagtattggagggtatcatgcagcgaagcttcgccgttatcaggaaatgattgatgagcacattcagggtgaaattacggctctgtataagactttaccctcggtaggagctgatttaagtcaggtaggtgatacgttgactccggtgctgaatatgctgaatacacgttatttcatcattccgttgcagcagggcaagactattccgatgtttaatcctcatgcattaggcaatgcctggtttgttaacgaggtgcagtatgtgaacaatgccaatgaagaaatagaagcgttgcatcaggtaaatccggcccacgtagcagtggtagataaaaagttccagaacgaagtgaaagcttctgtaggtgccgacagcctgagtacgattgtattgaccagctatgaacctaatgcgttgaagtatgaggtaaactctccgaagggcggtacggtagtctttgctgagatttactatccgggatggcgttcgttcattgatggagaagaggtattgcatggccgtgcagattatatcttgcgtgcgatgaatgtaccagctggaaagcatgtggtagaatttacctttgacccgcaatcactccatgtgacggaaactattgctttcattgcattgggcatattgggcttggcaatattggtcgccattgtgctggctctaaagaaaaataagaagtaaacaggccgggaagtttgtttgaagaaataaaagcgttccagtgaagaggctcaggccacttaactgggacgttttttagttttcagggcccggatgacaaaccaggcatgacgcagtacggtagatactacaccgtaatgcttgcacatgatgcggaaacgttcttttagggaagctttgtggttgcgtgtagtcattccttcattcaggtagtcgataagcaccagatgagtgtggtggagtacctggcttttcttcatgatgcggatgcaccagtcaaagtctgctgaaaaacgataatgaaggttgtagggctctacaaggtcacgtcgtgcgaagaaagcctggtgacatacgagcatgccttccttgaaacttttccagttcaggttttctggaggagccaagcggcgcatgtgcaggaagtgtccttcttcgtccacaatggctgtgtcaccatatagcacatccggaagtgtggactctgtaatggagtgtaccatcagctggagagtatcatcctcatgcagttcgtcgcctgcattcaggaagcaaaggtaatcaccggtggccagcttgattcccttgttcatggcatcatacagtcctttatccggctcactgattacggtatgtatatgttccttgtattgttcaatgatttgtaaagttctgtccttggaacctccgtccacgatgatgtattccacattcttgtaggtctgggtgatgacactctgaatagtgtcctccagtacggctccggcattataagtaaccgtgatgatggaaaacttcggatgtaaatgatgaatgttatgcattttttccggtgatgtggttgtatatttgaatgtattggctggctacagttgcttcagagtaggttgtcacagccttgcgataggcttcggagcttaatgtttcgtagtctccctctgtcagcgtccagcaaatgccgttggccaggtcgtcagccgatttatattgggccacgtagccattgtgtaaatggtcaatcatttgcggaatacctcctacattaaatcctacacaaggaatgccacaggccattgcctcgacaatggtatttggtaggttatcctgcaaggaaggagtgacgtagaggtcgacggcattgtatatatctaccagctctttttcattgcttacgtaattcatgggatagatagggaaggggaaaagtgatttgcactgttcggcctgacttcctaataccactactcctaattgctgactcaattccggttcctgttgagccagcagtttgcatgcctcaatcaggtagtctattcctttacgcttatccgtaatcttcatggagccgaacaaaagaagcttcttgtcggcaggtagattcagcttctcgcgtgcgaatttcttggtacgtggtttgaacagattagtattaatcgcattaggaatgtttgtaatggtgtgtccttgcagcaggctgcttctgcgtgccatagattccagccatcggctacaagctataaacgtaatgggagccgtagcgtagagcttttgctttttatggaacgtcttttccgacaagtcatgatgatgaggcttcagtagaagcggacagtcatgacattgtgcagtgtatttctcgcattctccggaataatggcagataccggtgaaaggccacatgtcgtgcatggtccatactacaggtttcccggaagcaagaatgcgctggatatctttcaaggaaagcatgccttggttaatccagtgcaggtgaatcacatctgcctgacggaactccggtaaggaggtaatatctgtacccgtgttggcaatatccatcgcaaaaaggttatgccgtttgaagccgttggctgcccagatgacaattcgttcccatgtgaactgccagattctgcgccatgatttcttgagggcaaccactgtcacctgatcggtttgcttgttacggaccagcatcttggcttttattccgttgttctttaaagcttccatcagtcggttggctgcgatggcagctcctccgatgcgttctgcggtattgatgatcagtactctcattagtctgtcggcttaattttattgcaaaggtacattattcttttttgaaagcatgctaccggttaaatctttttagcaggacttccgaaagttcacggctgtaattttccaggttgtaggtcgtttctgcaagttttctaccgttttctcccattttgagggcttgttccggatggtcatgcagatattgtaaagccttttcccatcctgccacatcaccgtaatctactaacataccggcttgttccagttccagattcatttcaaatttggtgtttcgggttgaaatgattggaagcccgagtgccagtgcctctaccagcgtagttagtccgacagtgtaaggatagttaaggcaggaaatgacgacaacttttgagcgagctacctccagtgctaactgatacggtatgataccttctactatgtggatatggatattgtttttcccttgaaaccggttggtgatttcctcatatttctggtcaccgttagctggggaagtatagaggtcgaattccagtccggtatggctgaaagcctggagtaaggttgccagatctcgattttcctttcctgtagagatgaactctttgtctttcgcctcattccgcatgcggtcgtagaagtccagatcggccccccaatggataaggtacatgtctttttcttttacctttccagttttcagggaatcgtctattaatgccttgctgaaaaagaacatacagtctatacccttatagaaaaggcgggaaagaagatttttcagccaacctttgctttgggggacggcttggtgatgccagacggctattggtttacggaacaggccgagagctcgtaagaatatgagaagttccagtccccggtaagaggtgccataaactacatcataattttctttacacctcagaatggcgtgtaggttataccacatcagtttccagcgtgaggtgaaatgtttgtatgggtgaagcactgggtcaatcccgtttttagggaagtgggtaagtccgtataggatatgtccaggatgtgtatgctccttccattcttttagggcagaagcaataggtcgggtgtggtaatagtatattttcatgcgccgaagtctcctttcaatgtacgtttgatgcgtcgtatggcctttgccatgaatgaattggtgcgggcatagtagcggacataggcattacgtgcctgtatattttcttctataggggaaatcttttttacaggaagtcgctccatgtacaattcggatgcgtacaatcctcctccgccgcagttggtaccgcttccatcgaatccttcgttttgcaccagcgatttcccgacgttaagcgagagtatgccttttagaaaaagtgaagcattccagcgaatggcccatgaattatttttaccttcaatttgccggcgcagcatacgggtgtaaccatatttgccgttaaagtcgaaggtataggtaagctttctgctttccagttctgtcagcagtgcctttccgtcggcattgaaatgtttccaggcgcggtcccaggtaccccaaccccagcttccggtccatttaatgagaaaagtatcgggcagggaggggtcatgagtaaaatcacaggcctggatatgacctacccgctcttcatcacgataagtttccaaggcatcattcatgaactgcaggaaatgaggggccacgacgaggtcgtcttccagtacgatgacacgaccgtaacggtttatctgggttgtcactccatcgatgatactacgggcgagtccccagttttccgcacgttcggtaatggttattttcttgaatccttgtattgaccggataaaagcgcgtacttcttttacggcagcctgtgatgtttcatcttttgccgcatccgaatagataaacaattcgctttcggctgccagttcatttttcagtagtgcctggatattccggcggacatgttccggacggttatatacaaatagcaggataggtgcgtaggtgttcgtcattttatttgagggattttactaatttaatgattcggtttccgaagtgctcccagttgttttcattcagaaagctccgatagtcttcaagggatatgggagtcgttttatagcaggcgaccgttttttctatatcctcgtagtcatgaaacgtgtagacgttcaggcgcttttcacgtgcataatccttaaatgaacctacttctggtccgataatcttgcttccgaaagagagtgaatccatcagaattcctgaactcagcaccgaatcaggacaataaggggcaagcacaaacgccgatttccggatatagtgtgccagttcctcgaatgaagggctttcacagataaaagtgacgttcgggggcgctatctggcgtatctcattggctaatgaattcggtgaacattttccaataatacatactttgaggtcttgcggattgttcttcagataggaaagatattctagtactcctttatagggtgagatgtttccccagataagtatgtcgtattccggcatttctgcaggtagtgattccggcagacggtttttggtaggatgatgaaggaaatgtatctttccggcggcatagggataatgagcctcaatcattttcacaccttcggtggcatgcgtcaggataaggtccgatttttgtgcgatgaagcgggtgaggaattttttcaatcgtgcatggcctccagcatgaggctttttgttgtgtaatacccatactattttccgtccgcatagtttcagcagtatgacgaagcagactgccacaacagactgcaatggtccgtatttggaatcgggaatactttcgaaccagttaaatataaatacatctccccaccgtttgggaggcagcaggctgaacaatgggttcttgtgtggcggattgaccacctgggatactttttcctgctctaatgcagctacaaaatcacggatataaggattggccttctggtgaggaaggatgcgcaaacgtggaaaaacggtgaagcgaatcatattcttacgattttaacagatgatgaattggctgcagtcgcgaatgaaatacaatggtgtgaaaaatgacttgatacatgattgcagcgggttgtgatagggataaagctgtttacggttgtggcagcagagcatacaactttgcagaatgccccataaattcccttttttcatgcaacgtataatttttgcagctgcatagtctgtaaaggggtaatcgcttagagccatgaaataacgttgggtaattttgcgcttatccttattgcttagggtttgtactgcggataccaatcctttcagcaagctgtagtggctgctgctcagataagaagtggcttggggatgacggcgccagtacaccaatgcttcatttatgaatcttataggtccgcaggtcacggctgccagcatcaacagtgaatcgtaggatatacgatgttccttttccacagcttccatgaagcgcggaaggatggtgcggctgaaaaagcattcatgaccgggcacatagggtttcatcaataggaaaagcgggttataaagcacgttggatgcatttttcattcccagggagtgtgtgatgtctgttgtgaagagctgggaattgtggaataacaggctgtagccttcgacgtgtttcatcagtacctcaatcttgtcggtacgccaaatgtcatcctggtcggtcgaggcaatgtattctcctgtagcccgggtgaaagcggttgagaaattatagttgaagcccagtgactgttcgttcacaaacagctttacgcgggaatccttctgctggtattcgcggacaatttcaactgtacgatcggtagaacggtcatcctggataatcagttcgtaaacggggcaggtttggttcaggatggattcaatctgttcccggagatatttctctccgttataggtacacattactaccgaaacttttacctgtggcgtaagggcttctttcataaaaggttttatttgtaatttctatctgcaaaagtaataaagatagataaacttatcttatttttttcctgtcttcttcagcagatagctgaggctttctttgaaggtttctgaaccgcatatccacatcagtcctccatagagtatggctgtaacggttatcttggtaaggatgagcagatagatgtcagttatatgcccagtgataaagtaggccgcagctatggcaagtagagctataccagcatacggaactacatcttttagtgcggcccatagagaaagttttatctcacggaacacaaaataatgccatacaaacagccatccgatattaatagccacatagactgtcagcatgtttttcagtccgtacgggctgagtatcagcatggcaatcaattgcaggatgcccaatgtgatggtattccacatgaagatattggatttccctttgctgataataaggtttgaatagagggctgtaatggggataaatgcgccacctattgcaagtatttgcaggatatgtgcgcttggtagccatttggctgtgatggtaatcgtaatcagttctggagcgatgaacgataatcccaacatggaaggaaaagcaatgaaggctgtgaatcggagcattttgcggaaaacgcgctgctggcgtgtctggtcgcttcctacctgattgaacatgggctgtgccacactgcctaccatgctgctgataaaggagtgccccatgtagttccatttgttggcttggttaaattgtccaacttctttttcggaatagtatttccctaaaatgatggaaaacaagttattgttgatatgattgaagatattggttatcatcagtttggcactgaagtttaccatccctttcagaggtttgaaactgaatttcagggtgggtctccaaggtgaaaaactccacaggcagatgttcaggacgctgatgtagacaatgctttgtgttgcaatgctccagtaagaacatcccaagcaggccataatgattcctacgatgcctgaaacggctagtccgctgatgctggcaatggttttttgtttgaccatcaggttgcggaacaaataagcgttctgtgaaatgcccaggctggaaataacaaagcctaaaaaagcatatcgagccagaggaatcagattttcattgtcgtagaaatcggctatcagtggggcacagaaaaacaagatgaggtagagtgtgacacttatggcgctgctgaaccagaatacagcgttgtaatcttcgtggcggatttctttcttgttggcaagtgccgaagtgaatccgctttcctgaagagatgctgcaatgagagaaaagatactcagcatacctatcataccgtaatcggtatcattcagaatgcgtgaagtcacgattccgaatatcaggttcaagagctgcatagcaccgttattgatgccactccaaaacaagcctttcgccgttttttctttaagtgactctgccatatttgaggattgtgtggagtttatgaggaaaagaaaattgagaatggcgggattctcttatccgctcattctcaatttctttaattatttaaagtagattattttacttcgcttcctggttttacttcgttcaaagtagtggtaacggacaatgaaccgtcaaagttttctgcgctgagaatcataccttcgctcaccaggccgtttttgaactgacgaggagctaagttggcgataaacagcacttgcttgcctaccaagtcttccggtttgtaatgctgagcaataccgctgacaatggtacggttttccagtccgtcggcaatcttgaatttcagcagcttcttcatcttaggtacattttcgcattccaatacagtacctacacggatgtcgagtttctcaaattcttcgaaagcaatggtcggtttaatcggattagccttgtaattggctgcttcgttggccttcttggtagccagcaatttatctacctgtgcctgaataacgtcgtcttcaatcttttcgaacaacagttcaggcttgttcagctgatggccttctgccagcaagtctgtacgtcccagctgttcccagtcgaagctttccatgttcagcatcttgcgcagtttttcagaactgaacggcaggaacggttcaaaagcaatggccaggttggcaaccaactgcaatgaaatgttcaggatggtagccacacgtgccatgtcggttttagccagtttccatggttctgtatctgccaggtatttgtttccgatgcgggccaggttcatggcttctttctgtgcgtcgcggaatttgaacacgttcagcagtttttctacttcttcttttacgtcggcaaattccttcagtgtttcacggtcgtagtcgttcaattcaccacaagccggaacctttccatcgaaatatttgtgagtcagcaccagggcacggtttacgaagttaccgtatactgctaccagttcgttgttgttacgagcctggaaatctttccatgtaaagtcgttgtccttagtttccggagcgttagcagtcagcacgtagcgcaatacatcctgtttgccagggaaatcctgcaggtactcgtgcaaccatactgcccagttgcgtgaagttgaaatcttgtcaccttccaggttcaggaactcgttagaaggcacgttgtccggaagaatgtagcttccttctgccttcaacatggccgggaatacgatacagtggaacacgatgttatcttttccaatgaaatgaatcaggcgtgtttcagggtctttccaccatttctcccatgaatcgggcaacagctcttttgtattagagatatagccgataggtgcatcgaaccatacatacaatacttttccttctgcaccttctaccggaaccggaataccccagtcaaggtcgcggctcacggcacgaggctgcagccccatatccagccagctcttgcactgtccgtacacattcggacgccattccttgtggtcttccagaatccatttgcgcaaccagccttcgtgtttgtcaagtggcaaataccagtgtttggtttccttcatgacaggctggcttccgctgatggcacttttcgggttaatcagttctgtgggagaaagtgtacttccacatttttcacactggtcaccgtaagcaccttctgcatggcagcgagggcattctcccgtaatgtaacggtcagctaagaatgtgtgagcttcctcgtcataatattgcatggaagttttttcgataaactcatgcttgtcatacaatttacggaaaaagtcagatgctaactgatggtgagtaggtgaagaggtacgtccgtacacatcgaatgaaataccgaattctttaaaagaatccttaatgagggtgtgataacggtccacaatatcctgtggggttacaccttcttttttagcgcggatagtgatgggcactccatgttcatccgaacctccgataaagagcacgtcttcttttttcaggcgcagatagcgcacgtaaatatcggccggcacataaacccctgccagatggccgatatggaccggaccgttggcgtatggcagagccgatgtaacggtcgtccgtttaaagttcttttccatatacgtatatagtttattctaagttgcaaccttacgatgtgcaaagatacgatttatttggaaattattcttttttgaggcgtacgaagcgaatttttcgggatgggtttaagatatattggtttcaaaactttgaaggtagaatccggtgaatgtgtttataagaatttatggagtagtcgaaatctttttgtaaccttattgtgccatagttttaattaacctgcaatcattgtgcaatgcccccctcatacttttgcacagaaattttattctattaacaggttatgaaaaaagtaattagattgttttgtttaattgtctgtatgacaggattttttacgaattctgctcaggctaaaatttttgaagatgattgggttcaaggtcttgttgtcgaccaaaatggagaggccgtaatcggtgccagtatttttgagaagggaactcaaaatggaacggtaacggatgtggatggaaagttcagattagatgtacagagctatgaacatacgctggaaatatcttatatcggttataccacacagcgtataaaaccgaaaaagggagataatctgcatattgtattggttgaggattctaaaacaatggatgaggttgtggtagtaggttatcagaccatgcgtaaaacagatgtggtgggagctgtttccagcatcaagtcaaaagagttaaacgtaactacacctacagttgggcaaagtttggtcggaaaggtctctggtgtacagattgctcaggtaagtggtgcaccttatcagagtacaaaaatacgtgtacgtggtgtggcctctattaatgcgagctctgacccgttatatgttatagatggttatccttccaatgaagatttgatgttgagtcctgaagatatcgagtctattgaagtcttgaaggatgcagcctcggcagctatttatggttcacgtgcagctggtggtgttgtgttgattacaactaagcgtggaaaagagggaaaagcgaaggtaaactataattttcagtttagtgtaaatcagctggccaaaaaagtgaaattattgaattctgcacaatttgcagatttggttgttgatggacgtaataatgcatataaaaatttcatggttaatgcaggaaaagcatgggatgatgcttactttagtgatacgaatgatgtacgtgcacagcgtttaggttctagtaatagtgcagctatgattccagaatttttatatgattttgagaatcagcgtgtaatcacaccggaatatgatacagactggcaagatgagttgtatcgtaatgctccttcacagcgtcatcatatctctgtaaatgggggtacagataaaattcgttatgaagttagtgcagcttatcagaatcaggaaggtattattctttctacgggacaacgtcgcctgaatttacgtggaaacttagatatacaagtaagctctaagtttaaggtaggagctaatttttccaatacatctaactggaatcgagaagtggaagaagggcgttttgatcatggaccgattcttggggctttgatttatgcaccgattttccgttgctatgatgaaaatggtcaattggtaaaaggtgagatgacaagttattcaagtaattatggattccagcagattgagaatccggtagcattagctacggaaacaaaaatcagaagaaacggagtacgtaatacatataatttgacagcaagttatgaaccgttgaaagatttattcttgaaggcaaatttaggaatgtataattatagtgaaaaatacgagttttatcgtcctaccagtttatcatccggggcaaatttaccaggaacagatcaggccaaagctgcggctaattctatagcaagaacttctttgcaatcagattatttggctgaatttacagcaaactataataagagctggaatcaggtacataatttcagtggtgttgcaggttattctattcaaaaaaatatgtatgatattttgggagtaaaagctactggttatcaggatgatcatattacagaagtgacaggtcatggtgctgatcctagtgatattacattaaatagtacttcaaaatcaaactggacaatgatttcttattttacacgtttgaattacaattttgcaaataagtactatttaactgcttcattccgaggtgatgcttcttctttgtttggccctgaaaatcgttggggatacttcccatcaatctctgcggcttggactgtttcaaatgaagatttttataaagctgcttttggtgatagttcttcattgaaagtgagagcaagttggggtatgagtggaaataacaatattggtaattatcaatatgctgcagtaatgaattctccatctgggactgtgattggaaatggaacgattgtatcagctatgtatccaggtggagtaaaagataatgcgattggctgggagtcaacttctcaatataacgtaggtgtggatttgggcttgtttaataatcgtttggcgatttctgccaactattatttgagtcatactcaagatttgttgttcgagcagcctgtatctgcaatttctggtgcaacttctatgctcacaaatcttccgaattctaagattcgtaatacgggatgtgatattcaagtagatggtagagtattgagtggaaaagattatagttttaatattagtggtaacatttctgttaaccgtaataaagtattggaattagatggtggcaataccattattactaatggtgcagaacgttcttataaaactcatattacaatggagggacagcctattggaatgttttatgggtttaaggtaattggaatggttacagaagcagatatggctggaattcaggccgatgatgctgtttataaagcaaatggaaataaattccctgaaggatataaattaaaaggtccggctcgttcattgtcacaatctattgcgctccaaccgggcgacatttattttgaagatgtaaatggagatggggttgtagatgacaatgataaaacagtgattggtaatcctcatccgaaatttacttatggactaaacctgagtggaagttataaagattttgatatgagtgcttctttcaatggctcatacggaaataaagtattggatggacaagattactatttatttaatatggaaggttctggtaatcaatatgtggaagcagaccagcgttatcgtgatgtagaaaatccaggaaatggttgggtttataaagcatctcgtggaggaacacagagtaatagtactcgtttgtctactttctatttgcaggatggttcgtttttcagatgtacaaacattagcgtaggttatacattctccaatgtaaagaattggtcaaaaggagtaattagcaacttacgagtatatgtggcagctgataatttgtttactattagcaaatataagggatacaatccagaggtagattataatgacggtgcgaatttgactccgggggtagattatggaaaatatccattggtgagagcatataatatgggacttcaattaacattctaagagattacacaatgaaaaaaacaatattatttactgcaattctggcagttggacttaatttaacttcgtgtgaagattttctgtcagaagataatcctaataaaataccagtagagaattattttactactgagaatgatgttgaacgtgctgtatacggtgcttatatggcattacgttcagggtcttgtatgggcgaaggaagtactatgtatacagaggaacgttcagataatacaggacgtttggataatcagtcttctgccggtgagccttttcagtttacagacttttcattactccctagtaatacttatttgaaaagtcattggcaggcgatgtataaaacagtcaataatgcaaattttgctttaaaaggtattcagactgtgacttttagtgatgaaaaagagaaagataattatgaagctgaggcccgttttgtgcgtgcgctagtatattttgatattgtgcgtaagtggggagatgctccattagtaacatcttatcttgctactccagctgaaattgaagcgcatactttccgtgaggataagaagaagatttatgagcagatagtagaagatttagagtttggaattgagaaaagtaccttgccaaatcatcagcctgaaggtaataaagggcgagcaaataaagcagctatggcaggattacttggaaaagtatatttgacaatggcccatgtgctggatacccagaatcggaaagaatatttaaactctgcaaaaacgtatctcgaaatgtgcttaggaatgaagcagtttaatcgcctgaatgaagttacttatgatgacaatgcacagactggtttatttgctgttgctaacaagtctacttgtcctgaaattcttttccagattgtatataaacaaggggataaagattaccattcttcgattgcggcagataatcagtcaattggtattacatgtaattcgcaatatccttcaaaaggtcagggaacttatgtaaatgaggatttggtaaatgaatatgaagctactgataagcgaaaagcattctcagttgtttatgctgataatcctaaagcaatggcttattgcattacaaagttccgtgatactagtgacgctgcgggtactttagcttatggaggcaatgattggattatattacgttatgccgatgttatcttgatgatggctgaggtttatgaagctttgggtgaagaaacaaaagcaatcccttatttggatgaggtacgtgaaagggcaggattaccaggttatattgaatctatccaaaataccgactacagaagtaaatatccgacactgaaattagctattcttcatgagcgccgtgtagagcttgcttttgagaatcagcgttggtatgatttactccgtttctttacgattgatgaattagtaacttatatgcatgcaaaggatccgaattgttatggtatctccaatttgcagaacttcaatgaaaaagatatttattatccgattccttatgatgagtggaagttgaatccggaaggaatgtatcagaacgaaggatattaatcattaaataaaatttgaagatgaagagaattacttgtatgatttttcttctctgcacagtctttgtactctctgctcaggagagtgcaaagactcttgtggtagatttgaagagtcatgaaacgaagaaagtattggtagtggctcatcgtggcgactggagaaatgcacctgaaaactcattacaggcctttcaaaattgtattgcgatgggagttgacatgattgagattgatttgaagatgacaaaagacaatcagctggtaattatgcacgacaatactatagaccgtacgaccgacggaaagggaaaagtttcggattatacgttggcagaattgcgaaagtttcatctgaaaaatggattgggaagagttacttttcatccaattccgactttggaggaggtattggaactgacaaaaggaaaaattctgataaacatagataagggctatgattattttcaagaagtgtataagttattggtaaaaacacagactatagaccaggtggtaataaaatccggatatgcttatgaaaaagtcaaggctgaaaatgaggatgtacttgacaaagttatttatatgccgattgtagacttgaacaatcctgatgcagaggcgtttatagaggggtatagacagatgaaacctgtggcaatggaatgctgcttttcagaagtaactccggaagttttacgtttacttcaaaaggtgaaagataatggttctaagatttggctgaacggattgtggccttcattgaatggtgggcatgatgatgaccgtgctgtggaattgaatcagaaagatgaaagctggggatggttgttagaaaaaggagcttcattaattcagacagaccgtcctgtgcagttactgcaatatttaaaagaggagggcagacgatgaaaaagataggtatatgctgtttgggtttactgttttccttatgctcgtatgcacaggttcagagagaataccatttaatttctgcagagaagatagagaataaagcatattattttacagctctgttgcgtgaatttggtgaagtagattctatgatttgtcatgaccctgttttgaaaaaaatggggctgaagaaattagagcgtttgcatgaggcaaaaacttcgcaggaacgggtggaagcgatgaaattctctgcagaagagattacagaagctgcaaaagcattggcaagtctttataagccaggaaatccgattgatcggttgttgacaaggcatataatcccttccggttgctatcagcagtataaagagaatggggcagagttcttgaaaaaaatctgggagcaagatgcagaaggaatgaactatgcgatagaggtgtatgcagcagcccggaaacctcattatcctcaaatcgattctattggcttttacatacatagccgccggtttatcgaggaaattcttcctgcttgtcagcaaaatattgcatttgaggtaaaaacacatcctgttttttattctgtacctatggctgctgttaaggctttgcttgatgtgaacgaccgccgtcagtcgattgattatgagcctctgtgttcgacagaaaacagaatggcatatactcaggttagccaaacagaatggaacaattatccttatacagccattttagtgttaggcgcaggacccgaggagcccaatgtatctattagcccagaagggaagcttcgttctgcctatgcagccatgatgtatcgtcagcatcaggcaccatttattattgtatcgggaggaagagtacatccatatcatactccttacaatgaggcttttgaaatgaaaaagtatttgatggacgtttggcagattccggagagtgccattattatagagcctcatgcgcgacatactaccacgaactttcgtaatgcagcacgtattatgttccgtaacggttttcctgtagaaaaggccgcagtggtaacgtcttctttttctcatttaaattttgtggaaggaatggattcacgttgtcttcgtgaattaggttatgtaccttatcgtttagggaaaaggctgaatgagcgtatgatggaatttttcccgttgcaggagtcattaattattcagcccacagaacccattgacccttgagtaggaattataacttgaaacgagaattagtcttatgaggataaaagcatttttgttttttctatggtgcctgtttccccttttgttatctgcgacgcctcataacattgcctctttggcaaaggtctcttgctcttcagctgcagggaaggagatggatgcaacacgtgtgtcagacgggcttatacgtatactgaatacaggagaatggcgttcaggtagccgcctggatatgaggggcagagttcgtcccttcccctgggtacaattggattgggattaccctgtaaacattagccagattattttatatgattgtccggatataagcagccatacggcggcaggtactctttcattcagtgacggaacttcgattgatgtaaatttaattgctaatgatggtgcacctaaagtggttgattttgactctaaaagagtcagttgggtacgtttccaggtaactgatggtgaaggagagaatcttggcctgtccgagatagaagtcttgccttctcctgaatcttattcagactatgtctcttgggtaaatccttatgtggaaacagccaagggacgttatttcttttttgtgaccggaagtcttccttttggaatgatgagctctgctcctctgacacgtaatataaatcaaggcggtgggggatacagttataactctacccgggttttaggttttcctcagattcatgactgggttatatcaggtttgaatctgatgccgataacaggtcagattgatacccgtaaaggtgaaagtgggtggagctcttctttttcgcatgatggagaaatcgtgcagccaggctaccatcggttatttttggatagatatggaatatgggtagaacagacaatcactgaacgtgtgggattttatcggctgacgtatgcacaagagtcactggcgaaagtcctgctaggacttggcggacatatatctacttctacgatggtgggtgcacacgcttcgcgcgtaaatgaaacggaaatcgcgggatattttgacaccacaggaagagtatggggaggagtcgataaggcgcgggtttattttgtagtccgttttgaacgtccttttcgtacattaaacagttggactggaaatgaaagacaatgtgatattactcagatgaacggctctacagaggtgtataccataccagggtcttcttttaagcagtcaccaacttctggagtagaagctgattttgggggggtgaagcctggtgaacagattttggtgaaaacggccttttcgtatgtaagcatagaaaatgcaagagagaatatggaccaggaatgtcctcattgggattttgagcaagtgaggactgaagcattatctgtctggaatgagtggttgggtaaaattgatgtaaaaggtggaaccaaccagcaaaagatgaaattttatacggacttatggcatgtgctgctgggaaggcataaaattgatgatatagatggctcttatccggattatttgaagggagggacaagagtaggaaaagctacccgtatccacacactttctccagagtataagtcacgtatgctgccaaaaggaaaggatggaaaagtgattcatcacatgtataattcggatgcattgtggctgactcaatggaatttgaatacattatggggattagcctatccttctgtattggatgagttttctgcttcatttcttgaatatgacaggaatggagggttgttgcctcgtggtccgtctgtaggtgcatatacgtatataatgacaggttgtccggctacttcgatgattacaagtgcataccaacgtggcatttatcgtaagtggaatccggagaaagcttttcaggcgatgaaaaggaatcatgaaaaaggaggaatgctggcttttgatatggaccgggagctggatttttatgtaaaacatggatattgcccgaatgatgccggtctgaccatacagtgggcttttgaagactggagtttagggcagatggctctaaaaatgaagaaacagagagaggcaaagtattttcagaaacgttctatgggctggaaagtttcctttcatccggagttaaaattaatgataccgcgaagtgaaaatggtgataggctgcatacggaccctctgtcggaaaaggggtttgttcaagctaatgcatggcaggctacttttggtctgtcgcacgatattcagggtttagcccgtatgatgggaggaaaagatagtctggcggtcagattggatgaggcttttcgaaagtcggcagcagatgattttctgttcagctatgtaagttatgccaatcagccgggttgctcaagtgcacatgtgttttcgcatgtagggtatccttggcttactcagtattgggtacgtcaggttgggaagcaaacgtatggagctatcactccagaaaagggatatactggaaatgatgaagaccagggacagatggccggtgtcagtgctttgatggcaatcggattatttagtctggacggaggttcttcctcgcatccatgctatgacatcacaagtccggtgtttgatgagattacgataaagctggattctgattattatgctggaaaagagtttaaaattgtgactcatcataattctgaggtaaactgttatatacaaaaagctacgttgaacgggaaagcttataatttctatcagttgctccatccagattttgtacatgggggaatattagaattgtggatggggtctgctcctaataaaaattgggggaaatctatgtcggaaaagtagtttggtaatgatatgaaaatattttttcttatgacataaaagctacttttatgacagagtaaatacaaagtgaactcgtgactggataacgattccttgtttttccttgtgtaaggagaggcaaggaattgttgtttttatcagtgtgctaagaagagactgaaatgtctttatgtaaatctctgtttattggagagatttttatgtttcccatgagggaaacataggtttctccatgcggaaccgtatgtttctggttcggaaaacgtaggtttctctgtagggaaacgtagaaaatgtaaagggatttttcaaaaagggcagaaatgttctatgtttcatggtcgtaagcatgttccgtttatttccgaatcttattaatagatatttttaagacttaaaaatcagtctttaaaagtgatgaagagaagaaaaatgcatatttttgtattcgaaactaaaatccttaaataaatagtatgagaaaaatcgctggttttgtttgttcatggtttagcgtttctttagtcaaatattttagtatgagtgtcgttgatttctgcagaaacggttatttcttaagataaatatgtaaactttaaatttgatacaatgagacatctgattctatgtagtgtgatgtggttgtgtggactgatgatggctgtaggccagaatgtgccacaagtgattcctgccttgcagcagtggaaatcggcaaaaggaaaactggtacttccggaaactggaaaagtgattgtttctttagatgaagagattgaactgaaaggagaggccgaaatcctggtgcaggatttgaaggaaatgtttggttgggagtatagtgtcgtagtaggaaagaaagaaaaaggagctgtttatctgactttgggtaagccggacaaaactttgggtgaagaaggataccggatgaatattcagggtgaggttaccattgaggcacctacttctaaaggtgttttctggggaacgcgtacgttgctccagatgctccataaccaaccggaagggttgatgaagggccgggctacggactttcctttgtatccgaaccgaggattcatgattgatgtaggccgtaagttttttacgatggattacctgcgtgattatgtcaagattctttcgttctataagatgaatgagctgcaggtacatttgaacgacaatggctttgtggaattttttgacaatgactggaacaagacgtatgcagctttccgtctggaaagtgaacgtttcccggggctgacggcaaaggacggttcttataccaaagaagaattccgtgattttcagattatggcagcacgttatggggtaaatgtgataccggagattgacgtgccggctcattcattggctttcacacattataatccgcgtctggcagccgataagaaagagtatggtatggaccacctggatttatacaaaccggaggtttacgaatttgtggatgtactgtttgacgagtatttgtcgggtgagaatccggtgttcgtagggccggaagttcatatcggaacagatgaatataatcagaaagaggcagagcagttccgtcattttacaaatcattatcttgatttcgtatcaaaatatggcaagactccgcgtttatggggaagcttgagcatgatgaaaggaaatacgcctgtggatttgaagggaaaggtggtaagtgcatggaatcatggctggatggatgtacagacttgtctggatgcaggagctaaagtcgtaaatctatgcgacgggttgttgtatatagttccggccgtaaattattaccatgatttcctggactatcagtggttgtatgaaagctggatgccggaaatgatgcggaaggatgacccgaagatgactgtgcgtcatcccaacttcctgggtgcgatgctggcggtctggaacgaccgtgtgggtaatggaatcagcgaacaggatgtacatcttcgtactttccctgggttacaagtagcgtgtgaaaagatgtggaaaggtgagaatgccgataaagtgccttttgaacaattcatggcgctttgtgcggttactcctgaggctccgggggtaaacctgttggccaaggtagacaaacagactacgctgactgaaacaggaaaagaagtgactttgtcaggtacagaagtggtgactacggaagtcgatgaaattggatatccctatgcggtggaatttgaattgtgtccggatgcaacgcctaatgctgatgcgatattattcaaaggtccgcattcagaattcgtgtccaactggcagaataccggtaagtttgctttccgtcgtgatggatatgagtttgtgttccatgcgtatcgtttgcctgccggacaatggacaaaagtaagaattgaaggagatgaaaagggtacctccctgtttgtaaatggacagctgcaggaaagactggaaggccgtgtgaaagaggttttcaatgaaaagtggcagcgaaaagataaattatggtatcgggaaaccttgattttccccttgaaacagctgggagataccaagatgggatttaaaggaaaagttagaaatttagtatgtattccactttaatatagcaaatgttatgatgaaaatttatcgttttttgatggtcctgggacttctggtatggatggctcagaatgtatcttcgcaaagcagatacgataaagacaggctttataatgtattccctgcaaaagtatcaaataaggtactgggctatgataagggttcgtctgtgatattgaaatccttgagtaaggacgaccagaaacagcagtggaacattaacgagttatcgggaagttgccgttttgtgaatgtattcgaagacaaggcgctgagagctgacgtagaccataaggcattggtcgttacagaggtaaacggaagtgatgaggcgcagttgtggagcatacaggaaaccgcaaacggggtgagactggttccggccaatactccgtcgcttatgttggtatgtcagaaggacggccgtctgcagttgatggacagaaagaaggctgaaacgatggaagcttctttgttccagatacgggtaagcgccgtgcctatgcccgaaggagcgggtatggctgcacgcgaaaaagtgtactgggaagatgaaactcgctttgaagaaaataaggaagcaggtcatgccacgtatatgccttatccttcagagaaagatatgctggcagacaaggctttctatgaccgcccgtgggaggaagtacataactctgcctatatgctgctgaacggtacatgggctttccattgggtgtcagaaccctcacaacgtccgctggatttttataaggaagatttcgatgtatcgggatgggaccgcattcctgtgccgtctaactgggaaatgcagggctacgaccgtccgatttatgccaatgtagaattcccgcatgccaacacaccgccttatattcaggcacgtaaaggttttaacgatggcggaaagaactatggtatcaatccggtaggttcgtatgtacgtacgtttaatttgccggaaggctgggatggaaaacgtactttcattcatttcggtggtatttacagtgcagcttttgtgtatctcaacggaaaatatgtaggctattcacaaggagcaaacaatgtagctgagtttgatgtgaccaagtacctgaaaccgggcgaaaatcgtctggctgtgcaggtgttccgctggtgtgacggttcttatctggaatgtcaggatatgttccgcatgagtggtatcttccgtgatgtgtatttatataatgtaccgaaagtcagcgtgcgcgaccattacattacttgtctattggataaagacaagaactataaaagtggaaccatgaatgtgaagttgtctttggataaccgtgacaagctgaagggtaccaagaatctgctggtgcgtctgttagatccggaaggccgtaaggtagccgaatcggaagtggctgtgaaatacgctccttcttctccggtaagtacggctaatgtgtcattcgatttgacagatttgtctttgtggactgctgaaactcctaccttgtatactgtgcaagtgatacagcgtcagggaggaaaagatgaaatggctttctctacgaagtacggtttccgtgacatagaggtgaaaggctcactgctttacttgaatggcaaacgagtgttcttcaagggaaccaaccgtcacgatacgcatccgatgtatggtcgtgcggtgacaacagagtctatgttgtgggatgtgctgaccatgaaacagaacaatatcaatacgattcgtacgtcgcattatccgaatgcagccaaaatgtatgctatgtttgactactatggtttgtacacaatggatgaggctgacctggaacaccatgccaaccagtctatcagtgacatgccttcctggataccttcattcgtggatcgtattgaccgcatggtgctgagagaccgcaatcatccgagtgtgattttctggagcttgggtaatgaagccggaggaggagccaacttccgtgattgttatgacgcagctaaaaagctggatagtcgtccggtacattatgaaggcacacgtgatggaaagtcatacggtggtaaccgcttcagtgatttctactccaagatgtatccgagcatggactggatggatgagcatgtaagtgcgtttgaaaaaccgctcttcgtgtgtgaatatgcgcatgccatgggaaatgccatcggtaacctgaaagaatattgggaaagtattgaaggcagtacggctactatcggtggagctatttgggactgggtagaccaggctatttatgaaccgcatgaaataaagaaaggtatttaccgtctgcatacaggatatgacttccctggtccgcatcagggtaacttctgttccaacggtattgtgccggctacacgtgaagaatctccgaaactgaaagaggtgaaagccatttatcagtatgtggcctttaagtgtgtaggtacggatgcttctcataatatggtcaatgtacaggtacgtaacaagtatgcattcttgtcattgaaaggcttcgatttgaagtgggaaagcgtgaagaatggagtgattgtaggagctgacagcttgaaactggaaaatatccttccgggagattctacggtgctgaatctgaaactgtctggagtaaacctggcagatgccaagaaggctggtgatgaagtgatggtcaatttacatgtacgtatgttagcacctactgtatgggctgaggctggacatgaagtagctgcttgccagtttgaattgcagaagagagccgatttaccacaactgacgtttaagaagaagaaaaatgaatggaccattcaggaaaccgataaactgttgatgctttataacaagcacctccgtgcagcttttgataaagctaccggacagatggtacaattgaacatggctggaaaggaaatcatcagtcataatggcggtttcttgtatgataaccaccgctggattgagaatgacttgtttaaggaagttgctaacggactggatgcagccggtacgtgtgaggtaagtgtggataaaggaattgtacaggtaagtacctctcgtggcggttctttgtgtgcaaccaacattgtgtacacatttatgccgaatggagtaatagacatggatgtacgtttctctcctcagactgcaaacttacgtcgctgtggattggtttgcctgctggattctactttgacccaggtagactattatgcacatggtccttgggaaaactatgttgaccgtaaggatgcatgtcctgtgggacgttacacactggatgcaaatgatacaggcaagtatgtgaaacctcagtctatgggcaatcgggaaggtttgcgtagtatggatttgaaggatgcttcaggaaagggtatccgtatccagacacagggcaatgtttctttctctgctttacgttatacggatgaagacttgatgaataccaaacatacttgggaattgcagccacgtccatacgtagtgcttcacctggatgcagctttgcgtggaataggaaatgcaagttgtggtccggaaaccatgctgaagtaccagattccgcagaaaccgatgagctataagcttcgtatatctgctttgtaaccaaataacctaaatatacttatgaataaattttaccccgttgccggtatggttgctttatcggccgtaactacagcctgtcagcaggctgataagcaagagaagaagcaatacaacattgtgtatatcatgaccgatgaccatacggcacagatgatgagctgttatgatacgcgctatatggaaactcccaatttggaccgcattgccaatgagggagtgcgcttcacgaacagttttgtggcaaactcgttgagtggtcccagccgtgcctgtatgattacaggcaagcattcttgtggcaacaagttctatgataatactacttgtgtgttcgacagtgcacagcaaactttcccgaaactgttgcagaaagccggttatcagacggcgattatcggaaagtggcacctggaaagtctgccttcagggtttgattactggcagattgtgccgggacagggggattactataatccgaatttcattacgcaacagaatgataccattcagaagcacggttacataaccaacatcattaccgatgatgccatcgactggatggaacacaagcgtgatgacaagaagccgttctgcttgttcattcaccacaaggctatccatcgcaactggatggcagatacttgtaatctggccttgtatgaagacaagaccttccctttgccggataacttctttgatgactatgagggacgtgaagcggctgccgctcaggaaatgagcatcgtgaaggacatggatatgatttatgacctgaagatgcttcgcccggacaaaaactctcgtttgaagacattgtatgaaagtttcctcggccgaatggatagtgctcagcgtgcagcatgggagaagttctatgatcctattatcgaagatttctacaagaaaaatcctcaaggaaaggatttggccaactggaagttccagcgttacatgcgcgactatatgaagacggtgaaatcgttggatgataatgtgggtcgcgtattggactatctgaaggaaaaaggattactggagaatacgctggtagtgtatacttccgaccagggattctatatgggagaacatggttggttcgacaagcgtttcatgtatgaagaatccatgcgtactccgctgattatgcgtttgccggctggattcactcgtcggggagacattactgaaatggtacagaacattgactatggacctacttttctggatttggcaggagtagaaattccgtctgatatgcacggagtatctttgttgccgttgctgaaaggtgaacacccgaaagactggcgcaaggctttgtactatcatttctatgaatacccggcagagcacatggtgaaacgccattatggagtgcgtacagaccgttacaaattgattcatttctataatgacattgatacatgggaattgtacgacttgcaggcagacccgcacgaaatgcacaatctgtacggacagaaggagtatgaggcagtggttgacgagttgaaggcagaaatgctgaaactgcaggaacaatatgatgatcccgtgcgtttctcgccggaacgggataaggaataatccgtaagaagatagttataaatggaaaatgtccggatggctttagtgagcagtccggacatttttttgtggtatgctataggaatttagcttcattctcagcagctattttcttaattgcctgttgcgaggcgatgaaaccgcctccgagtacacggttcccttcgtagaacactgccgactggccgggagtgatagcggaagcctcttgctcaaaccggattaatagttgcccgttgtccagcagaattacacggcagggaattgagcggctgcggtagcggatacgtaccgaaagctccttgcagttgagtaactcctccaggctggtcacgttatagtcttccactaacatgtagtaagttttgagctggtcggcatcccctaacatgaccgtattcttggccggattgattttcagcacatacgccggtttgcccaaagcaatctccagaccttttcgctgaccgatggtgtagtaggcaaatcccttgtgctgtcccagtttcaggcctttgctgtccacaaaccatcccggaccaattctctcatcaatgtcggggcaatgctctttcaggaattcccggtaatctttttcgatgaagcagatttccatgctttctcctcctcgtgctttggcttcaaaacctttggatgccaaataatcgcgcacgctggctttggtcattcctcccagaggaaacatcatgcgtttcagaatttcttgcggaagtttccacaagaagtaggactggtccttcagcgggtcgtctccggtcaggatgtaacgataaccgttgaggtctttcagttggcagtaatgccccgtagcaatccaggcacagttgcatttgtctgcccattcacacagaatccgttccttaaataaaggattgcacatgacacaggggttgggagtgcgtccgcgcatgtattcgtcaatgaaatactgcacgatgacctgccggaactccgtacggacatcggccacgtggtgctcgatgcctaaacgtgctgccagctcctgagcttctatgacttcattgggctgatcattcccgggagtgaaatgagaggccacgtcccaggtacgcatcgtgacacctactacctcatacccttgttcctgaagcatgatgcaggcagccgaactgtctatcccgccactcatgccaaccagtacccgtttttctctttctttcatgtaaacaagttttgtgttagaagaataattccggctgacggcgggcactgaacttctcgtgaaggatggcagcaaacggggtattgaactcgcgggcttcgtttggacagcatttcacgcaggcacagcatttgatacacttgtgaatatctgtttcaatggagctctggtcttcactgaaatggatggcatgtgtagggcagacttcaatacattctccacaagcaaaacaaccgtctgtgcaagtcgggcaggcgggggcaccgggtgtcaattgtttgtaggggaaatttccttttaccgttaattctgtgatgggggttccggtagcttgcagtttttcccatttttccagactgctttttccaaactcacgggcctgttgcaaatcatctgcatccggacgtccggcagcaatgggaagttccggtgtactaaaactatgttccccgatgaatgcacctgcagtgagaggtacaaaaccgagttggacagcggtgtcacggagctccagtaaggcatcctcgtaatcacggttgccatataccacgacaaggatggcgggtgagccgttgcctttgagtcgttgcaggcgctggagtgccgtggcggctacacggccaccgtataccggaacggcgatgacgcacagttctccgttcatttcaataggggaggtttgttcatccagcgtcaggtctgtttccattcttcttcccatgccgatgccttctccgatagctcgtgcaatcttggccgaggtctgtgtgggtgagaagaatatcaggtgggtaccattgagttgggttgttgctgatgtcataagcttattctaataggttttgtagtagacaaaaatacaatatataaacgaaaatcgggattcttcatcggggattcttcttttattcgtacttttgtggtcatacttttaaagaatttatggaagaacaatttgacatacgcgattataaaccaaccggaaaagagcgtgattttgagaacgctcttcgtccgcttcagttcgaagatttcagcggacaggacaaggtggtggataacctgcgcatctttgtaaaagcggcgagacttcgtgcagaagcgcttgaccatgttttgttgcatggccctcccggattaggaaagaccacactgagcaacattattgccaatgaattaggagtgggatttaaagtgacttcaggaccggtgctcgacaaacctggtgatttggccggagtactgaccagcctggagccgaacgatgtgctgtttattgatgagattcaccgtctgagtccggtagtggaagaatacctctattctgccatggaagactatcgcatcgacatcatgattgacaagggaccttcagcccgcagcatacagattgacctgaatccgtttacgttggtgggagctaccacacgcagtggtttgcttacagccccgcttcgtgcccgcttcggcatcaacctgcacctggagtattatgatgattcagtactttcacgcatcatcctgcgctccgcacgcatcttggatgtgccgtgtgatgcagatgcggcaggagagatagcttcccgtagccgtggtaccccccgtatagccaatgccttgttgcgacgtgtgcgtgactttgcacaggtgaaaggttcaggaagaattgatttggagattgcccgttttgcactggaggctctgaacatcgaccagtatggtctggatgagatagacaacaagattctgtgcacgattatagacaagttcaagggaggtcctgtgggactgaccaccattgctacagctttgggtgaagacccgggtacgctggaagaagtgtacgaacccttcctgataaaagaaggcttcctgaagcgtacccccagaggacgagaggtgacagagctggcatataaacatttaggaaaaagtaaatacaatagcgaaagaacgctgtttgattgataaacattatggccggaataaaatctttggcaaaggatactgccatttatggactgagcagtatcgtaggacgttttttgaattatttgttggttcctctctatacggcagtacttcctgctgcttccggaggatatggagtcgtgtcgaatgtatatgcctatacggcactgattctggtgttgctgacctttggtatggaaacgggatttttccgttttgccaataagtcggacgaggatgcgcagaaggtatatgccaattccctgctgtttgtgggaggactctcgctgctgtttgtggtgctgtgcatggtctttttgcatccgctctcagccttgttggagtatccggaccatcccgactatattgccatgatggtgtgtgtggtggccctcgattccttccagtgtatacctttcgcctacctgcgttataagaagcggcctgtcaagtttgcggccatcaagttgctgaacatcataggaaacattctgctgaatcttttcttcctgctggtatgtccgtggctcgatgtccatgcgcacgaaaccgtcagctggttctataaccccgattatctggtgggatatattttcgtgtccaacctgattatgtcggccttgcagatattcttcttcatacccgagctgcgcggtgtgtcctaccgtatggacaaggtactgatgaagcgcatgattaactactctttcccgattctgatattcgggctggtcggtatcctcaatcagacggtcgataagatgatttatccctatctgtttgatgaccgttcggagggactggtacagctgggtatttacagcgccaccagtaaggttgcattggttatggccatgtttacccaggctttccgttatgcctacgagccctttgttttcggtaagaataaagatgctgacagcaagaagatgtattcttctgccatgaagtacttctttatcttttctcttttggcatttctggccgtgatgggttacatggacatcctgaagtacatggtagcctccgactattgggaagggctgagcgtagtagccatcgtgatgctggccgagataatcaaaggtatctatttcaacctttctttctggtataagctgacggatgaaacctattggggagcttatttctctcttatcgggtgtgccgtgattttaggcctgaacatctggttggtacctacttatggttatgtagcttcggcctgggcatctgtagccggatatggcgtgattactctgttatcctatttcatcgggcagaaaaaataccctgtggcttatccgctgaagcggatgaccacctacctgattttggccttggtgctttatgtcttgtcgcaacaaacacctatcgccaacctttggttacgtttaagctaccgcaccttattaatattggtttttgtggcatttattatcaaaaaagatttacctttaaggagtcttccatttgtcaaccatttctttaaataagaaatgtggggtggggcatataggctgaattgtaatttataaatcggataagtatggaactagggaacaagaggaaattcctccttcgtaaattcttcaatgagtatctggacttgaaccggagcaaggaagatgagcagctgacggtagatgccatccgcagtggagtagagtttaaaggaaccaacctttgggtcttgatttttgctacctttattgcttcattggggttgaatgttaattctacggcggtaattatcggtgccatgttgatttctcctttgatgggacctatcatgggagtgggcctttctatcggactgaacgatttcgagctgatgaaacgctcactgaaaagttacctggtagccacgctgttcagtgtgacgaccgccacaatttatttttcttttactccgctggatgaagttcagtcggaattgctggcacgtacctcgcctaccatatacgatgtgttcatagccttagtgggtggtctggccggtattgtggcattggccacgaaggaaaagggaaatgtaatacctggtgtagccattgctacagccttgatgcctccgttgtgtacggccggtttcggcattgccacgggtaatctgttgtatttcttaggtgccttctatttgtattttatcaactccgttttcatcagcctagctacttacatcggggtgcgggtgatgcacttccagcgcaagcagtttgtggataaagctcgtgaaaagctggtaaaacgttatatcatctggataaccatcggtacgatgtgtccggcagtctaccttacttataatattgtgcgggaaaccttttaccagtctgcggcaaaccatttcattgcagaagaattgcagttccctgactctcagattttaagtcgagaaatctcctatgacaagcgtgaaataaaggtcgtgtttgtgggaaaggaagtctcaaaagaccagattgcagccgcccagcatcgcctggcagattataatctttcgaaaaccaatctggtagtattccaaggaatgggagacggcagtgcggtagacatcagcaacatcaagtcgatggtaatggaagatttctatcggaacagcgaaaaacgcttgaaggagcaggatgaggaaatcaatactctgcgtaagcagttggctgacttttccggttcagactggatgggtaagcagttagggcaggaattaaaagtcttgttccccgaaatcaaaactctttccgtttcaaagagtcttcgtctgtcggttgacagttcccggatagacaccttgacatacgccattattgattgtcagcgggtgcctgattcaaagagccgtgacaaaatcgtgaaatggctgaaagcaaagacgggagatgctcatttacagctgattgtggaatagtccgcaagccggattttattgcataaaaaaacgtctttacgtttagtttaaaacacaagtacgttttagattaaacgcaaagacgtttcgattcaaacgcaagtacgtttcgattcaaacgcaagtacgttttagttcaaatgcacttgcgtttttttgtcttcaaaaattagcttacttcaccttctttgtacagcggatggcagtcacttcctgagcctgtgggttggttgcttttcgcgtgcagtaatcaaattctgccgatttctctccgctgaaagaattccatttcagtttcagtttgacagtctctccttgcgtatcggtcagttcatccagtttgaaagcaaccagtgcatctcccattttgccctctgtatcgccaaaagcattgtggcggaattctacttcataagaattgtccgggttctttgtactgatcaggttgacaaaatgcggttgtccgttgccccaacgagtcgcaaaccgaagtgtcaggtacccgtcctctgcaatggttacccagtcattcagtatttctaccgggtcgtttccatacgtacgattgttttcctcctctcccaaattaggagccattggtttggttagtatactgtctatccagttgatgaatacagctttgtcatattcctgaggagcttcgtcggccaattcaatattggccagtgctcttacttccttctcaccaaaaggagagcttgccatgtttaccggacgcaaggttgtgctgtcatccagttgcaagtatggtgtattgtctgcactctgttttacagtgacaagtgcattggcgtaatagtgtgaaagagaaaggttgttatcgtcatcgtccagacacgattgaccccccatagataaacacagagctgtcaggatgaagaatcctttgcgaatgaatgattgagttttcataatacattattttttaagtttactctcttcttgtcgttttgtacataaaatgcttgaagtgggtaattcctgcatgtaaaatggttaaatggtgttttattttcgcaaaggcacaaaaaaagcagttacgaaattcgtaactgcttttttgtggaccagccagggcttgaacctgggacctccagattatgagtctgttgctctaaccaactgagctacaagtccgacatttcagaagaatttgtttggaaatgcgttgcaaaagtaatggtttgagttgaaatctgcaatatttggttagaaaaaaatgataaaaaaaactaatggaacagatgcttgcaatatatgttgtatttttgccgatattaataattaattatcagacgtatgtcacacaacacacaagattctcgttttaaggggttaaccgaccaggaagttcttcaaaatcgtcaaaaatatgggatgaatctgctgactcctcccaaacgtccgtcaatctggaaactgtatctggagaagtttcaggatccggttatcaaagtgctgctcgttgcagccgctttttctctgttgatttcaatcattgagagtgaatatgcggagacaatcggtatattctttgctattttcttagcgaccggtatcgggttctattttgaatatgatgccaataagaagtttgatttgctgaatgccgtaggggaggagactccggttatggtgattcgaaatggaaaggtgcatgagattcctaagaaagatattgtagtaggagatgtagtgatattgaataccggtgatgagattccggcagacggggtattgctggaagcagtatcattgcaggtaaatgaatcaagcctgaccggggaattgatggtgaacaaaacaacggatgaggctcatttcgatgaagaagctacttatccgtctaattccgtaatgcgtggaacgacagtgacggatggtcacggagtaatgtgcgtagaaagagtaggggatgctactgaaattggtaaggtggctcgacaggctacagaacagagtcaggaacagactccgttgaatttacagttgaccaaattggccaatctgatagggaaggtgggttttacaattgcgacactgaccttcgtaatctttacagcgaaagatttatatgttcatttaaataatacaactattaccgactggcatcagtggcttgaaatagcacgcatcgtgttgaagtattttatgatggctgtcaccttgattgtagtagcggtaccggaaggattgcctatgagtgtgaccttgagtttggcattgaatatgcgccgtatgctgaaaacgaacaacttggttcgtaagatgcatgcatgcgaaacaatgggagccattacggtgatttgtacggataagacaggtacactgacacagaacctgatgcaggtgtatgatgccaagttggatgaatctcagaagaacctgatagcagagggtatagcaactaactctactgctttcctggaagagaaagagggagaaggtaagccgtccggagtaggaaaccccacggaagtggctctcttgctttggttgaatgagcagggaatggattacatctcattgagaaatcaggcaaagacggtaaatcagcttactttctctacggaaagaaaatatatggctacgctggtcgactcttctgttttgaacacacgtgtgctttatgtgaagggggctcctgagattgtgatgggaaaatgtaacctggaagaaagccgggttaagcaatataatgaacagcttttggcttaccagaatcaggctatgcgtacattgggagtggcttataaggtaattcctgaaaatagcagtacggattgtgcggaactggtgaaggaaggcggattgacattcatgggaatttttgcaatcagtgatccgattcgttcggatgtgcctgatgcggtgaagaaatgccagtcggctggtatccgtgtgaagattgtaacgggagatactccgggaacagcaactgaaatcgcacgacaaatcgggctgtggacatcggaagatacggaacggaatcgcattaccggagtggagtttgctgccttgagcgatgaagaagctttggaaagagtggtcgatttgaaggtgatgagccgtgcacgtccgatggataagcaacgtctggtacagttgctccagcaaaaaggtgaagtagtagcagtgactggtgacggaacaaatgacgcgccggcattgaatcatgcgcaggtgggtttgtcaatgggaacgggtacttctgtggcgaaagaggccagtgatattacgttgttggatgactccttccatagcattgctactgcagtgatgtggggacgttcgttgtataagaatatccagcgctttattgtgttccagctgaccatcaatgtggtagctttgctgatcgtgttgctgggtgcctttttaggtacggaacttccgctgacggttactcaaatgctgtgggtgaacctgattatggatacgtttgcagcgatggcgttggcgtctattgcgccgagcatggatgtaatgaatgaaaaacctcgcaagcgtactgattttatcatatctcctgccatgcggaacaatatattcggtgtgggtgccggattcttgattgtactgatggggctgttggctttctttaagaacatgcctggcggtatggatgtgcatcatctgactgtcttctttacgatttttgtcatgctgcagttctggaacctgtttaatgccagcgtatttggtacgaatcattctatctttaaagatgccggtcatgcgatgggtatgttaggagtggcattgattattctggttggtcagttcattattgttacttttggtggcaaggtcttccgtacagagcctttgcctgcattggaatgggcttatattatagccggtacttctgtggtactttggattggtgagatttggcgaggagttaaacggatgatgaaaaaatgaaccggattaaaaatattatatttgatttaggcggtgtgcttcttgatttggatgtacaccgttgtttagagcgtttggagggtatcgggctgcatgaagtgcgtcagtggatgactggaacgaatgaaaaaggtttctttaaagaatatgagtgtggcacattgaccacggagcagttccgggaccggattcgcgaagaggtgggtcgtgaacttccggacgaggagattgaccggatatggaacagcatgttaaaggaaattccggattataagtttgaattattgctgaagctaaaggaaaactataatttatatttgctgagcaatacgaatgacttgcattggaaagagtgtgcaggtaagtttatttataaaggtatgccgatgcttgattgctttacgcaggtatttctttcgtaccggatgcatctggcaaaacccgatgtggaaatctttcagactgtgctgaaagaggcaggacttaaagccgatgaagtcttgtttatagatgattctgaagagaattgtcaggcagctgctaagttgggaatcggtgtgtgtcattatgtaccaggagataatctggaggtacagcttcaaaaatttatagtgtaagcaaatgaaaatagttactggctctacggccgcaaatcttcctgcatgtgtggcaaccataggttgttttgacggtgtacatagaggacatcaatacctgatagagcaggtgcataatattgcgaaggcgggaggacttgcttcttgcctgataacttttgcttctcatcctcggcaggtactggatacggattatcgtccccggctgctgacatgcttgtctcagaaaatagaatgttttgagcattctcctattgaatattgtgtgctacttccttttacgaaggaattgtcgttgctttctgcccgtgaatttatgaggattctgcatgagatgtataatgtgcagactctttttgtaggatatgatcatcattttggacataatcagggagaggggtttgaggaatactgccaatatggaaaagaattaggcatgcgtatgatgcagtcaagagctttggtagaagatggtacttctattagttctacgttgattcgttcatgtctgcttgcaggagatataaagaaagcgaatgcttatctgggttacagctactatttaagcggaagagtggttgacggaaagaaagtggggcgtactttaggatttcctacagccaacatccagccattgtgtgctgaaaagcttctgccggcaacgggagtgtatgcggtttatgtatatatagggaaagaacgctacgctggaatgttgaatataggaagttgccctaccgtgaacgagaatggacagtctgtgagtgtggaagtccatatattgaatttccagggagatatttatcaggaactgataaaaattgagtttgtggagtatctgcgcccggaagtgaaatttgaaagtgtggaaaagcttacatggcagttgcggcaggataaagaggtggtgaaaaatcttttgcaccaaaagggataaagttttgggcagcatctgatttgtctgtatctttgcagcaaattagataattgaattgaatgaaaacatttgaagaacttggcgtttcaccggaaatacgcaaggcaattgaggaattagggtatgagaatcctatgcccgtgcaagaagaagtaataccgtatttgttgggaaacggcaatgatgtagtggctctggcacaaaccggaaccggaaaaacagccgcatttggtctgccgctgattcagaaaattgatgtaaaaaattgtgtaccacaggcgttggtgctttgtccgacacgtgaactttgcctgcaaatagcaggtgacctgactgactattcgaagtatatcaccgatttaaagattcttcctgtgtatggaggttcttccatagatagccagattcgcagtttaaagaggggagtgcatattatcgtagctactcccggccgcttgattgacttgatggaacgcaaggtggctcaattggctacaatccgcgacgtggttatggatgaagcggatgagatgctgaatatgggctttacggatagtatcaatgcgattcttgaaaatatacctcaagaccggaatactttgatgttctctgcgacgatgagtccggaaattgcccgtattgcgaagacttatttgcatgaggcaaaggagattaccgtcggaaccaagaatgaaggaagcaagaacgttaatcatgtggcttatatagtacacgcaaaagataaatatctggcattgaaacgtgtcgttgatttttatcctcagatttatggtatcgttttttgccgtacgcgcaaggaaacccaggaaatagccgataagcttatacaggatggatataatgcagactcgctgcatggcgagttgagccaggcacagcgtgacttggtgatgcagaagttccgtcaacgtcacttgcagttactggttgcaacggatgtggctgcgagaggactggatgtgaatgacctgacgcacgtaattaattacggattgcctgatgatactgaaagttatacgcatcggagtggccgtacagggcgtgctggaaaaacgggaatttccattgcaattatcaatttgcgggagaagggccgtatgaaggagattgagcacatcatcaaaaagaagtttgaagttagtgtgctcccatccggacaggaaatttgtcagcagcagttgataaaggtgattgatgatatagagaaagtgaaagtaaatgaagaggagatagagaccttcttacctggcatttaccgaaaacttgattggctggataaggaagatttgattaagcgcgtggtttcattggagtttaatcgtttcttggattattataaaaatgctcctgaaattgagcagcctaaggctaatgaaaagaaatctgaggcaaaggaatctcgtaagggagataaagagaaggtaggccgtaaggctgaaaaaggttatacgcgtttgttcttgaatttaggaaaaacagacggcttttataccaatcagattatagacctggtaaaccgtaatctgagaaaggagcgtattcagattggccgtattgacttgatgcagaatttctcattttttgaggtgattcaagaacaggctccacaagtgctaaaggctttgaacaaagtcgtattgagcggggggcgtaaggtatgtgtagagattgccggcgagaataccgggaaaagtgataagagcggaaagaaaaagaaagtggcggctgaaaagaaagctgataaaccttcaaaggtagagaaggcgaaaaagccgagccgggaggaaagaggatataccagtcctcgcggtccgaaaaagaaagatgactggaagcagttctttcagcaggataatcaaccgcttcggggagaagaaccagacttttcagaagaaggttgggctaaacgcagcaaacgtaaaaaataaataaataaaaagccggaagggaattgttcctttccggctttttatttatttgaagatgccttctgttgtcatttgtatacgtttgatacttccgtctttctggtaaaaaagcgggtcaatacagatggatcttctgaatccgcagccatcagtatttatgcttccgttatggtagatgaagtaggatttccctttaaaatcgatgatggcctgatggttggtattggagtttccggctatttcattgaggatgcctttatagatccagggcccattgatgttcttgctcatggcatagcatattttttctgggaattctgaagcaaaagacaggtagtaccagtctccatgtttgtgaacccaaggtgcttctgtgtatctgggaaggttgatgggatgaatggggccgtccagttctgtcatattatcttttagttttgcatagtaacattgtgtgtttccccaaaaaagataagcttgaccgtcatcgtcgataaagaccgtcgggtctatatcatcccatgcaatggaagtgtattgggtcgtcatgtcgttggtaatcagtgcactgccgcgtgcatctttaaaaggccctatgggagagtcggatacggcaactccaattgacttcccgggaatagtggcatgttcgacggtgacataccagtagaatttcccgttatgttcaattacctgactggcccacgcttctccttttgcccacttgaaatcggtagctttcaacgtataggcatgttcggtgaaggttttcatgtctctggtagagaaaatgcaccattcgttcatcagataatattgctgaggtgcgggacattcatcgtggccggcataaatatatactgtgccgtcgtggactaatgcggctgggtcacccagatatttataggaaaccaccgggttttgagtcgctacaaatgtagtatctttttgtgcggcttgtaggatagatgaatgtgtggtaaaaatggtgagggcaataacccccaggttaatgaatggatttttcatgatatattaaatttgaaaatgattttgatgcaaagatagctgtcgtatgggtcgggagggtggacaaaaggttttttagattggattatgggtatgtgggttagaaaaagaattggatttattagtttactccaacttttttcctacatttgccgtataaattcattaaacagtttaatcattatggaaaacgaaaacaaaaatcagcttcagatagaattaaaagaagaagtggcacagggaacttatgcgaatcttgcaattattactcattcaagctctgaatttattcttgactttgtacgtgtaatgccgggtttgccgaaagcaggtgttcaatctcgtattgtaatgactccggaacatgcaaagcgtctgatgtttgcattgcaggacaatgtgactaagtatgagcagaattttggtcagattcggatgccggaacagcaggcacaaggcggaaaaactttcgttccaccgttgagtgatttcaaaggagaggcttaaaaaaatataaatagaggactcaagaggctcatttcccgtttttttcggggaatgagcttttttctttttaaaaacagtttgtctattaaaaagttatttgtaattttgcagcccgaaatgtagtatttcgacaaggattgtagaaacaataagaaacaaatatataacaattaaaaatcaaacaaaatgcctactattcaacagttagtaagaaaaggaagaacggttttggttgataagagtaaatcaccggcattggattcatgtcctcagagacgtggcgtttgcgtacgtgtttacactacaactccgaaaaaaccgaactcagcaatgcgtaaagttgctcgtgtgcgtctgacaaactctaaggaagtgaactcttacattccgggagaaggacataacttgcaggaacactcaatcgttttggttcgtggtggtcgtgtgaaagaccttccgggtgtacgttatcacatcgttcgtggtacactggatacagcaggtgtagcaggccgtacacagagacgttctaaatatggcgctaagcgtccgaaaccaggacaagcagctccggcaggaaaaggtaagaaataatcctcgctgagtacaatccttattaagaaaaaaacttttataaattcgttttggtttgttggaaaagctttaaggttgagtaaatgcttcggaggaagcgttgaagtagacagagatgcagccccaaactaaacactattatcaaacaaaatgagaaaagcaaaaccaaaaaaacgtgtgatccttccggatccagtatttaatgatcagaaggtttctaaattcgtaaaccatctgatgtatgatggaaagaagaacacttcttacgaaatcttctataacgcactgaaaacagttgaaactaagcttccgggtgaagaaacttcagcattggaagtttggaaaaaagctcttgataacgtaactcctcagttggaagtaaaatctcgccgtatcggtggtgctactttccaggttcctaccgaaattcgtccggatcgtaaggagtcaatctctatgaagaatctgattgcttttgcccgtaaacgtggtggaaagtcaatggctgataaattggctgcagaaatccttgatgcatacaatgaacagggtggtgctttcaaacgtaaggaagatatgcaccgtatggctgaagctaaccgtgctttcgctcacttcagattttaatctagttaataactttaagacgaattaaaatggctaaacatgatttgcatttgacccgtaacatcggaatcatggcgcacatcgatgctggtaagacaactacttctgaacgtatcttgttttacacaggtttgactcataagattggtgaggtgcacgatggtgctgctaccatggactggatggaacaggagcaggaacgtggtattactattacttcagctgctacaactacttattggaagtatgctggtaacaagtataaaatcaacttgattgacactccgggacacgtggactttactgcagaagtagaacgttcactccgtgtgttggatggcgctgtggctacttattgtgctgtaggtggtgttgaacctcagtcagaaacagtatggcgtcaggctgataaatacaatgttcctcgtatcggttatgttaacaagatggaccgttctggagctgacttcttcgaagttgttcgtcagatgaaggatgtattgggcgctaatccatgtccggttgtaattcctatcggtgcagaagagtctttcaaaggtgtagttgacctgattaagatgaaagctatcttgtggcacgatgaaactatgggtgctgactatgatgtagaagaaatccctgcaaacttggtagacgaagctcaggaatggagagataagatgctcgaaaaagtagctgagtttgatgaagctttgatggagaaatatttcgatgatccttctacaattacagaggaagaagtgatgcgtgctttgcgtgcaggtactttgaagatggaaatcgttccgatgttgtgtggatcttcattcaagaacaaaggtgtgcagactttgcttgactatgtatgtgcattcttaccttctccgctggatactccgaacatcgttggtactaacccgaacacgggtgctgaagaagaccgtaaaccggatgaagacgaaaagacttcagctttggcatttaagatcgctactgacccgtatgtaggtcgtttgactttcttccgtgtgtactcaggtaaagtagaagctggttcatatatttacaactctcgttcaggaaagaaggaacgtgtatctcgtttgttccagatgcactcaaataagcagaatcctgtggaagtaatcagcgctggtgatattggtgctggtgtaggtttcaaggatattcgcactggtgatactctttgcgatgaaactgctccgatcgttcttgaatcaatggacttcccagaaccggttatcggtatcgcagtagagcctaagactcagaaagaccttgataagttgtctaacggtttggctaagttggctgaagaagacccgacatttactgtgaagactgacgaacagactggacagacagttatctctggtatgggtgagcttcacttggatatcattatcgaccgtctgaaacgtgagttcaaggttgaatgtaaccaaggtcgtcctcaggttagctacaaagaagcaattactaagactgttgaattgcgtgaagtttacaagaaacagtctggtggtcgtggtaagtttgctgacatcatcgtttctgtaggtccagttgatgaagacttcaaacagggtggtctgcagttcatcgatgaagtgaagggtggtaacgttcctaaggaattcattccttcagttcagaaaggtttcttgactgcaatgaagaacggtgtattggctggttatccgcttgattctttgaaggtcgttttgaaggatggttcattccacccggttgactctgaccagttgtctttcgaaatctgtgctatccaggcatacaagaatgcttgtgtgaaggcaggtccggttctgatggagcctatcatgaagctggaagttgtgactccggaagaaaacatgggtgatgtaatcggtgacttgaacagacgtcgtggtcaggtagaaggtatggaaacaagccgttctggtgctcgtatcgtaaaagcaatggttccattggctgaaatgttcggttatgtaactgctttgcgtactattacttcaggtcgtgctacttcttcaatgacttacgatcaccacgctcaggtttctagctcaatcgctaagactgtactggaagaagttaaaggtcgcgtagacttggtataaaaagaaataggatggaagttgatgaggactagcgaatgactcttagtcctcaagcttccttcccaatataaacaattaataatttaataaacaaatgagtcagaaaatcagaattaaactgaaatcttacgatcacaacttggtagacaagtcagcagaaaagattgtaagaactgtgaaggctacaggtgctattgtaagcggtcctattccattgcctacacacaaacgtatttttactgtaaaccgttcgactttcgttaacaagaagtcacgtgaacagtttgaattgtcttcttacaagaggctgattgacatctacagctcaactgctaagacagtagacgctttgatgaaattggaattaccgagtggggtagaagtagaaattaaagtttaatcaattaaaaattaactgaaatgccaggattattaggaaagaaaatcggaatgacatccgttttcagtgctgatggtaagaatgtaccatgcactgttatcgaagctggtccttgtgtagttactcagattaagagtgtagaaaaagatggctatgcagctgttcaggtaggtttccaggacaagaaggaaaagcacactactaaaccgttgatgggtcactttaagaaagctggagtaactccaaagagacacttggccgagttcaaagatttctcagaagaattgaatttaggtgacactatcactgtagaattgttcaatgacactgcttatgtagatgttattggtacttctaaaggaaaaggtttccagggtgttgtaaaacgtcatggatttggcggtgtaggccagactactcatggtcagcacaaccgtgcccgcaaaccgggttctatcggtgcttgttcttaccctgctaaagtattcaaaggaatgcgcatgggcggacaaatgggtggtgacagggtaactactcacaacttacaggtattaaaagtgattcctgaacacaacttgctgttgatcaaaggttctgttccgggttgcaaaggttcaatcgtaataattgagaaataatggaagttaacgtattaaatattaagggtgaagataccggcaaaaaggttgctttgaacgaagctatcttcggaatcactccaaatgatcacgctatctatctggatgtgaagcagtatatggctaatcagcgccagggtactcacaagtctaaggaaagaagcgaaatcagtggttctactcgtaaattgggtcgtcagaaaggtggcggcggtgcacgtcgtggtgatatcaactctccagtattggtgggtggtgctcgtgtttttggtcctaaacctcgcgattattggttcaaactgaacaagaaagtgaaagttttggctcgtaaatctgcattggcatacaaggcacagactaacaacatcgtagtagtagaagacttcactttcgaagctcctaagactaaagaatttgtaaatgttgtgaataatctcaaagtggctggtaaaaagctacttatggttttgccggaagcaaataaaaacgtatatttgtctgctcgtaacttagagcgtacaaatcttgcaattgcttctgcgctgaatacatactctgtgttgaacgcagaaactcttgttgtgacagaaagtgctttgaaagctatcgaggaaaccttagtgaaataattaaaggaggctgaagtaatatgggaatgattattaaaccgttggttacagaaaaaatgacggcaatatctgaaaaattcaaccgctttggatttattgttcgtcctgaagctaacaaattagaaattaagcgtgaaatcgaagctatgtataatgtgactgtagtagacgtaaacacaattcgctacacaggaaagaataagagccgttatactaagtctggtcttatcaatggacgtacaaatgcttacaagaaagctatcgttacattgaaagaaggtgatactattgatttttatagcaatatttaaataaaagatggcagtacgtaaatttaagcccacaacaccggggcagagacacaaaattattggtacttttgaagaaattactgcatcggtaccagaaaaatctcttgtatatggaaagcgttctactggtggtcgtaaccacgtaggtaagatgacaatgcgctatatcggcggtggtcacaagagaaaattccgtattattgatttcaagagaaataaagacggtgttccagcagtcgttaaaacaattgaatatgatccgaaccgttcggctcgtatcgctttgttgttttatgctgatggtgaaaaaagatatatcattgctcctaatggattgcaagtaggtagcactttgatgtctggagcgaatgcggcgcctgagattggtaacgcacttcctcttgaaaacatccctgtgggtactgtaattcacaacattgaattgcgtccgggccagggtgctgctttggtaagatcggctggtaactttgctcagttgacatctcgtgaaggtaaatattgtgtaatcaaattgccttcaggtgaagtaagacaaatcttgagtgcttgtaaagctactatcggtagtgtaggtaactcagaccatgcattggaatcatcaggtaaggctggtcgttctcgctggttgggtcgtcgtcctcacaaccgtggtgttgttatgaaccctgttgatcacccgatgggtggtggtgaaggacgtcagtcgggaggtcacccaagatcacgtacaggcttgtatgctaagggcttgaagacaagagcacctaagaaacagtcttctaagtatattattgaaagaagaaagtaataacaactgattaattgagtaatttatgagtcgttcattaaaaaaaggtccatatattaatgtaaaactggaaaacaaggtgctggctatgaatgaaagcggcaagaaatcagttgttaagacatgggctagagcttcaatgatttcgcctgatttcgtagggcatacaattgcagttcacaacggaaacaaatttattcctgtttacgttactgaaaacatggttggtcataagttaggtgaatttgcaccaactcgtactttccgtggtcatgctggtaacaagaaaaaataataacaggacgcacatttgaaataataaagtaataaataatgggagcaagaaaaaaaatatcggctgaaaagagaaaagaagcccttaaaaccatgtattttgcaaaattgcaaaatgtgcctacttctccgcgtaaaatgcgtctcgtggctgacatgattcgtggtatggaggtaaatagagcacttggtgtcttgaagttttcttctaaagaagcttctgcaagagtggaaaaattgttacgctctgctattgctaactgggaacagaaaaacgaacgtaaagctgaagacggcgaattgtttgtaactaagatttatgttgacgggggagcaaccttgaaaagaatgagaccggctccacagggtagaggttacagaattcgtaaacgttcaaaccatgtgactttgttcgttgattctaagaatactaatgataaaaattaagagtagatgggacagaaagttaatccgataagcaaccgtttaggaattatcagaggatgggattctaattggtacggtggcaagaattatggtgacgctttgctggaagacagcaaaattcgtaaatatctgaatgccagacttgcaaaagccagcgtttcaagaatcgttattgaacgtactctgaaattggtgacaattactgtatgtactgctcgtccgggtattatcattggtaaaggtggtcaggaagttgacaagctgaaagaagagttgaagaagatcaccgataaggatatccagattaatatctttgaagttaagagaccggaacttgatgctgtgattgtggctaacaacatcgctcgtcaggtagaaggtaaaattgcttaccgtcgcgctatcaagatggctattgccaatacaatgcgtatgggagctgaaggtatcaaagtgctgatctctggtcgtttgaatggtgctgaaatggctcgttcagaaatgtacaaggaaggacgtactccattgcatactttccgtgcagatatcgactactgtcatgctgaagctttgacaaaagttggtttgctgggtatcaaggtttggatttgccgtggagaagtttatggaaaacgtgagttggctccaaacttcactcagagcaaagaaaataaccgtggaggaaacggtaacaatggtggaaagaacttccgcagaaagaaaaataacaatcgctaacgatttgaattttaggaattatgttacaaccgaaaaaaacaaaattcagaagacagcagaaaggtagcgctaaaggtaacgcccaaagaggacatcagttggcttttggttcttttggcatcaagtctcttcagactaaatggattacaggtcgtcagatagaggcagctcgtattgctgtaacaagatatatgcagcgtcagggtcagatttggattcgtatcttcccggacaaacctattactcgtaagcctgccgatgtacgtatgggtaaaggtaaaggttctccagaaggtttcgtagcacctgtaactccgggtcgtattttgatcgaagtagaaggtgtatctttcgatgtagcaaaagaagctttgcgtcttgctgcacagaaacttcctgttacaactaagtttattgttagacgtgattacgacgcaagtcaaaatgcttaattgatatgaagattgcagaaattagagaaatagctaccaacgaattggcagaaagaattcagactgaagttgccaattacaatcaaatggttttaaatcattcgatctctccgctggaaaatcctgcacagattaagaagttacgcagaactattgcgcgtatgaaagcagaattgcgtcagagagaacttaacaaataataatggtcctcatggaagctagaaatttaagaaaagaaagaactggtgttgtagttagcaataaaatggataagaccattactgttgctgctaagtttaaggaaaaacaccctatttatggtaagttcgtttctaaaacgaaaaaataccatgctcatgacgaaaagaatgaatgccagattggcgatactgttcgcatcatggaaactcgtcctttgagtaaaactaagagatggagattgattgaaattattgaaagagctaagtaattatgatacaagcagaatccagacttacagtatgtgacaacagtggtgcgaaagaagctctttgtattcgcgtattaggcggtacaaagagacgttacgcctctgttggggatgttattgtagtttcaataaagagtgttatcccctcaagtgatattaaaaaaggtgcagtatctaaggccttgattgtacgtacaaagaaagaaatccgtcgtgctgacggctcttacattcgttttgatgacaatgcttgcgtattgctgaataacgcaggtgaaattagaggaagtcgtatttttggcccggttgcgagagaattgcgtaacgcgaacatgaaagtggtttcacttgcacctgaagtactttaattttgtaaaagatttaagtaatgagtaaattacatattaaaaaaggcgatacagtttacgtaaactctggtgaagataagggtaaaactggccgcgtattgaaggttcttgttaaagaaggacgtgcactggtagaaggtatcaatatggtatctaagagtaccaaacctaacgcaaagaatcctcaggggggtattgtgaagcaggaagctcctattcacatctctaacctgaatcctgtagacccgaaaacaggaaaaccgactcgtgtaggtagaagagaaagttctgatggaagaacatttgttcgttatgctaaaaaatcaggagaggagattaaataatgagtaatactgctagccttaagaaagaatatgcagagcgcattgctcctgctttgaagaatcaattccagtattcttcatcaatgcaaatccctgtacttaagaagattgttatcaatcaaggcttgggtatggcggtagctgacaagaagattattgacgtagcaatcaatgaattgactgctattacaggacagaaagctgtagctactgtttctcgtaaggatatcgctaactttaagttgcgtaaaaaaatgcctatcggtgtgatggttactttgcgccgtgaaagaatgtatgaattccttgaaaaactggttcgcgttgcattgccacgtatccgtgacttcaaaggtattgaaagcaaattcgacggaagaggaaactatacattgggtatccaggaacagattatcttccctgaaatcaacattgatagcatcaccaagattttgggtatgaacattactttcgtaacttctgctcagactgacgaagaaggttatgctttgttgaaagaattcggattaccgtttaaaaacgctaaaaaagattgataagatatggcaaaagaatcaatgaaggctcgtgaagtaagaagagctaaacttgttgctaaatatgctgagaagcgtgctgcgttgaagaagattgtaaattctggtgatcctgtagaagcttttgaggctgctcagaagttgcaggctatccctaagaacgctaatcctattcgcttacacaatcgttgcaaactgactggtcgtccaaaaggttatatccgtcagtttggtatttcacgtattcagttccgtgaaatggcttcaaacggtttgattcctggcgttaagaaagcaagctggtaatttattttttttattaaatattgtcagggtagtcctgattaatttaacaattaatttttatgacagatccaatcgcagattatctcactagattgagaaatgcaattagtgctaagcacagagtggtggaagtacctgcttcaaatttgaaaaaggaaattacaaaaatcctttttgataaaggttacatcctgaactacaagtttgttgaagacggtcctcagggtactatcaaagtggctctgaagtatgatgcagttaacaaggttaacgctatcaagaaacttgaaagagtatctactccaggtatgcgtaagtatactggatacaaagacatgccgagagttattaatggattaggtattgctattatatctacttccaaaggtgttatgacagacaaagaagctgctgaactgaagattggtggtgaagttctttgctatgtatattaatgttaggaggataagcaatgtcaagaattggtaaattacccattagtatccctgctggagtaacagttactctgaaggaaaatgttgtgaacgtaaaaggacctaaaggtgagttgagtcagtttgtaaatcctgctatcattgtagaggttgcagacggacacgtggtgttgaaggaaaacgaagaagctatgcttgataacctgaaacagcgtcatgcattccatggtttgtatcgtgcattgatcaacaacatggttgtaggtgtttctgaaggttacaagaaagaattggaattagtcggtgtaggttaccgtgcttctaataacggtaatatcattgatttcgctttgggttacactcataatatctttatgcagttgcctcctgaaatcaaggttgaaactaaatctgaaagaaataagaaccctcttatcatattggaatcttgtgacaaacagctgcttggtcaggtttgttcaaaaatacgttctttccgtaagcctgaaccttacaaaggaaaaggtattaagtttgttggtgaagaaattcgtagaaagtctggtaagtcagctggcgctaaataattcacataaaatcgtacaattatgacaacaaaaatagaaagacgtattaagattaaatatagagtacgcaataagatttcaggtactgctgaacgtccgcgtatgagtgtgtttagaagtaacaagcagatttatgttcaggttatcgacgatttaagtggtaagacactggttgctgcttcatctttgggcatggaacctatgcctaagaaagaacaggctgctaaagttggtgagctgattgcaaagaaagctcaggaagctggtattacgactgtcgtattcgaccgtaatggttacttgtatcatgggagagtaaaagaagtagctgatgctgctcgtaacggtggacttaaattttaatgaattatggcagttaataatagagttaagatcactaacgatatagagttaaaagatagattggttgcaatcaaccgcgttactaaggttacaaaaggtggtagaactttcagcttctctgcaattgtagtagtaggtaacgaagatggtatcattggctggggacttggtaaagctggtgaagtaacagctgcaatcgctaaaggtgtagaagctgcaaagaagaacctgactcgtgttccggtattgaaaggaactgttcctcatgaacagtctgctaaatttggtggagctgaagtatttattaagccggcttcaacaggtactggagtagtagcaggtggtgctatgcgtgccgtactggaaagtgtaggtgtaacagatgttttggctaagtctaaaggatcttcaaatcctcacaacctggttaaggctactatcttggctttgagcgaaatgagagatgctcgcatggttgctcagaacagaggtgtaagtttagataaagtatttagaggataaggaggaatcgtatgtcaactattaagattaaacaagtaaagagtagaattggtgctccggctgatcagaaaagaactttggatgcacttggtctccgtaaattgaatcgtgtggttgaacacgaagagactccttcaattctgggtatgattgaaaaggtaaaacacctggtagcaatcgttaagtaatatattgttaacaataaaggatcttacaatatgaatttaaataatttacgtcctgcagaaggttctgtcaaaactagaaaaagagttggtcgtggtgctggttcaggtttaggcggtacttctacaagaggacataaaggagcaaaatcaagatctggctattcaaagaagattggttttgaaggtggtcagatgccgcttcaacgtcgtgttccgaaatttggttttaagaatattaaccgtgttgaatacaaagctgttaatcttgacactattcagaaattggctgaagctaagaatctgtctaaggtaggtattaacgatttgattgaagctggtttcatctcttctaaccaattagtgaaagttcttggtaacggtagtttaactactaagcttgatgtagaagcaaatgctttctctaagagcgcagtagctgcaatcgaagccgttggtggtaatgcagtaaaactctgattcaatgataaaatctattgaaacattaaagaatatatggaatattgaggatctgagaaaacggatcctcattactatattgtttgttgcaatttatcgatttggttcctacgtcgtattgccaggtatcaatccggatatgctgtctaaattgcatgaacagacgagtgaaggtcttcttgccttgttgaatatgttttctggtggtgctttttcaaatgcatctatttttgcacttggaattatgccgtacatctctgcatccatcgtgattcagctgttggctattgcagtaccttatttccagaaattacagcgtgagggtgaaagcgggcgtcgaaagattaatcagtatactcgtatcctgacaatcattattttgattttccaagctccatcttatctgatcaacttgaaaatgcaagcagggcctgcccttaatgcttcattagattggactttctttattataacttcgactatcattctggcagcaggtagtatgttcgttctgtggcttggtgaaagaatcactgacaaaggtatcggtaatggtatctcattaatcattatggtgggtatcattgctcgtcttcctcagtctttctctggtgagtttgtttccagacttgcttctccgggtgcaggaggtatcatcatgttcctgattgaacttgtttgtttgctggctgtgatagctgctgctattttgttggttcagggtgtgcgtaaggttcctgtacagtatgcaaaacgtattgtaggtaataaacaatatggtggtgcaagacagtacattcctttgaaggtgaatgctgcgaacgtaatgcctatcatctttgctcaggcaattatgttcattcctatcactattgtaggtttctccaatatggaggatgcaagcggcatcactcgcgctttgattgaccatacaagcttctggtacaattttgtttttgcggcattgattatacttttcacttatttctatactgcaattacaatcaatactaaccagatggcagaagatatgaagagaaataacggttttattccgggaataaagccgggtaagaacactgcagaatatttggatgtaattatgtctcgtattacactgccgggttctatattcttggctattattgctattctgcctgcttttgccggtcttttcggagttcaagctgaatttgctcagttcttcggtggtacatctttgctgattcttgtaggagtagtattggatactcttcagcaggttgaaagccatttgttgatgcgtcattatgacggactgttgagttcgggaagaattaaaggacgttccggtaatgtagctgcttattaaaaactactcgtctcgaatgatatttttaaagacagatgatgaaatagagttacttcgtcagagtaatctccttgtcgggagaactctggctgaagtagctaaaatgatacaaccgggagttactaccaagcaattggataaggttgcagaagaatttattcgcgaccatggggctatacctacttttaagggtttccctaatccatacggttctccctttcctggtacactatgtacatcggttaatgaccaggtcgttcatgggattcccaatgatattcctttgaaagacggtgatattgtttctgtggactgtggtactttcatgaatggtttttgtggtgattcggcttatacgttctgtgtaggtgaagttgatcctgaaatcgtgaaattgttgaaggtaactaaagaatctctttataagggaattgaaaatgcagttcatggaaagcggcttggtgatataggttactcgattcaagaatactgtgaagcacattcttatggcgtggttcgtgagtttgtaggtcatggtattggaaaggaaatgcatgaagatcctccagttcctaattatggtcggcgtggcacaggaactttgttaaaaaaaggaatgtgtattgcgattgagccgatgataacgatgggcaatcgtcaaattgtgatggaggaggatagatggactatccgtacaagagaccgcaaatgtgcagcacattttgaacatacggtagctgtgggagtaggaaaggctgatatattatcgtcatttgaatttatagaacaagttttaggagataaagcaatttaatatggcaaagcaatccgcaatagaacaagatggagttatcgtcgaagcattgtctaatgcaatgtttcgtgtagaactagaaaacggacatgagattacagctcatatttctggtaaaatgagaatgcattacattaaaatattacccggagataaggtaagggtcgagatgtctccttatgacttatctaaaggaagaatcgtttttagatacaaataaaagaaaatataagatatgaaagtaagagcatcattaaagaaacgtacgccggaatgcaaaatcgttagacgtaatggccgtttgtatgttattaacaagaaaaatcctaagtataaacaacgtcaaggataatttattatttttgcaaaaaaaataatttagtatatggctataagaatagttggtgtagatttgcctcagaataaaagaggtgagattgcgttaacatacgtatatggtatcggacgcagtagttcagcaaaaattttggataaggcaggcgtagatcgtgacctgaaagtaaaggattggactgatgatcaggctgctaagatccgtgaaatcattggtgctgaatacaaggttgaaggtgatcttcgttctgaaatccagttgaacattaagcgattaatggatattggttgctaccgtggtgttcgtcaccgcttgggtctgcccgttagaggtcagagcacaaagaacaatgctcgtacacgtaagggaagaaagaaaacagttgcaaataagaaaaaagctactaaataattgttaatatggcaaaaaaaacagtcgcagctaaaaaaagaaatgtcaaggttgatgctaatggacagttgcatgttcattcttcattcaataacattatcgtttctttggcaaacagcgaaggccagattattgcatggtcttctgcaggtaagatgggatttagaggttctaagaagaacactccttatgcagctcagatggctgcccaggattgtgcaaaagtggcatacgatcttggcctgagaaaggtaaaggcttatgtaaagggtcctggaaacggacgtgagtctgcaatcagaactgtacatggagctggaattgaagttactgaaattatcgacgtaactccattgcctcacaacggttgtcgtcctcctaaaagaagaagagtataataaagataacctatttagatgtaacttgattttgttaaataatggattgcaattcctttctgtaatcgcggctgcaacaaattgagttcatgaataacaattaaattaagaaagaaaatggctagatatactggaccaaaaactagaattgcacgtaaattcggtgaagcaatctttggagcagataaagttttgtctaagaaaaactatcctcctggacaacatggtaacaaccgtcgcagaaaaacttctgaatacggtgtcatgttggctgaaaagcagaaagctaaatatacttacggtgtgttggagaaacaattccgtaacatgtttgagaaagcagcaagtatgaacggtattactggtgaaatcttgttgcagagccttgaatgtcgtttggacaacgtagtgttccgtttgggtattgcaccgactcgtgctgctgctcgtcagcttgtaggtcacaagcacattactgtagatggtaaggttgtaaacattccttctttctctgtaaaaccgggtcagttggtaggtgttcgtgaaaaatctaagtctttggaagttgttgctaactctttggctggatttaaccacagcaaatatccttggttggaatgggatgaaaactctaagactggtaaattgttgcatgttccagaaagagctgacattcctgaaaacattaaagaacacttgatcgttgaattgtactctaaataataattaatttcatggcgatattagcatttcaaaaacctgataaagtattaatgttggaagcggattccaaattcgggaaattcgaattccgtccgcttgaacccggtttcggtattaccgtaggtaatgctttacgccgtattcttctttcttcgttggaaggttatgcaattaacacaatccgtattgagggtgtggaacatgaatttgctacaattccgggtgtgaaagaagatgtcactaacattatcttgaatctgaagcaagttcgattcaagcgagtagttgaggaattcgaaaatgagaaggtaagcattaccgttgagaattctactgaatttaaggcaggtgatattggtaagtatttgaccggatttgaagtgttaaatcctgaattggttatttgccatttagattcaaaagcaactatgcagatagacattacaatcaacaaaggtcgtggatatgttccggctgacgaaaaccgtgaattctgcaccgatgtgaatgtaattcctatcgattctatttacactccgattcgtaatgtgaaatatgcggtagaaaactatcgtgtagaacagaagactgactatgaaaagttggtgctggaaattacgacggacggttccattcacccgaaggaagcactgaaagaagctgcaaaaattttgattcaccacttcatgctgttctctgatgaaaagattactcttgaaacatcagatgcagaaggaaatgaagaattcgatgaagaagtattgcacatgcgtcagttgctgaagaccaaattggttgatatggatttgtcagttcgtgccttgaactgtttgaaggctgccgatgtagaaacattgggtgacttggttcagttcaataagaccgacctgctgaagttccgtaacttcggtaagaaatcgctcactgagcttgatgatttgctcgagagtctgaatctttcgtttggaacagatatttctaagtataaattagacaaagaataaacaatgagacataataaaaaattcaaccatttaggtcgtactgcttctcacagaaatgcaatgctgtcaaacatggcatgttctttgatcaagcacaaaagaatcactacgactgttgcgaaggctaaagctttgaagaagttcgttgagccgctgattacaagatctaaagatgacactactaactcacgtcgtgttgtatttagcaatcttcaggacaaatatgctgtaactgaactgttcaaagaaatctctgtaaaagttgctgatcgtccgggtggttacactcgtattatcaagactggtcaccgtttgggtgataacgctgaaatgtgtttcatcgaattggttgactacaacgagaacatggctaagacagctgccaagaaagctactcgtactcgtcgttctaagaaatcagctgcaactgcagaagcaccggctgctgaagctgctgcaactgaagctactacagaggaagcccctaaagctgaataattctgtaacatgctatatacttaaaaggctatgcgtttgcatagccttttttatgctctattgggattgaaaaacatcaaggtcttgggaaaacattgtcaataaaaaaggctcgtgaaatcagatttaaacctgcttcacgagctttttatgtgattaccttgataatcttttgtgagattatgcttcttgcattttggctttgaatgctaaggcatacatgcgcatttgttttaccatggcaagcagaccattactacgggttggtgagaggtgttctttcagtccaatcttctcgatgaagtaaaggtcggattccagaatttcgtcaggtgtgtgtccagataccacctggataagtaaagatatgataccttttacgattaatgcgtcgctctctgcctgaaataccactttgccgtctaccagatcagcttgtaaccaaacgcggctctgacagccgtcaatcaggttctgttcagttttatatttcgggtcaagcggctgctggtcattgcctaaatcaatcagcagctgatatttgtccatccaatcgtcgaagtcgctgaattcttcgatcacttcgtcctggagttcattgatagttttcattgcggtagtgtttaattatttttcgttataaattactcccatcaccgtttgtcctacggcttgaagagtggctttgtcaatattctctaagctgtcatccagtgtgtgccaggtcggattaaagccagtgttgctttgcgtatcgtagtgaataatatctacgcacggaatctggcggtactggtttacatacacatggtcgtcggtaacctgacctccgtcttccttgatgaagtaattgctgtaacccagatggtcagccattttccagattttcttcatggcattgttcgccgtctgcttggagaacgcttcgtagtagaatgtggcattctttccgcctaccatatcaagcaagataccaaaccgagccttgtaatcaggtacgtgaggaatgcggccccagtactgcgaacccagacaccaggtatctggcttgtaagtaccttcgtagaagtccggagtgccgtaatcttctgaatcgaagaatatcaagtcgatgccgacttgtggtgcctgctgttgaatctgacgggcaatttcgagcaatacacctacaccactggcaccgtcgttggctccatctatcggtttctggtgattagacttttcatcctggtcagcgtatggacggctatcccagtgcgcacacagcatcactcgctttttgttttccggctggtaagccccgatgatgttgcgcgatttcaggatggtaccattgtaggccactaaatctgcatgctggttgtacaccttcgccccgaatttctccagttgtgcggccaggtaatcgccgcatctccggtgagcttccgtattaggaacacgaggtccgaattgcacctgtgcggcaatgtaagcgtatgcactatccgcattgaatgccggtgcctgcactatagccgcttcagattcttctatttgctggctgttcttctgactgttcccacaagagatgaaggcccctcctgtcattaaagcagttactgccagcagattctttattgaaatcataattcatttgttttgattgtggtgcaaaggtaaacttatttttgtacacgccttgcaatggcaatcgggttttaaactttatttgtaggaaccattctcttgtacttgctgcatgacacgcaagaagttacctccccaaatgcgccggatgtcttcctcgttgtaccgttcatgaagcaactgacgagtcagattgatcatttccgaagagtcgttgcatccgataatacctccgtcaccgtcaaagtcactgccgattcccacatgttcgatacccatcacgttcaccatgtgattcaggtgttcgatggcatccaagatatgagccggacgctctttacggaggaagccgctatacaagcatacctgtaccacgcctcccttgcgggctatggcacgaagctggtcgtcggtcaggttacggggatggtcgcagagcgcacggctggaagaatgcgaacaaaccaccggttggctgctgatgtccagtgtctcgtagaatgtccgttccccactgtgtgacaaatccaccatcattcccaggcggttcatctcctgaataacctgctctccaaacggagtaactcccaagttttcttcattgtagcgtgcagaaccgcagatgtcgttgttcccattgtggcagagcgtcatatacactacaccccgtttccggaaatgtgctaccctgcttagatcctttccgatggcatatccgttttcaatgcccaacataatggccttctttccttcccgtttcagacggtataattcgttgggagaataagcgatgtccacagccgtacagttcatagctaccatctcctcaatctcgttcagcagacggtccgccttggccgttgcagccagcaacgcttcatctgtacgttccttctgttccaggtaagccaccatgatggtcgcatcctgccgtccttccgtcattttatgtaggtccactttaatcttcgggtcccgttcgtggaagcggatgtgctggtcgaagaacatcggagtatcacagtgcgtgtcgagaatcagcagacgttcatgcagcttcttggccttctggaatgagccagcttcacggacgagccatccgaacaacggcatcatacacttgtcctgattcaggatgaaacattccggatgccactgcacccctataatagatttgtattctgtgctttctattgcttctattactccatcgggtgccgtagccgatacacggaaacccggagcagcttctttcacggcctgatggtggaaagagtttacagctacctccttgacgtttaagatacgtgccaacagactgccttctgctaactctaccttgtgcgatgggaaactccgttccaaatcctggctgtgtttaatcgatggggtatccttctgtgcatagatgtcctgatagagtgtgcctcccaatgccgcattgatgacctgcatccctcggcagatacctaatatcggaatctgtcggttggcagccagacgcgtcagaagcagttcctggcggtcgcggtacggattgatgctgtgaagttcccggataggatcttcgtgcaggaataacggattcaagtcgcctcctccggtgagcaacagcccgtcaagctgctcaagcgtattaatcagcaagttcgtatcctcgtagggaggaatgaccaccggtacccctccggcctgaatgatagactgataataccccggagccaatgtcagattaccgtcgctgaagttcccggtaagtccgataagcggtgcttccttatgattggggaagcggctgtgaatgccctcgtcgagggcctgcatatcgaaagaaaaatttgttttcatgtgttccttctttatttaccaagtaaggcaaatatagagagaacttgcgaattatgtgcacaagaaaagaaggaataaagtaaataattgacaaaagagatagagtctcataaaaaagggaatacaataccttctaaaaaaggagctcgtattccccattcgtgtgtataagataacgtgttatcagtcgaagttctgtatggtctctttgcggatttccttaccgtgctggctgtacacaatcgtaaataaagtctggttgtcaatcttggccgcgtgtatgcaaggcaggctaagttttacactttcatacggtgaaagcgctttcacccgtccttctgccagttttactccattgaccagtacggtcaggtctgtttcttctgaggtggacaaaccgaaattcttcacttccagttccaattgcttgtcatacgccataggatatgccgccgacaggcatgccggatgataattgacgtaaggcagtttggcatatccgtacagcaattctccttttttcgtctttccgagcagtttgggagcaaattcatcttttctgatggtattgtttctgccatcgaatacgataatcaggtccttgcccgaagcgatacgtttgacagccttgcatccctttccgtaatttacgtccgaggagctgccgaatctcagcgatttcatgtcgaaatccttgaagtcaactccttcctccgctttcaccagtaccttaatttccttggtctgggcggtaatcgtatcttcgttcaggacagacaagcgcaatcctttgttcagagggatgcatatattctttgaactgtgccggtcgttgggatggtcttcccatttgatggtatcgataacggcaaagttggcctgaatggggcgtccgtattcatcctgaaacactttcatacgctcatacttaaaccagttttccttgtagccatccttgtgagcggctattcccggagtgtaagcttcgccctcctccgtaatccagtggataccgtcaatggagcgctggtagtaggcgattcttcccagccagtcgttgacgataaggtgatattgcaagctgtctttccagataaccgggtcctcaaattccccgtttacgtccggatacacacttctgtcacttacctgttgatagggagagataccattttcactgatccacacacctcctccgcggcataccatcagataagaaccgtcacttcttctggcaaaagtcaggttagacagcccctcaatgatttttctgtttctcttgtcgaaggtgaaatgactgtacgtccacggcccattcaggctgtctgcaatgtaatatccgtcgataacgtacaccacgggacgtccgtcttttagtataaatgcttctggattatgtcccttcccaattgtgtcgcagatgatataaggtccgctcaaatggtcacttgttgtatggaatacggtagatttgggccatgtcatgtgccccttaggtgagttttccggccatccgcagacaaagagatggtatttattgtccttgcctttaagaatgtttcctccccagaaagaaagttccggattttcaattccgttgtcaacataccggaaacgtaccgagtcagttccccacacattttcgtcggattttccatcgggcataggcagaaaccggtctttaaaccgtcctccatcaataaggtttttccattcggcaggtaatgtacgctctgtgatttgagcatttgcacagagactgagcaataaggttaaaaagcagaatatatttttcatggtaagtattatgtataatttcttgcaaaagtaggtatatctccttgcacggttgtagcatataatacgtacttcgtaggattttatcgacaaattgacgttgggaggatttttcctcctccggctctatagcattaattagcatcccaaatagatatttattcgaattattttctcatatttgtttaaaatctaatgatatggaactgattcgaaccctttctcagatggtcaactgcctgcgttcgcgcggcatacgacggaaagtggcggtggtttgcccgaacgatccgcacacggaatatgtcattatccgtagcctgagagaggagattgctgaatatctgctggtcacagattctgctcacttgaaagaagcgctcgacttgcgggcagcttctcccgattttgtacgcatttacgaggctggaacaccggatgaagcggctgcgctggctgtacaactggtacgcacgggcgaggcggaagtcctgatgaagggacttattaacaccgacaacctgctgcgtgcagtcctgaaaaaaggagagggactgttacccgaaggaggggtgctaagccatgtggccgtggcgcaggtacctttgtatcataaactgctgtttttctcggatgcggcagtaattccccgtcctactttggaacaataccgctcaatgattgccaatgacctggctttgtgtcgtacgttgggatgcgaagaaccccgggtggcactgatacactgcacggagaaaatcaacgagaaatttccccataccctgagctacgtggaactgaaaaaagaagcgcaggaaggtcgtttcggaaaagtctttatcgacgggccgatggatgccaagaccgcctgcgacaagcacagcggggagataaaaggactttcctcgccagtggtaggcaatgcagatattctgattttccctaatatcgaagcgggcaatacgttttacaaaaccctgtctctgtttggcgatgcgaatatggcaggtatgctgaccggtaccattgcaccggtagtagtgccttcgcggagtgactccggaaactccaaatactacagtctggtactggcatgtctggcagggacacgaaaagaataaaactagaccttatgaagatacttgtcatcaatccgggctccacttctacgaagctggcagtctacgagaatgagaatcccatctggcgtgaaagcattgcgcatccttccaaggagttggccggctttcaccatatcaatgaacaatatgagtaccgtcgcaagtgtgtgcacgatacgctggaaaaggctggcattccgcttgtctttgatgccgtgattgcccgtggaggcttgttgaaacctactcccggtggagtgtatcagattaacgagcgaatcaagcatgatttatggcatgccgatatggaacacgcatcgaatctggcggcatggattgccgatgagattgcgcattgtgccggttgtccttcttatttggccgatccggtggtgactgatgagttgcgcgatttggcccgtatctccggtattccggaattgccgcgcatctccattttccatgcactgaacagtcgggctgtttcccgcagttatgcagcccgtatcggacgaaagtatgaagaattaaatctgattgtagcccatttgggaggaggcatctcggtcagtgcccatcattatgggaaggtggtcgatgtcaataacgctttgaatggagaggggcctttcagtccggagcgggcaggaacgttgccggcccggcagttggtagatatgtgtttcagcgggaaatatacctatgccgaaatccgtaagatgataaacggtcgaggaggtctggtagctcatttgggtactactgatgtgcagagtattatccgttgggcacatgccggagccgaaaagcacaagctggtgctggatgccatgctttatacggtagccaagcaggtcggtgccatgcacatcgcacttcacggacagactgatgctgtgattctgacgggaggtatcgctttcaatgactattgcatccaagggttgcgtgaatggctggaaggcctggctccgattgtggtaattcccggtgaggatgaaatgggagcattggccatgaatgccttgggggtgctgcgaggagaattgactttgcaggagtatgcgccggaaacttcatctgattgattcgataactacctgtataatatgaaaggaattcaggatttatttaatttgccggctgaattaattggagcttgggcaagtattttttgaaatctccttgcatattctctgttccacagtgcgggatttgtatttcacagtgtgaaatatgtatcccacactgtggtttttgtatcccacagtgtgaaacagagaattcttccctgcgtttcaaagaaaatacgctgagaaagagtgatttatgtggatagtatgaatctttgtttgaaaaataggtgtggagtgggatatagagacttcccggaagctgcggtaatggcacaaaaaaacggctttaaagggtatttataattcctttaaagccgtatataatgtggtaccttttctacttaattactgttcatattccttcttccgcttcggattcatagggaaccagcctttcagcacgcgttcgcgctgttcgaagacctccttgatggtccagaaagaagagaatgagaaaactcccaacagggtcgacagcagaatctgacttaccagtatgtaatcgatgacctatatttcagtaatttatcttattatggacagaaggcggctggagcattgaaataaattttttatggtatattcaaatctgttataatttgagaaagaaatatttattgtttcatttaattgattaattttgtgttcatacgatagatttgaatttggtttaacttatagttattgtatctagaatgaagaaattcttgatttcgttgtttctgcttttttttgctattgtttctatggcagatgagatgcctatgttgttatcagagcttgataaagcaattaaagaacgtcctttgtatataaagaagcgtttggaatacttggagcgtttgaataaaatgttagataattcagaaactaatgaacaacgttatcatatattaggagagttatattctggatattcttcttttaatgctgactcttcattgcatgtggctcgtgctatttatgaagttgctcaacgtatccagaatgaggattaccagataaatgctttaatgaatatggcggagatttctggagttgctggtatgtttaaagaatctctggatttgatgaaaaaggttaatcgggaacggttgcctgattatttgcgaccttattattatcatgtttatcgtactgtttatgggaatatggctgattatacggtttctgttgcccaaaaaggccaatataatagattaacggattcttatagagattctattttgctggtaaataatcaggagtctgttacttatcaaattgttaaggctgatcgttataatgttcatggtcaatgtaaggaagctattgcaatgcttgaagattatactaataaacataaaatggaagttcatgatgaggctatactttattatacattatcaaactcttattctttaattggagataaagagaaccagaaacgctgtttgttgctttctgctatagctgatatgaaatcgggagttagagaatatgcttccttgagagaactggctgtgttactttatcaagagggagacctcgatcgtgcttattcttatttgaaactttgtatggaagatgcagctatgtgtaatgcccgtttacggattatagaaaccttgaaaatatttccggtgataaatgaggcttatcatttagaaaaagcaaggcggcagcataagttacaaataatgtttatttgtatttgtatcttgtcatttattttattgggaggagtttattatatgtattgccagatgaaacgtctggcggtagcacgacgtcaagtaatagatgcgaaccggaaattacaggatttaaacaatgacttgtgcctgtcaaatgctaagttgaaggagttgaatcacgcattgagtgagaatacttatttaaaggagatttacataggacgttatcttgatcaatgctcaacgtatattgagaagttggatgaataccgtaaaagtttagctaaattagctgcggttggaaaggttgaggaattgtatcatcagttgaagtcttctcgactggttgataaagaattaaaagatttttatgcgagttttgatgatacctttttgttgctgtttccgacttttgttgatgattttaataaactattaattgaaagtgaaaaagttcatttaaagccgaatgaacggcttaatacagagttgcgtatttttgcattgattcggttaggtattacagatagtgtaaaaatagctcagttccttcgttattcggttactaccatttataattatcgaactaaggcacggaataaggcggcttgcaatcgggatgaatttgaaaaatatgtcatgcaaattggtagtttagagcagtagcgtcttgcttttcatttattggattactacttttttgacattggaatcattctctaatattataataattagaatgttatgattatttgagtatcttaagttactacttttatacttggttgccttgaagcttttatattagcataatacttttgcattgttggaaaaagatgtagtaatattacatctaatttattaattaaaagtctaatttatgcaaaacaacacttcaaggtttctacaaaagaagcgagcgctttctcttttaggagggctatttattacagcgagtgtatttggtcagaatcttacggtaacaggtactgtaaaggatgttacaggagaacctgttattggggcaaatgttatccaggaaggaacgtcgaatggttctataacggatattgatggaaaattctctttaagtattcctaaaggatcggttttggtgatttcttatataggatacgcaagtcagaatgtaacagtgacaggtaaccagccgcttgttattactttgaaagatgacacggaactattggacgaggtagttgttgtgggatatggtacgatgaaaaagagtgacctgacaggagcagtaggttctgtcggagcgaaggatatgaagaactctccaatatctaacgtaggtcaggcactgcaaggtaaagttgcaggattgcagattatagatagtggtaagcccggagataatgttactattcgagtacgtggtattggttctatcaatgatagtaatccgttgatagtaattgatggagtacctacagatttaggacttaattctatcaatatggcagatgtcgagcgtgttgatgttctaaaagatgcttctgccacagctatttatggttctcgcggtgctaatggtgtagtaatggttactacgagaaagggagaaagtgggaaaggtaagctttctttcagtgctaattgggctgtacagaatgttacgaatcaaccagagatgttgaatgcgagtcagtatgcagcttatagcaatgatatgctttctgcagctgggcaaacaacaaatcctttgtgggcagatccttcttcattgacttcaagtactgattggcttgatgaaatgttccgtacaggactatcacaaaattatacagttagttactctggagggaatgaaaagtctcattattatgtttctggtggatttttagagcaaaaaggtgtggtagagagcgttaaatatcgccgttttacgtttcaagccaacacggactctcaggttttgaattggttgaagttctcaaataacctgacattttctactgatactaaaacttcaggaagctatgatgtggcaggtgcaatgaaggcacttcctacacagccagttaaaacagatgagggtgactggagctatcctggttatccggactacgacaatcgttcacaggctaactggtacggaacgatgcgtaatcctattgggcctatatacaatgatagcaagcggacggatggatataatttcttggctaatatttcagcagaaataaagttttgtgactggttgcaatttaagtcaacatttggctatgatgctaaattctggtttaatgaggacctatatccaaagtatgactggactgcttctggagaagctggtgaaacaagtaagtaccaaagtagtgataaatcttttacttacttgtgggataactattttacttttaataaagattttggaaagcaccatttagatgctatggtaggtagttctgcacagtggaataaatataattacatgaatggtaatgtatctggctttttatttaatgaatttagtcagttgaccaatgcgaaggaaataacaagcttgacgggttccatgagcgaatgggctttactttcgtatatggctcgtgtcaactattcatttgatgataaatacttagttacggcaactgtacgacgtgatggttcttcacgttttggagaaaataatcgttggggtacattcccttctgtgtcattagcatggcgtatatccaaagaatcttggtttccacaaagtgaggtcgtgtccgatttaaaattacgtgcaggatatggagtaactggtaatcaggcttcaattggtaattatgattttgcagcattgtttgatatccgtaaatatgcttttggaggggaggttgtcgatgcgttgactacaacaagtttgtataatcctgatatccgttgggaggctattcatcaggccaatatcggagttgacttaagtttgtttaattcgcgtgtaaacctatctttggatgcttatgtaaagaatacaaaggatatgttagtttcagcttcagttcctattactgccggatttgatgaaacagtctcaagttgtcagactaatgctggaaaggtccgtaataaaggtgttgagttggctttacatacttataactttgttggaggggattttaactgggatactagtttgaatttgacttataataccaatgagattgtagatttaaatagcaacataccgatgttccgtaatgagattgccggtgaaaatgtaattcgtttggctaatggatttccgataaatactttttatgggtatgtgactgatggtattttccaaaattgggaggaagttaattcacatgcattccaaagtacggaaactagtccgggtgatattcgttttaaagatttgaataatgatggaaaaattaatgaagatgaccgtactgttatcggtaatccatctcctaagtggatattctcaatgaataataacctgagttataaaggatttgatttgtctatttatttgcagggagtgagtggaaatgatatttttaatgcaaataatataacgaatgagggaatggctggggctgcgaaccagactacggcagttttgaaccgttggacaggggaaggaacaagttatgttatgcctcgtgcggtactgaatgacccggccaagaataatcgtgtttctgaccgttgggttgaggacggctcttatttgcgtataaagaatattacgttaggatataatttccccaaaaaatggataaagaagttaaccttggagaatgcacgtctgtttgtttcttgcgataatgtggctactattactggatattctggttttgacccagaagtagatattaatgggatagataataatcgttatcctatttcacgaactcttagtttaggagtcaactttaatttctaatctgaaaaaacaattattatgaaacatattacttatataatattggcatctgctttgctgacttgttcttcttgcagtgattttttggaaaagtatcctaaggattctcctagtactactattcctatgagcgatgatttggctgtagctatgactaacggatgttatcagtctttacagtctatgaatctttataatcagcgtatctggagtatggatatttgtgccggtgatagcgaagcggggggagacccttctacaggtactgatggagttgaaacaaaagaagtcgctaatttctatgcaactccaagtaataatcttgcagttggattatggagaggaggatatactggtattggtaattgcaatacagccattcagtctttatcagctaatgcggataatatttctccggaaatattgacccgttctttgggtgaggcttattttttacgtgcgcattattattttatcttggttcgttgttttggaggagttcctattcgtacagaaccggctaaagttagtgaccctaaagacattgcccgtaatacagcaacagaagtctatgacctgattataaaagattgtaaggaggctatagaacgcttacctcaaaaaaatgagttagctccagctgacttagggcgtgctactaaggatgccgcttgcactcagttagcaaaagtttatttgactcttgcttcatacggtaatacctatgcatctttagcacccgaagaaggattttatcaggcagttgttgatttatgtgatgagatcgctacgatgggatatgatttggcggcttgtgattatgcctctttatggaatgagaatttaattaaaaataagaatagtgcagaatctatttttgaaatacaatattctggagagaatgcaggaacgggcggcttttgggaaaatgatggacaggcatcctggtgttcaacatttatggggcctcgtaactctggatttacttatggctcttatgggtggaatcaacctactgatgaattctttgaatcgtatgaagaaggtgataaacgtaaaaatattaccgtattttatgaaggatgtccggattttgatggaaagtcctataaggcaagttatgcttttatgactgggcgtaatgtgcgtaaatttattattcctatttctttaaatttatatcaggatgcagagacaagtcctcagaactttatagcttaccgttatgcggatgtattattgatgaaggcggaggctttgaatgaattgggtgaaacggttcaggcgcaaactccattgaatatagtacgacgtcgcgccggattaggagactttctgtcaactaataaggaggaaatgaaggagaaaatcattcatgagcgccggatggaacttgcattcgaaggtcatcgctggtttgatttaatccgtattgatgggggagattatgccttgaagttctttaattctattggcaaggtaaatgcaactaaagaccgtatgttactacctattccacaagtagaaatggatgcgaatgcattgatggtacagaaccccggttattaataacttaaacttatagattatgagagttcaaaatatatttttttatttatccgtattgctttgttgtgtttttacgttaagttcttgttcagaggatttgactgaaacaaataaaggctatgatgtgctgacattgactgctgataaggaggtgattaatcttaatgaaaatgatgcagctttgacagctctaacattaaagtggactagtggtacaaattatgggacaggagcgcggttgaattataagttggagctgcgggagaaaggaagtactgaaccaacagaaccattgttaaataagcgatttaatgatcaggaactttcttatgcttttacagttagagaattaaatgattatttgcatgctgctggaattagtttgacatacggtgaaacagtggaagttgaagcaactgtgattgcagaggtcgttggttatgaagactatgagcagaattcttctgtttcttttaaagtgactacttatgaaccggtttctgagacattatatatttgtggtgatgcgacggaaggtggatggtatgcagaacaaatgggagtgtgcagtctggttgataaccagcaacctggtatttttaatattactgcaacattgaccgagggtaaggattttaagttctttactcaaatggacttttcttctattgcttatgtttgtgctcctgatggagaacaaatattaagtgatggtatgaccacaaatattattcaaaaagttgatgatacggtagatgacttgaaatttcaggtaacagaaaccggaacctataagcttacgattgatttgttgaataatactctgaatatagtcaagagtactccagtggctccagcttttaatactttgtattttgtcggtagctttactaattggacttttaaaccgatgaagcaagattttgtgaatccgttcgtatttttatatggtgatgtatttacatggactcctgatggtgagtttaagtttggaaccatggatggaagttgggataatatgtatatggcaactcaagataaagccccgtatacggatactaatgtaaaattgggtggtacagatcagaaatgggttttgaaagaaggagaatgcggaaaggcctataagattcgtctggacataacaacaggtcaggaaaaaatggtgatgactccttttgaaccttatacggaaatttctttgataggtgatgctactcctgcaggttggactttgccttcttctgctccaatgacaaagatggacgaatatacttatcagtggactggaaatctgacagcaggtgaaatcaagtttacctgtgataaccagtctgattggatgggagcttggtttatggctgtagaaaatggtcttacatttgaagcaggtgaatatgatatgtactggattgataaaacgaatccagattatggttatggaagcttagataataaatgggttgtgactgatccgggaaactatacgattaccctgaatcaagctacagaaaaactcgtagttaagaaaattgattaaattagaattgtttatcatgaaaaaaataatttacttggcaggaatttttctcctttttactgcatgtaagaacgatgacggagcaggaatggcaaatttggaatatgaaggaggtgaagtttctgttaaaatagaggaaggaactggtatttctttatttacggataaagcttgttatgcaccaggagaaacagtaagttttgggattttaggtgacattccgtcgaacgcaaaaattcgttatcgtcatttggatgaagtgattgaagaacaacctttggctggttcgtcatggacgtggactcttccaactgtagattttacaggttatatggttgatatttatgcatcatcggatgataaggaaataatttacggaacaattgcggttgatgcttctagcgattggaaacgatttcctaggtatggatttgtggcagagtttggtcagaaatcggatgaagatataaaggatgagatgtcttatttgagccgttgccacattaatggtgtacaattccaagactggcataataagcatcattggcctttaggaagtactcgtgatggacagattatgcctgtgtataaggatattgccaatcgtgatgtatatacggaaactgtggaaaagtatattgaggtgcagcatgctttggggatgaagtccattttttataatctttgttttggtgctttggatgatgcgaatttggatggtgtgaaagatagctgggggcttttcaaagattataaggcaaaaacgcgtgattgccatgaattgcctgatagttggaaaagtaatatttatttgacagatccggggaataaggcatggcaggactatttgatacaacgtaatacagacgtatataatcattttgcttttgatggttatcagatagaccagttgggaaacagaggaaccgtatttaatgtatatggtaaggaagttgatttgccacaaggttatgcgtcatttataaaggcaatgaagcaggcacatccagataagaggttgattatgaatgctgtcagccgctatggcgcagaacagatagcccaaacaggaaaggtcgattttttgtataatgaggtatggggtaaagataatgaccgtactgaggcgaaatttagtcatctgaaaacaattatagatgagaataatgaatactctggcaatcagttgaataccgtatttgcagcctatatgaactattggttggctgaaaatgtaggtgaatttaatactcctggggtcttgttgaccgatgcggtgatgtttgcgttgggaggttcgcatttggaacttggtcctcacatgttgtgcaaggagtatttccctaatgacaatttgaaaatgacggaggctttaaaaaaggatataattcattattatgattttatgactgcttatcagaatgtgctgcgtgatggtggttcattgacaactaatgtcgatattgtatctgttgacggtaaatttgaggtgcaatcctggccaccggttaaaggaaagttatgtacgatagggcgtagtctggaaaatcaggatgttattcatttgttgaatttatcacaagctgatagtgatgaatggcgtgatgattatggaactatgccggaaccaaatacaattgaaaacccttcctttagtatttgtccttcacgttctgtgaaaggtctttggatggcatcacctgattatgccggaggagccgtaatcccaattgcatttaaggtaaatgggaaccgtttagagtttactttgccttcattaaaatattggaacatgttggtcgttgaatataaataagaataaaaaacagtatgaagctaaaattaattatatctgcattattattttcagcattaaatgttgatgctgatgtggtaacatcacctaatggaatcgtttcaattgatttccagttaaagaatgggatacctacttataaagtagattataaaggtaaacctgtaattaaagaaagtagattaggtctggaattacgtgatggaaagaatttgatggatggctttgaacaacttaatgctactacatctacttttgatgaaacttggcagcctgtatggggtgaggtcaaagaaatacgtaatcattataatgaacttcttgcagagttgaagcagccatcaacagatcgttatatgaatattcgttttcgggtatatgatgatggggttggattccgttatgaatttccccagcaaaaaaatttagtttattttgtaataaaagaggagcatagtcaatttgctatgactggtgatcatacggcttggtggattcctggggattatgatactcaggagtatgactatacggagtcgaagttatctgaaatacgttcattgttgccaaatgcagtaacttccaatgcctctcaaactgtattttccccaacaggagtgcaaacatcattgcagatgaaaacagatgaggggttgtatattaatttgcatgaagcagctttggttgattattcatgtatgcatttaaatctggatgataaaaatttagtatttgagtcatggcttactcctgatgcagacggatttaaaggtcgtttacaggctccatgtcattctccatggcgtacggttatggtctctgatgatgcacgtgatattttgtcatctcatttgattttgaatttgaatgagccatgtaaaattgaggatacttcttggattaaacctgtaaaatatatgggtgtatggtgggagatgattgctggagggaagccatggagctatactaatgatattccgtccgtgaagcttggagaaacggattatcggaaagtaaaatctaatggtaatcatcctgctaatacaagaaatgtgaagaagtatattgatttcgctgcgaaacatggattcgatcagttgttggtagaaggatggaatgttggttgggaagattggtttggaaatcaaaaagattatgtttttgattttgtgactccttatcctgattttgatattgaacagttgaatagatacgcacatgataaaggaataagattgatgatgcatcatgaaacatctggttcatctcgtaattatgagagacatcttgaacaggcttatcagttaatgaataaatatggctatacagccgtaaaaagtgggtatgtgggaaatatcttgccttatggtgaacaccattatgggcagtggatgaataatcattatttgtattgtgttgtagaggctgctaaacataaaataatggtgaatgctcacgaagcagttcgtcctacaggactttgtcgtacatatcctaatctgattggaaatgaatctgcacgtggaacggagtatcaggcttttggtggcagtaaaacatttcatacgacagtcttgccttttacgagacttcaaggagggccgatggattatacaccaggtatttttgaaatgaatatttccaaattaaatccaaataatagctcacacgtaaatgctacattggcaaatcaattagcattgtatgtaacgatgtatagccctcttcagatggctgcagatcttccagaaaattatgagcgttttatggatgcttttcaatttataaaagatgtaccggttgattgggataatagtatttatcttgaagcagaaccagggaaatatgtaactgtggctcgaaaagaaaaaggaacgaataattggtttattggtagtgctacaggtgatgctaatcatcaatcagttatttcgcttgatttcttggaaaaagggaagaattatatagctaccatatatgctgatacaaaagatactgattataagtcaaatcctcaatcatatcagattgtaaaagggcttgttaactctaagaacaaactaaaaataaatacagtagaagcaggtggatatgctataagtctatttgaagttacaacttcagacgaaatgaaggggctgaaaaagctatctgtatcgcctataaaataatattttattataataattaattagaactttgatgttagcacctctgtgaggttagatttacagaggtgcttattcttttttaagatgaagaactttactctatatgatataaattaattgtgtattggaatagattgtaaggttagaggattataactataaatcataagcctatgtttagatatattgttggatggttgtttctagctgtgtcagtcgtagcgcaagctgcagtgcctgtttgtaagtcattttcgcaacaaggacgtgaagtaacatttcatttggataatggagcagcttttcaattgaaattgtgtgggcaatccgtagttcggatatggtattctccagatgggaaattacaacggttaaattcttcgtttgctgttattaatgaagaattggaagatgtgggagtagtcaatgtgaatgaggaagcgtcttgttatgagatttttacacctgtattgagaatacgcgttaataaatcccccttgaagctccaggtttttgataaatatcaaaagcttatttttagtgattatggtgatggccggacttgtgaaggtgaaaagaaggtagaatataaaatgctgaggcgtgatgagcatttttttggattgggagaaaaaaccggtaaattagatcgacgaggggaaacatataaaatgtggaatagtgatcggccttgctatggtgtagctgatgatcctttatataagagtattccgttttttatgagtaattatcgttatggtatatttttagataatacttataaaacagagtttaagtttggaacagagagtcgagattattatagttttgaagctccaggtggtgaaatgatatattatttcatgtttggtaaggactataaggaaattatgggacattatataggactgacaggaaagccaattatgccgcccaaatgggctttgggatttgctcaatgtcgtggaatgctcactcgtgaggatttaacacgggagattgcgactggatatagaaagcgtggtattccttgcgatattatttatcaagatattggttggactcagaacctgcaagattttgaatggcgtaaaggtaattatgagaatcctaaacagatgctggcagatttgaaatcacaaggttttaaggttgtagtatcacaagatcctgttatttctcaatctaataaaaaacagtggcaggaggctgatagtcttggttattttgtaactgattcaacaacaggcaaaacttatgatatgccttggccatggggtggaaactgtggtgtggtagattttacaaagcctgaggtagcagattggtggggagcatatcagcaaaagcctataaatgacggtatcagtggattttggacggatatgggtgagcctgcttggagtaatgaagaggatgtggatcgtttggtgatgaaacatcatttgggaatgcatagtgagattcacaatgtgtatgggttaacttgggacaaagttgtgaaagagcagtttgaaaaacgtaatcccaatcgtcgtgtatttcaaatgactcgtgctgcttatgcaggattgcagcgttatacttttggttggactggtgatagtggaaactgtgacgatgtaacgcagggatgggcgcagatggctaatcagattcctgtattactttctgcaggattaggcttgataccttttactacaactgatatatcaggatattgtggagatattaaagattattcagcaatggctgaactttatacacgttgggtacagatgggggcttttaatccgttaagtcgtattcatcatgaaggtaacaatgcagttgaaccatggctttttggggaagaagcagaacagaatgtgaaaaaagctatagaattgaaatattcattgattccttatatctatacgtatgctcgcgaagctcatgatgcaggattgccaattatgcgtccaatgtttcttgaatatccttatgatgtggaaacatttgatacagatgcacagtttatgtttggtaaagaattgcttatagctccagtcgtaaagaaaaatgcgaaaaccaagaacttgtatttaccagagggtaactggttgaactataatgataaaaggacgctttactcgggagaacagtggttgacagtggatgcaccattgtcatgtatcccaatgtttgtaaagcaaggatcaatcattcctactatgccagtgatgaattatattggtgaacatcccgaatatcctgttatatttgaagtctttccagcagtagaaggtcagagtgcttctttccttttgtatgaagatgaagggaccgacttgggatatttaaaagacgagttcttgaagactccgattaatgtgaaaacaacagttgaagggtttgaaattgctatttcctcacgtgagggtagtaactatcagttaccatctaagcggaatatgattttccgattttatgtagaaaaatctcctcagaaagttgtgattgctgggaaaaaacaaaaaaaagtaaagcctgaaaaattacatgaccaggaaaatatatttgctgatgctgtaatatggagttatgacaaggaaatgcaaattttaaatgtgcttgttcctgatagtggggaagcgttggagatgagtattatacaataatatgttggtcgtagatatgtatgttttgagattaggagttatataataaaaatagaatcagaaagaaaatctaatattctttctgattctatttttatttgaagtataattactgttcatattccttcttccgtttcggattcattgggaaccagcctttcagcacgcgttcgcgctgttcgaagacctccttgatggtccagaaagaagagaatgagaaaactcccaacagggtcgacagcagaatctgacttaccagcacggaaccgatgaggccggcgatgcccaatagcagaaaaatccaccagcagcgcgttccccaataatattccgctttgactactatcggatgaaacagaccgataatcaggaatgtgcagatgccaatgaggattccttcccaatgaaggctgtcaatccattccattattcgtcagcgtctttacggatgggaatttctttcttgatgctctgttccagtgaaatcaaggtctccgtagcagttacacccggaatttcctgaattttggagttcagcaaatccatcagatgctcgttatcggtagaatacagtttggtcagcatggtgtacggaccagtggtgaaatgacattccacgatttccggaatcttcttcagttctgccactacgctcttgtacatagagcctttttccagcttgattcctacgtatgtgcaggtgctgtatcccaggctcttgggatttacatggtaacctgaaccgataattacgccaaggtcaatcaggcgctgaacgcgttggtgaatggcagcacgtgacacgccacattctgctgcaacgtctttgaacgggattctggcattctgtgagatgatttccagaatctgtttgtcaagtttatcaattttttccatattactaaatggttcttgtttttatcatattgtaagcaaatgtagaaaaacttttttatctatatgctattttgccaaaaaaaacgtgattatttttggcgaaagaacaaattgtgggtaaattgtgtaagtcgttcggccctatttgactatctttgattcccagaagataggatgcggttgggaagtagagccgaaaaacatgtttttcgttcgtacttctctcacctttcactatctttgtaagacttattatttattaaactcaagaactatgcatccattggaattgtttaagttttgtccggtatgtggttctcctcattttgaaatacataatgagaagtccaagaaatgtgcggactgcgggtttgtgtattattttaactcaagtgcggctacggtggcttttatcctgaacgggaaaggggaactgctggtttgccggcggggaaaggaacctgccaagggcacgctggatttgtcgggcggatttattgatatgttcgagactggcgaagaaggggtagcacgcgaggtgaaagaggaaacggggctggtagtgacggaagcgaaatatctgttttccttgcccaacacatatctgtactccggttttctggtacatacactcgaccagttcttcttgtgtcaggtggaagatgaccatctgataaaagccatggacgatgtggccgatgcatggtggatgccgctggacaaagtgaatccggatgatttcgggctggactctgtacgtaggggagtcgcacgctttttggaaacctgtcggaacaaaaaataaaagggattatgggtaaatataagaaatatatatggatggcggggctgtgttgtgccttgccgttgacggtttccgggcagcaggtggagccgctgaccggggcagaccgtttgttcaacgagggacgggagctgttcttgcgtcaggattatgcggcagcccgacagaccttggtgcgctatacccgtcaggcgggggaaaaggcctgggccgatgaagtggactatatgctggcttgcacggcctatgaattgaaaatgccggattgtcgggaagtgttgtcggattatctggaagcacatccggagtcgcgttaccgcaatcgggtgcaggcactgataggggccagctatttttcggaagagaaatacatggaaaccattgctacgctgaagggctgtgacatttctcttttatctgatgaagaacgtgatgccagtgccttgcgcatgggtacgtcgtacctgaaagtcggtaaattgcaggatgcggctttctggttcgctgtgttgaaagagacgagtaaggacttccataacgatgcggtgtacaacctggcttatattgattacgtacagcagaaatatgataccgccttgcagggattccgtgaggtgcaggatgaccggaagttccagaaactggcaccttattatattgccgacatttacctgattcagggaaattatgcacaggcccgaaaggtggcagatgcttatctggctttgtatccggaagagaagtatgcggctcagatgaaccgtatctccggtgaggcggcttacggacagaaagattatgcggctgccatccagtcgctggaacgctaccacgaagcggaggaggtgcctgcccgtctggctatgtataagttgggtatgagttattttaatacgggagtctattccaaggcgttgtcgcatttgggtgaggcaaccggtgcgcaggatgcactggctcagaatgcttacctgcacatgggattggccggactgcagttgaaggaacgcaatcaggcacgtatggcgtttgagcaggcttcgcgcatggatttcgaccgtagcattcaggagcaggctttgttcaattatgcactctgcattcatgaaacgtcttattctccttttgccgagtcggtaacggtgttcgaacgcttcctgaacgaatatccctcgtcggtatatgctgaaaaggtgaacgattacctggtagaggtgtatatgaacacccgcagctatgaagtggcgttgcgttctatcgagaaaatcacgcatccgagtgcacgtattctggaagcgaaacagaaactgcttttccgtatgggaacacagctgtttgcgcaggccgactatcggaatgccattgattattttacccgttctttgcagttgggccagtataatcagaagaccaaggccgatgcctattattggcgcggagaatcgaaataccgtctggagcgttatccggaggctgccaatgacatgcggctgtatctggagtttgctaccgacaagaattcacaggagtacggactggctctttactgtttgggatacagtctgttcaagcagaaacaatataattccgcacgcgactggtttgtccgctgtgtgcagaacggacggacgcaggaagcttctgtagcaggcgacgcgtacaatcgtatcggtgactgctatttttatgagcgtcgttttgaagaagcccgccagcaatatgcgcaggctgtcgtcacttctccttcgctgggagattattcgttgttccaggagggtattgtgaaaggattgcagcgtgattatgccggaaagattcaggtgctcaacaaattgattacggattatccgtcgtcggcttatctggacgatgccctgtatgaacagggacgtgcctttgtgcagatggaggatagtgagaatgccatcaagcgttactcattgctggtgcagcgttatccggaaagtgagctttcacgtaaggcagctaatgaaataggtctgctttattatcagaacgaccgctacgaagaagccattgcggcttacaagcaggtcattacgaagtatccgggtagtgcggaggcgcgcttggcacagcgtgacttgaagtccatctatgtggatttgaataaggtggatgactatatggcgtttgcttctacggtacctggtggtgcgaccttcaacgtgagcgagcgcgactctttgacgtatacggcagccgaacgtgcttacatgcgtggagatattgccggagcaaagaccagtctgacccgctatcttcagtcgttcccgcaaggagctttcagtgtggatgcgtcttattatttaggtttgattgattataaccagaaggattatgcggcagcgtcagcccgtctggaagaagtgttgcgcttttccggaagcaagtacgaaggaaaggctttggcgctttgtgccgatatggcttacaaccagaaggaatatgccaaggcattgaacctctacaagcgtttggccgaccgctcggctgtgcaggaagagcgtctgcaggctgaagtgggtgccttgcgaagcgcttgtgcgttgggcgaccgggctgaaaccgtgacgacggcttcggcactgctcaagcagagcaagctgactccggaggtacgtagcgaggcgttgtatttccgtgccaaggcgttgttggcagaagggcagaagaagtcagtactggccgacttgaccgaactggccaaggatacgcgtaatgtgtacggggcagaagccaaatacctggtggcacagacttacttcgatgaaggagaaactgccaaggcagagaaggaggtgctggaatacatcgaagtcagcacaccgcatgcatactggctggcaagaagtttcgtcctgctgtcggatgtgtatgtgaagctggaccgcaagatggaggctaaacagtatttgttgtctttgcagcagaattatcaggccgatgatgacatcgccggaatgattgaaagtcgcctggaaaaacttaaaagtgtaaagtaagatgaaatacataagtacgatattggtttgcgccggtctgtggcccgcagctacggtatgtgcgcagaatggaggggagaaagattctacactgaaccggacggtggtagtggaaaatcagtacaaccccgaggtgatggatgcctttaaggtgaatgtcatgcccgaggtggaggagccggcggctccgaagcaggccattaattatgcgacggatttgcgtccgttgggagcctggaaagccactcctatggaggcgatgtccagagaactggctcagaagggagccgacaggggctatgtccgtgcggcttacggtacgctgaacaatgtggacctgaaaggaagttatctgtgggatatttcttcgaaagaccgtctgggaatcatggcttctttgtacgggctgaacggggatattccgcatttcatggaaggagaggaatggaaatcgcgtttttaccgtacggatgtgtcgctggactaccggcatgatttccggaaggtggcgctgaaattaggaggtgcctttgcttcgcaggtatttaattatatgccgtctatgaatgaaggggtggagaactggcctaccacacagcgttatacgttgggtgaaggatatgtaggagtggtgtcccgcgacaaggacttgcctatacagtttgctttccagactggcttgcgtagcttcagcctgcgctatgataattattacatggtgtatggttctgaaaatattttccataccgaaggcttcatggctggaaatatcaatgaggaacagcaggtgggcgtcggtctggagatggacaacctgattcacgatgtgtcgcagcaggattatacgctgttgcagttgaatccgtactacacctatcagggcgaatccgtaaagttgcgggtgggtgcccatgtggatttgcagacggcttatggcagtggactaaaggctgcgccggatgtcaaactggaatatacgttcgccgatacgtatgtggcttacctcaatgtgttgggcggaacacgtctgaatgattttcgccggttgaatgacttctcaccttactggacgattgcacagcagatgcatacttcctatacaccgctggatgcgaaaatcggtttgaaggcttctccggttatcggattaggtttcgaactttacggaggttaccgtattaccaagaatgaactgtttgccgtacaggaaggattttatacggatgagcagaatgtgttctatacaggtatcctgcaggataagggaaaagtcggttatggaggtgtttctgtgagctatgcctaccgtgactgggtagacttttctgtgaacggtacgtattatagctggaacgtgacggaaggcaacgaaggcttgttgcagttgaagcccgaattgaaggccgacttcagtgtgcgtgccaaggtaatcaagaattgccatgccttgttgaactacaactacgaacgtcgtcagaagaaggccgacctgaaacgtgcggatgccatcaataacctgtctgtaggagcagagtatgagttgctgaaccgcatcaacgtgtttggccgcctgaataacctgctcaataaggcatacgctactgaagcaggttatccggtggaaggtttgcatttcatggcaggcatcagctgccgtttctaaatttattctacgtggcggcagtgctgaatcagtgcgccgtcacggaaaaagaaacggctttcttgtccgtgcggaaggaggggagcagggataccgtcgtgcaaggtcacgcgggcatgttctatgaatgcttcgtcccatagcccttgttccagaaaagcctggagcgtctggcttccgccttctaccagtaatgtttgtattttttgctcataaagcacctgcatgatttgcgggagaatattctggccgaaatccagtgtcacgtaagtgaggttctgggtagcggccttttctttttccgtaaagacgagggtaggagtactgccgtcgaacaggtgcagatggggcggcaaagtcagctgtcggtcgatgaccagccggagcgggttctgtccgtaccattcgcgtaccgtgagcgacgggttgtcgagcagggctgtgcgtcgtcctacgaggatggctttctgttcggcccgcatcttgtgaaccgccaaggtggagagaggagtggaaaggcgtaccgcgtttccgtcttcacgccggatgtccagaaaaccgtcggccgactgtgcccatttcagggtgatgtaaggacgctttttcagattgaatgtcacgaaagcacgaatcagttcccggcattctttttccagtacaccgaccgtcacttcaatgccggcatcccgcaacttctggattcctcttccggctaccaaagaaaacgggtccacacagcctactactactctcggaatccctttccgtatgattaagtcggcacagggaggagttttcccatagtgagaacagggttctaagctcacataaatggtggcatccttcagcagactttcatctttgactgaggcgatggcattcacttcggcatgtccttccccgcaccgcacgtgataaccttcaccgatgatttttccgtcgcgtacaatgacggcccccaccatggggttgggagctgcatggcagataccgtttcgggccagttgtatgcagcgccgcatatatttttcgtctatcgtcatattcttcgttttttatcgttacttttgcaactatgcatccggtttatgtacatatcaaaaaagagctgagtcctttttatgcagaagaagaggcttcagccatggcaaagtggatatcttcggatattctgcatctctctactcttgaactttatacaggcaaagatatgaatttttccacgaaagagtgggaggaactggaggatattcttcggcgcttgaagcagcgggaaccccttcagtatattttgcaggaagcctctttttgtggaatgtcttttcatgtggaacaaggggtactgattcctcgtccggaaacggaagagctggtggaatggattgtctccgattatcgggaggcaggtcaggtgcgtattttggatattggcaccggaagcggctgcattcccgtgtcattggcgcagctgttgccggaagcgcaggtttcttcgtgcgatgtgtcggctgaggctttgcgcattgcggctatgaatataaagcgttatggagacaaggtgactctgttctgtgccgatattctgaaagaggaacttcctgaatgtcaggtagacgtgctggtgagtaaccctccttacattacggaaagcgagcggacggatatggaggcgaatgtactcgactgggaacctgaactggccttgtttgtacccgattcggacccgttgcggttttaccggaggatagcctggaaaggacttgactggctttcggaaggaggagcattgtattttgaaatcaaccgtgcttacggggccgagactgtgcggatgctggaggaacttggataccgtcagattgaattacggaaagatttgtcgggaaacgaccggatgataaaagcaatcagaccatgaaagaatatagtgaagcagagataaagagtaaggccgaagtgtattgctcgtcggtggagcgttgcccgtcggacgtggaggagaaaattcgcaagtggggggcttcggaggaagtgacagaacggattatggctcatttgcagaaggagcgctacttggatgcggctcgtttttgccggttttatgtgcgcgacaagtaccgtttcaatcagtgggggcggatgaagattgcacagatgctccgtatgaaacgcctgtcggacgaagacatccgtgccggactggaggaaatcgataccgaagaatacgacggaatcctgaaaaagatgctgaagcagaaaatgaaaggaataaaagctgccaatgactatgaacggagcatgaagctgattcgttttgctgtaggtcggggctttacactggaagaagtacgtcgttttgtcaatcaggtagagccagatgaatattttgactgacatccgagattttctgtttccccgtctctgcatggcttgcggacggaagttgcaggtctccgaacaggctctttgctgtgattgtttgtcacagcttcctcatacgcatttaggaaatacaccgggcaatgaaatggaaaagattttctgggggcgtttcccgatacagcgggcgtcggctttgttttattatgcccgtggagggaaagttgcccatatattggccggtatgaaatactatggccgtcagaaagtctgccggcagatgggagagatgctggcgcatgaactgctcctgacgggtttctttgagggagtagattatttgttgccggttcccttgcaccccgaccgtctgcgtaccaggggatataaccagagtcgcctgctggcagagggcatttctgagcagacgggcattccggtgtgcgacgggttgctctgtcgggtgcgaaacaatcagacccagacccataaatccgtgctggaacggcaggaaaacacggttcatctttttcatctggctggcgatacccgtatgctgcaaggcaaacatgtgatgctggtggatgatgtgctgaccacaggggccacgttgggtgcctgtgcagatgtactggctgatattgagggaataagcatcagcattgttacactggcgtggacgaaataaaacaatctgacgggttttagtaaaattaatgctcttaaattttctattcccgatgtatttctataattttgcaaaaacatttatcagagaattaaaaagttatgaaagctttggaaagattatttgcagaaaagttgctgaaggtgaaggctgtgaagattcagccggctaacccgtttacttgggcatcaggttggaaatcgccgatttattgtgacaatcgtaagacgttgtcatatcctgcacttcgtaacttcgtaaagttagaaatttgtcgtgttattcttgaaaaattcggtgaagtagacgccatcgcaggtgtagctacaggtgcgattgcacagggtgcgctggtggcagaagagttgaacttgccgttcgtatatgttcgttcaagcccgaaagaccatggcttggaaaatttgattgaaggtgaattgcgtccgggtatgaaagtggttgttgtagaagacctgatttcaaccggtggaagcagtttgaaagcggtagaagctatccgtcgcgacggttgtgaagtaattggaatgattgcttctttcacttacggtttcgatgtatcagtagaagccttcaagaaagcaaaagtagaactggttacactgaccaactacaatgcggtgctggaagtagctttgaagaccgattatatcaatgaagaggatatccctgtgctgcaggcatggagagaggatccttctcactggactggaaaataatagattctgtaactgggaaagcagtctcggattgtaaataggagatgtcatcctgagcgagtccactctgctcaagatgacatttttttatgcgatgacgggagaattttcctgaagattgaaaaaatatggctgtacaatttgaaagcaatgtgaagcatgttccttatagtcaggaacgagtatataacaaactgtccgacctgaataacctggaaggagttcgggaacgtctggacatggtgaaggacaagctggacgggaaactggaagatatgtcgttcgaccgtgattccattaccttgaaagtacagggcatcagtcttacattgcgcatcattgagcgtgaacctttgaagtgcatcaagtttgaaggtgacaaatcgcccatacctttgaatctgtggattcagattctgcctgtaacacaggaagaggctaaaatgaaagtgactatccgtgcggaagtgaacatgttcatgaaagccatggtgtcaaagcccctgcaggagggagtagagaaactggctgacatgctggccatgcttccttattaattgaaatgaccggcagatgccggagataaaaactgaaattatggctcaaaaactttgggaaaaaaatgtacaggtaaatgcggaaattgaccgctttaccgtgggacgtgaccgcgaaatggacatgtatctggcaaagtacgacgtgttgggttcgatggcgcatattaccatgttggaaagtatcggcctgctgacctcggacgaactgaagattttgctggaagaactgaaaaatatatacgcttccgtagaacgcggggagtttgtgattgaagacggaatagaggatgtacattcacaggtggagctgatgctgacacgccgcctgggggatgtgggaaagaaaatccacagtggacgttcgcgcaatgaccaggtgctggtcgacttgaagctgtttatccgtgctcagttgaaatcggtggcagaagctgtagaacgtttgttccatgtacttatttctcagagcaaccgttacaaggatgtgcttatgccgggatatacccacctgcagatcgccatgccttcttctttcggtctgtggtttggagcttatgcagaaagcttggtggacgatatgatgttccttcaggctgcttataagacttgtaaccgtaatccattgggctcggcagcagggtatggctcttctttcccgttggaccgtgagatgaccactcgtctgttgggattcgattcaatgaattacaatgtggtgtatgcccagatgggccgtggcaaggtggaacgcaacgtatcgtttgcgctggcttctattgccggaacactgtcgaagatggcgtttgatgcctgcatgttcagttgtcagaacttcggcttcgtgaagttgcccgatgaatgtaccaccggttccagcatcatgccgcacaagaagaatcccgatgtgtttgagctgacccgtgccaaatgcaacaagattcaggctcttccgcagcagattatgatgattatgaataatcttccttccggttatttccgtgaccttcagattatcaaggaagtgttccttcctgcctttgaggaactggaagactgcttgcaga

SEQ ID NO: 3798 - DNA, 77993 bp, Unknown
  gut microbiota DNA sequence
aaatccaacttcacaaatatgtagcggaatgcgtagtgagggtaaaaaaagaacccttgaactatctctaattcaagggttttcatgtgtgaaaagcatttatgtactttctttggtggtgccaccaggaatcgaaccggggacacaaggattttcagtcctttgctctaccaactgagctatggcaccatcgttttgcggttgcaaagatagagtaaaatctttaatctccaaaataaatgagatgaaaatgagaaaaaatattttttatgaaaaaaaactcgtttttcttttgtcagtattgaaaatatgtctacctttgcagcgcaaacgaaaaaacaaacgttgcaatcggaatgtagcgcagttggtagcgcactacgttcgggacgtaggggtcgggcgttcgagtcgcctcattccgacagaagagcggcagatgattctatatcatttgccgctctttcatactactcctcagtaataaataattttgtcattattttgtgtggcatgagattatttatatctttgcaaatgattggatgaaaaggtggaggggcgatttagctcctttttttgttcttaatagttaatacatgatagataaaaacgttgtagctcggattgtagaggaatggctggaagataaaagttattttctggttgatgtaaatgtgagtccggatgacaaaattgtagtggaaatagaccatgcagaaggtgtgtggatagacgactgtgtggaactgagccgctatattgagtcaaaattaagtcgtgaagaagattacgaactggaagtaggttctgcgggaatcggtcagccatttaaggttttgcagcagtatgtagcacatgtaggttgcgaagtagaagtgctggacaaaaccggaaagaaatggacgggtgtgctggcggatgccaacgaagagaattttacggttacggtagaagtgaaaataaaaccggaaggtgccaagcgtccgaagctggtggaacagaatgtaacctttacctatgatgagataaaatacaccaaatacttaattagctttaaataattatggccaaaaaagaagaaactgtcagcttgattgacacattctcggaatttaaggaattgaagaacattgatcgcaccacgatggtgagcgtgttggaagagtcgttccgcagtgtgattgcaaaaatgttcggtacagatgaaaactatgatgtgattgtaaatcctgacaagggggatttcgaaatctggcgtaaccgtgaagttgtggcggatgaggagctgactaacccgaacctgcagattgcattgtcggaagcacgcaagattgatgcatcgtatgaagtgggagaggaagtgaccgatgaggtgatttttgaaaaattcggccgccgtgcaattctgaatctccgccagacattggcttcaaagattctggagttggaaaaagacagcttgtataataaatacattgataaagtaggtactgtaatcagtgcggaagtttatcagatttggaaaaaggaaatcctgttgctggacgatgaaggtaatgaattgctgttgcctaagacagaacagattccgagtgacttctaccggaaaggagaaactgctcgtgccgtagtagctcgtgtagataataagaacaataatccgaagattattttgagtcgtacatcaccggtcttcttgcagcgtttatttgaacaggaagtgccagaaatcaatgacggactgattaccatcaagaaaattgcccgtattccgggagaacgtgcgaagattgcagtagaatcgtatgatgaacgcattgacccggtaggtgcatgtgtgggtgtgaagggttctcgtattcatggtatcgtacgcgaattgcgtaatgaaaacattgatgtgattaactatacatctaacatccagttgtttattcagcgtgccttgagcccggcaaaagtttcgtctatcatcatgcatgaggatgaaaagagagctgaggtatatttgaaaccggaagaagtatcattggctatcggtaaaggtggcttgaatattaagctggccagtatgttgacagaatacactattgatgtatatcgtgaattgggtgaagatgctgtagctgatgaagacatctacctggatgaattcaaggatgaaattgatgaatgggttatcaacgcgattaaggctatcggaattgatacggctaaaggtgtattgaacgcaccgcgcgagatgcttatcgaaaaagcagacttggaagaaaatacggtggatgatattctgagaattttaaaagcagagtttgaggaatagcgcttgcttgcaataaacagatgaggatgagcaattcattctcgtctgcttgtttatctgtgactgatatattttcctgaactctataaattgtgatgaattatgactataagattgaataaagtaacaagagatttgaatgttggaataaccacggtggtagactttttgcagaaaaaaggatatacggtcgaggcgaatccaaataccaaaattactgaagaacagtatgctgcactggttaaagagttcagcaaagacaaggatttgaaaatagagtctgagaaaattattcaggaacggcagaataaggagcgtaacaaggcttctgtttctatcgaggatattcatccggaactgaaaaagccggaagtgatagaaacagtggttccagaagatgtgcgaccaaaattcaagcctgtaggtaaaatagacttggatggtctgaagaaaaagaaaaaaccggctgtggttgagcctgctgaaacgcctgttgtacaggaagggccagctaagccagaacctgagaataaacaagctgaggtggaaaaaacggaggttaaaactgaagaggctcctgtacaacaacctcaggtagaagaaaaacaagaaccgaaacagccggaaataaaggcagaagaattgaaaccagagccgatggaagaagaaaaaaagcaacaatctgttcaggaaaataaagaagacgaagtttttaaaattcgcccgacagaatttaaatcaaagattaatgtagtaggccagattgatttggctgcattgaaccagtctacccgcccgaagaaaaaatcgaaagaggagaagaagaaagaaagagaggaaaaggataagcagcgtcaggaacagcgtaagcagatgaaagatgcgattatcaaggaaattcgtaagagtgatgaaaagacggataagggtggcctgagtgatgaggctgcgaaaaagaaaaaacgcaaccgtattaataaggaacgggttgatattaatgcaacctccaacgcatctggagcttcacgaaatgagaaatctggaaagaataaccagaaccagggacagggcggaaaacataacaaggaccgctttaagaaaccggtggtaaaacaggaggtgagcgacgaagatgtagcaaaacaggtgaaagaaacacttgcccgcctgacaaataaaggaaagaataaagctgccaagtatcgtaaggagaaacgtgaaaatattcagaaccgtcagctggaacaggaggaactggaacaggaagaaagcaaggtattgaagctgactgaatttgtaacagcaaatgagctggctaacatgatggatattccggtgactcaggttatctcaacttgtatgagtgtgggtatcatggtgtctatcaaccagcgtctggatgcagaaacgattaaccttgtggcagaagaatttggctacaagacagaatatgtaagtgcggaagttgcacaggctgtagaggaagaggctgatgcggaagaagatttgcaaccgcgtgcaccgattgttaccgtgatgggtcacgtagaccacggtaagacttctttgctggactatatccgtaaagcaaatgtaattgcgggtgaggccggaggtatcacacagcacattggtgcatataacgtgaaactggaggatggacgtcgcattacgttcctggatactccgggacacgaagcatttacagctatgcgtgcacgtggtgcgaaagtaactgacgtggtaatcattatcgtagctgcggatgacaacgtgatgccgcagacaaaagaagctatcaaccatgcgatggctgcgggggtacctattgtgtttgctatcaataaggtagataaaccgaatgcaaacccggataagattaaggaagagctggctgccatgaacttcctggtggaagaatggggtggaaaataccagtctcaggatatttcagccaagaaaggtaccggtgttcctgaattgcttgaaaaggtattgctggaagctgaaatgttggatttgaaagcaaatccgaaccgtaaggctaccggttcaattattgaatcttctttggataaaggacgtggatatgtggctacggtgctggtttctaatggaacactgcatgtaggggatattgtgttggccggaacttcatacggtaaggtgaaggcgatgttcaacgaacgtaaccagcgcctgaaagaggctggaccttctgaaccggtattgattttaggattgaacggagcgccggctgcgggtgatacattccatgtgtttgatacggatcaggaagcacgtgagattgccaacaagcgtgaacagctggctcgtgaacagggcttgcgtactcagaagatgttgacactggatgaagtgggacgtcgtctggcattgggtgacttccatgaattgaatgtgattgtgaaaggtgacgtggatggttctgtagaagctttgagcgactcattgatcaagttgtctaccgaacagattcaggtgaatgtaatccataagggtgtcggacagatttcagaatcggatgtatcgttggctgcggcatcggatgcaatcatcgtaggtttccaggtacgtccttcaggaaatgcggctaagcttgctgaacaggaaggtgtggatattcgtaagtattctattatttacgatgcgattgaagaagtgaagtcggcaatggaaggcatgttggctccgacattgaaagaacaggttacctctacaatcgaagtgcgtgaagtgttcaacatcagcaaggtgggtatggttgccggtgcgatggtgaagaccggaaaagtaaaacgtacggacaaggctcgcttgattcgcgacggtatcgtaatctttacgggttcaatcaatgcattgaagcgcttcaaggacgatgtgaaagaagtgggtactaactttgaatgtggtatcagcttgacgaactgcaacgacttgaaagtgggtgacgtgattgaaacgtatgaagaagtggaagtaaaacagacattgtaaggacgtaacgtctgaccattgtttgggtgcaaataaatacatttgtcattcagagcaaagcgaagattcttgtattcacccatcagacaggggaacaagttcttcgctttgtttttaatatatatttcggataaatggcaacaatagactgggtgattatcatcttattggctttaggagctgtctctggttttatgaaaggatttttcaaacaactggcagcggttgtagggctgatagccggactgctggtagcacgtgctttgtttgccggtttaggtgagcaattggccgtagcggtaggtacttctgtgacattcgggcagatactggcttttctgttgataggtttgatagtacctttggtgttgtctcttttggcttctgccttgacgaaaatcgtggatatgacaggattaggttttatcaaccgccttttgggggcagtgcttggagcgataaaatatgcgcttgtaatcagcctggtcatccattttattgattttgccgactctaaagataacttaatacattcaaccactaagggaagttcgttgttatattatccgataaaggatttttccgctttcttttatcctgtggtgaaaactgtaacagagaaatttatagaaacagataatattcagaattgatatgcaaatagaacccaataaatatgtgaaggaactgacgcaggcgaagtataaatatggcttcactacggatgttcacacagatattatagagaagggactgaatgaggatgtcgtgcggctgatttcttcaaagaaaggtgagcccgactggttgcttgagttccgtttgaaggcgtttcgctattggcaaacgctggaaatgcctacatgggcacatttgaatattccggagattgattatcaggctatttcatattatgcagacccgacaaagaaaaaagaagggccgaagagtctggatgaagtggatccggaactgttgaaaacctttgacaagctgggtattcctttggaagaacgtatggcgctgagcggtatggcggtagatgcggttatggactccgtctctgtgaagacaacttttaaggagatactgatggaaaagggaattatattctgctctatcagtgaagcggtgcgtgaacatccggatttggtgaagaagtatttaggttcggtagtgggctatcgtgataatttctttgccgcattgaactcggctgtgtttagtgatggttcgtttgtgtatattccgaagggggttcgctgtccgatggagttgtctacgtacttccgtatcaatgcggccaataccggacagtttgaacgtacgctgattgttgcagatgatgacagttatgtctcttacctggaaggatgtacggcaccgatgcgtgatgaaaaccagttgcacgcggcaattgtggaaatcgtggtgcttgaccgtgcggaagtgaaatattctactgtgcagaactggtatcctggtgatgctgaaggtaaaggtggtgtgtataactttgtaaccaaaagaggtaactgcaaaggggtggacagtaaactttcctggacacaggtagagactggctcggccattacatggaagtatccaagctgtattttgagtggagacaattctaccgcagagttctattctgtagcggtaaccaataattatcagcaggcagatactggtacgaagatgattcatctgggtaaaaacactcgttctactatcgtaagtaagggtatcagtgccggaaagagtcagaactcttatcgcgggctggtgcgtgtggctgaaaaggcagataatgcaagaaactacagtcagtgtgattctctgttgctgggtagccactgcggagcgcatacattcccttatatggacattcacaatgaaacggctgtggtggaacatgaggctacgacttccaagatttcggaagaccagattttctattgcaaccagcgtggtatctctactgaggatgccgtaggattgattgtgaatgggtatgcaaaggaggttctgaacaaacttccgatggagtttgccgtagaggctcagaaattgctgtctgtgtcgttggagggcagtgtaggataaacgataaaaatagattgttatgctagagataaagaatttacatgccaacattaatggcaaagagatattgaaaggtattaacctgactgtaaaggcaggagaagttcatgcgattatggggcctaacggttcgggaaagagtacattgagtaatgtattggtcggtcatccagcttatgaggtgacgaaaggaaccgtaacgtttgatggaaaggatttattggctttgagtccggcagaccgtagtcatgaaggattgttcctgtcattccagtatccggtagaaattccgggagtgagcatggtgaacttcatgcgtgcggccgtgaatgaacagcgtaagtacaaaggacttccagctttgacggccagtgagttcttgaaactgatgcgccaaaagagagagattgtggagctggacagcaagttggctaaccgttcggtaaatgagggattctctggaggtgagaagaagcgtaatgaaatattccagatggctatgctggaaccgaagctgagcatcttggacgaaactgactccggactggatattgatgcgttgcgtattgtggctgaaggagtgaataaactgaaaactccggaaacgagctgtattgtgattacgcactatcagcgtttgctggattacattaaaccggatattgtacatgtactttataaaggccgtatcgtgaaaactgcaggtccggaactggcattggaactggaagaaaaaggatacgattggattaagaaagaactgggagaatgagcatgaaagcagaacagcaatatattgatcttttcacgcagtgcgaggctattatttgtcggcaaagtgcggatgtgctgaatgcgccccgtgcgaaggcatttgctgattttgagaagctgagcttcccgactcgcaagcaggaaaaatataaatatacggaggtgagcaagtattttgctccggattatgggttgaacttgaatcgcctggaatttccggttaatccgtatgaagtgttcaagtgtgatgtgcccaatatgagtacctcactttattttgtggtaaatgatacgtttgacaagcatgtgcatccttctgctcagttgccggagggagtttacttcggtagcttgaaggatatggctgaacagcgccctgatttggtcagaaaatattacggaaagctggctgatacgtcgaaggatgctctggcggcatttaatacgatgtttgcacaggacggtgtgtgcatgtatgtaccgaagaatgtggtgttggaacgtccaatccagttggtgaatatcttgcgtgcggatgtggatttcatggtaaaccgtcgtgtcctgattatattggaggatggtgcacaggccaagttgctggtatgcgaccatgcgatggacgacgtgaatttcctttctactcaggtggtggaagtctttgcaggagaaaatgctgtattcgacttgtatgaactggaagagactcataacagtacggtacgtttcaataacttatatgtgaatcaggaggctggcagtaatgtgttgttgaacgggatgacactgcacaatggaacgactcgtaataccacagaagtgacattggctggtcggggggcagaaatcagtttgtgcggaatggccattgccgatcagaatgagcaggtggataaccatacttttattgatcataaagtacccgattgcacaagtaatgaattgtttaagtatgtgcttgacgaccaggctgtgggagcttttgccggaaaggtacttgtgagagaaggagcacagcatacctcttctcagcagacaaaccggaatctgtgtgcgacccgtgaagcacatatgtacactcagccacagctggaaatctatgcagatgatgtgaagtgttctcatggagctacagtagggcagttggacgaaaatgcattgttctatatgcagcagcgtggtatcagtctgaaggaagcacgtttgctgttgatgtttgcttttgtcaacgaagtgattgaccatatccggatggatgccttgaaagatcgcttgcatctgctggtagaaaaacgcttccgtggagaactgaataaatgccagggctgtgcgatttgtaaatagtcatattttaacagagaatttatgcaatacgatgtcaataagataagagaagacttcccgattcttgcgcggtcggtgtatggaaaaccgctggtttatttagataacggggctacgactcagaagcctcgttgcgtggtggaatctattacagacgagtattattcggtcaatgcgaatgtacaccgtggagtgcatttcttgtcgcagcaggcaacgaatttgcatgaggcttcacgtgagacggtacgtcggtttattaatgcacgcagtatttcggaaatcgtttttactcgtggaacgaccgagagcattaacttagttgcttcttcatttgccgatagtcagatgaaggaaggggatgaggttattgtttctgtgatggagcaccacagtaatattgtttcttggcagcttcaggcagcacggaaaggaatcgtgctgaaagtaattccgatgaacgaccggggggagcttttgttggatgaatacaaaaagcttttttcggaaaagacgaagcttgtttctgtggctcatgtatccaatgtgttgggaacaatcaatccggtaaaggatatgattgcttttgcacattcgcaaggtgttccggtactggtagatggggcgcagagcattccacacatgaaggtggatgtacatgatttggatgctgacttttatgtgttcagtggtcacaaagtgtacggccctacgggtatcggtgtattgtatggaaaggaagcttggctggaaaaactgcccccttatcagggaggaggggagatgatcaagaatgtctcttttgaaaagacgacatttaatgaacttccttttaagtttgaggccggcactcccgattacatcggatctacagcattggcaaaagcgttagattatgtttcagcaataggaatggataacatttttgcctacgaacatgacctgactcagtatgccatgaaccgtttaaaagaaatcccgggaatgaggattttgggtgaagcggagcagaaaggaggagtcatttctttcttggtaggggatatacaccattttgatatggggaccttgcttgaccgcttaggtatagctgttcgtaccggacatcattgtgcggaacctttgatgcaccgtttgggcattgagggtacagtacgtgcttctttgggattgtataatacgaaagaagaaatagatgcgctggtggaaggcgtgcttcgagtaagtagaatgtttgcttaaataaaagtgattaaaaaaattcccggtcaggattttcatacagagaatactgaccgggagatttttgtttatagactggttagtggatggcctttgtcgcttctttcaaccagttcttttcttcctcgctgaggtatgggttaagtgtggtatacactttctggtgataatcgtttaaccatgccttttcttccggactgagtaaatcaggtagaattggtttgagatcgatagggcatagagtcaatgcttcaaatttatagaattcgccaaagtcagtcgtctggtcgtctacaatcagcatggtgttttctgtgcgtacaccatattccccggctttgtatactcctggctcattggtgaccgtcatgccaggaaggagaagagcaggcatgtggttcatgcggaactgatgaggtccttcgtgcacattcagaaaatgtccgacgccatgtcctgtaccatgtccgtagttcataccttctttccatataaactgtcgtgccaatacgtcgagctgagtgccacaggtgccatacgggaagtgagccatggagagctgtataaacccttttaagataagggtataatctttcttctgctcttctgtgacgtgccctaatgcgatggtacgagtgatgtcggttgttccatcgagatattgtcctccactgtcaagaaggagaaagccttctggtttcagggttgctgcagtttcttcagttgcttcgtaatgtacaattgcgccatgttcctggtaaccggctatggtatcaaagctgataccttggaagttttcttgtgcagagcggaattcgtatagcttctggtcaatggataattctgtttctgtcccgctttttacagcgttttctaaccagtaaaggaaacgaaccatagccactccatcgcgtgtcatggcttgtttgaatccggctatttctgtagcgtttttgatagatttcaaatataataccggagattcgagtaactttacctgactgcttttgctggcagcctgataaagggtataattggttgaactgggtagctgtaagcagccttctttatgttcctccagttcttgggctatttgtgtatagtctttaatagaaacgtggtttgtttctaaatagcgacgtacctcatctgttagtttatccggctggatgtacaatgtacttgaagtagaggtgatgaaaagataggaaacgaataccggattgcaatgtacgtcagtgcctcttaagtttaaagtccaggctatttcatccaaggcggaaattaagatgccattgacttgattttctttaagaatagcttgtatccgactgattttttgattacatgcctctccgctgtattccaatggcaaaatgaatggagggttcagaggcagtgaggggcggtctctccataataaatggaatgggtcttctacattaaccagctctaaatggtatttttcaagtgctttttgtaattgtagggcttcggatgtgctgtttacccacccgtcaataccgactttttctccaggtttcaatatgctccctaaccagtcggcaatggaaggagtttccggaagccggtctttgaataaaattagtccgcttccttgaagttgttcttctgcttgtaaaaaataacgggagtcggtccataatcctccttgtgacatggtgattacagctgtaccggccgaaccggtgaatccggaaatccatttccgagactcccaatgagcaggtacatattctccagaatgagggtcggtactgggtacgataaatgcagatatgcctttggtctgcataaatctgcgtaaggcttcaattctatcagatatacggttcatgatgtaaatgaatttaagaagattctaaactaacatgacaaaaataataaatggtatagaaaggggaggcttgattttgtctgaagttgattttttgaataaaatctttcggaaagttttgtaaataaagaaagtatgtgtaattttgcgccgcaaattgactgcgaaataatttaataacaacatacttaattttaaaaacatgattgtagtaccagtaaaagaaggcgaaaacattgaaaaagcgctgaagaaattcaaaagaaaatttgaaaaaacaggtgttgtaaaagaactgagaagcagacagcagtatgacaaaccgtctgttttgaagagacttaaaatggaacgtgctatttacgttcagaaaatgcagcagaacgaagattaataattctgcaaaactcttgaattattgaattctttttcataaattcgttgctgagaataaaagcgatgtttctatgttgaaagattcttttctgaagtatttgcttcttgaacggaattattccgaaaagacaattcttagttacgggatagatctggatgagtttgaagcatactttaagggtgtggatgtagaacttgagtttaccagcgtggatgcggatgtggttcgtggatgggtactctcattaatggatgaaggtcgcgctgaaacaacggtaaataggaagcttagttcgcttcgctctttttatcattatttgctacgtcagaagttggtggcggtggatccggtggcaaaagttgtcggtccgaaaaaaaagaagcctttgccggtttttgtaagagatgaggcaatgagtcaacttcttgatggtttcgaatttccgcaaacttttgagggggtgcgtgataagactatgcttgaggtgttttattctacgggcatgcggcgtgctgaattgattgctttgagggatggagatgttgatttttcggcattggtgataaaagtaacgggaaagagaaataaacagcgcttaattccttttggagatagactgcaagaggctttgagtgtgtatctacaggaaagaactcgtttttattcgggtgaatgtgaagctttctttattcgaaagggtggggtaaggctttctccttcatctgtgaactatattgtgaagcgatacctttcaaaggttgtgacgctgaagaagaaaagccctcatgtgttgcggcatacttttgctacatctatgttaaaccatcaggcagagctggaggcggtaaaagaattgctggggcatgaaagcttgacgacgacagaagtctatactcatacaacttttgaggagttaaaacaagtttatgaacaagctcatcctagagcgtaaagaaaaggaggtatttatggaagtaagaattcaatccattcatttcgatgcatctgacaaactggaagcttttatccagaaaaaagctgagaagctcgagaagttttgcgataatataatgaaagtagaggtgtctttgaaagttgtaaaacctgaaactgcaatgaataaagaagcaggggtgcgcgtgctggcgctgaattcagagttttatgcggaaaaaataagtgatacattcgaagaatcgatagatgtgtgcatggaggcactgtctaagcaactgttgaaggcaaaagaaaaacttcaaggtaaataaaaaagttgcgtaaaagttttgtgattaaaaaataatatctaactttgcagccgctaagttatggaaaatgacgaggctgcaaagtttgattttgcctctttagctcagttggccagagcacgtgatttgtaatctcggggtcgttggttcgaatccgacaagaggctcaagaagaaagatcttaatctgattctaaaaaaagttgggcaaataccagagtggccaaatggggcagactgtaaatctgctggcttacgccttcggtggttcgaatccatctttgcccacctaaattgcggaagtagctcagttgatagagcattagccttccaagctgagggtcgcgggtttgagtcccgtcttccgctcttttttctttttgctgttatagctcagcggtagagcacttccttggtaaggaagaggtcccgggttcaagtcccggtaacagctcgtgaatttgtaaagctgattattaatcaaaataaataacaagtaaagctatggctaaagagaaatttgaacgttcgaaaccgcacgttaacattggtactatcggtcacgttgaccacggtaaaaccactttgactgctgccatcacaactgtattggcaaagaaaggtctgtcagaattgcgttctttcgattctatcgataacgctcctgaagaaaaggaaagaggtattactatcaacacttctcacgtagaatatcagactgctaaccgtcactatgctcacgtagactgtccgggacacgccgactacgttaagaacatggttactggtgctgctcagatggatggtgctatcatcgtagttgctgctactgatggtccgatgcctcagactcgtgaacacatcttgttggctcgtcaggtaaacgttcctcgtctggtcgtattcttgaacaaatgcgacatggttgatgacgaagaaatgttggagctggttgaaatggaaatgcgtgaactgctgtcattctatgacttcgacggtgacaatactcctatcatccgtggttctgctttgggtgcattgaatggtgttcctcagtgggaagaaaaagttatggaattgatggatgcagttgataactggattcctctgcctccgcgtgatgtagataaaccgttcttgatgccggttgaagacgtattctcaatcactggtcgtggtactgtagctacaggtcgtatcgaagctggtgttatcaaggtaggtgacgaagttgaaatcctgggtcttggtgaagacaagaaatcagttgtaactggtgttgaaatgttccgcaaattgctggatcagggtgaagctggtgataacgtaggtttgttgcttcgtggtatcgacaagaacgaaatcaaacgtggtatgattttgtgtcacccgggtcaggttaaagctcactctaaattcaaagctgaggtttatatcctgaagaaagaagaaggtggtcgtcacactccgttccacaacaaatatcgtcctcagttctatttgcgtactatggactgtacaggtgaaatcactttgccggaaggaacagacatggtaatgccgggtgataacgtaacaatcaacgttgagttgatctatccggttgcattgaacgtaggtctgcgcttcgctatccgtgaaggtggtcgtacagtaggtgctggtcagattactgaacttcttgactaataatatcttataatagataggctgatagttcccggaggaattcgggaactatttttacgggaatagctcagttggtagagcatcggtctccaaaaccgagtgtcgggagttcgagcctctcttcccgtgctaaaattaaaagaatatgtttacaaagataacaaattattgtaaggaatcttatgacgaactagtccataaagtatcatggcctactcgttcagaactttctagtagtgcagtggttgttttaactgcttccctcctcattgcactcgttgtttttctaatggattctgccttccaatttatcatggaagatgttatctatccgcactaataaacagtaagaaaacatgtctgagattgaaaaaaaatggtacgtattacgtgccgtgagtggaaaggaaaacaaggtgaaagaatatcttgatgcagacatcaagcatggtaaccttggcgactacgtgtctcaggtgttgattcctaccgaaaagacgtatcaggttcgtaatggtaagaagatcgtaaaagagagaacttatcttcctggttacgttttggtagaagccgctttggttggagaggttgctcatcatttgagaaatactcctaacgttattggcttcttgggaggactggatcacccggttcctctgagacaatcggaggtgaatcgtattctgggtacggtagatgaacttcaggaaagcggagaggatttgaatatcccttataccgtaggagaaacagtgaaagtaagcgttggcccgttcagcggattcagtggcctcattgaagaagtaaatgcggaaaaacgtaagctgaaagtaatggtcaaaatattcggacggaaaactccgttggaattaggctttacggatgtggaaaaggaataatgcattttgttacgtgcaattgttctattcgttaaatacttatataaaaattacaaaagaaaatggctaaagaagttgctggactaatcaaattacagattaaaggaggcgctgcaaatccatcacctcccgttggacctgctctgggttctaagggtatcaatatcatggaattttgcaagcaattcaacgccagaacccaggacaaggcaggtaaggtattacctgtaatcattacctactacacagacaagtcttttgatttcgtaatcaaaactcctcctgtagctattcagttgcttgaggctgccaaaatcaagagtggatctgcagaacctaaccgtaagaaagtcgctgaactgacttgggatcagattcgtgcaattgctcaggataagatggttgacttgaactgctttactatcgaatctgctatgtcaatggtagcaggaacagctagaagtatgggtatcgctgtaaaaggtgacttcccgggtaataactaattaacttcaattgataatgggtaaactgacaaaaaatcaaaagttggctgcagaaaagattgaagcagggaaagcatactcactgaaggaagcttctgaattggtaaaggaaattacttttacaaagtttgatgcttcattagatattgacgtacgtttaggtgtagaccctcgtaaggctaaccagatggtaagaggcgttgtttctcttcctcatggaactggaaaacaggtacgtgtgcttgttctgtgtacaccggatgctgaagctgctgcaaaagaagctggagctgactatgttggtcttgatgaatatattgaaaagatcaaaggtggatggactgatattgatgtgattatcactatgccgtctatcatgggtaagattggtgcgctgggtcgtgtgcttggtcctcgtggattgatgccgaacccgaaaagcggtactgtaactatggatgtagctaaggctgttaaggaagttaagcaaggtaagattgactttaaggttgataagagcggtatcgttcatacttcaatcggtaaggtttctttctctgctgagcagatccgtgaaaatgcgaaagaatttatcgctactatcattaaactgaaaccgaccacagctaaaggtacttatatcaagagtatttatctttcaagtactatgagtaagggtattaagattgaccctaaatcagtagacgaaatctaataattaaggaggaatcatgagaaaggaagataaaggcgtaattattggtcagttagcagatactgtaaagcaatacggacatttttacttggttgatacaactgcaatggatgcagctgctacaagtgaccttcgtaaaaaatgtttcaaggctggtatcaagctgatagttgtgaagaattctttgcttcacaaggctttgatgagcttggatgtggattactcaccattgtttgattctttgaagggtactacttctgtaatgttctgtgaaacagctaatgctccggcaaaactgttgaaggaatacaaagatggagttcctgccctgaaagctgcttatgcagaagaaggattctacgtgggtgcagaccagttggaagctctcgcaacaatcaagagcaagaacgaagttattgcagaaatcgtggctttgctgcagtctcctgcaaagaacgttatctcggctcttcaatcaggtggcaacaccattcacggagttcttcagactttggcagaacgtgcagaataattgcactctgtgcctagtcgagaatataccaaacaactttaatatttaaatagtacaaacaattaaatttcatacaaaaatggcagatttgaaagcttttgcagaacaattagttaacttgacagtaaaagaagttaatgaacttgcaactatccttaaagaagaatacggtattgaacctgctgctgcagctgtagctgttgctgctggtcctgctgctgctggtgcagctgctgctgaagaaaaaacttcattcgatgtagttttgaagagcgcaggtgctgctaaattgcaggttgttaaggccgttaaagaagcttgtggtcttggcttgaaagaagcaaaagacttggttgacggtgctcctagcacagtaaaagaaggtttggctaaagacgaagctgaatctttgaagaaaactttggaagaagctggagctgaagttgaacttaaataagattatcctgtaaatcaggtagttcggttaagagtcctctgtaaagaggattcttaacctttttgcgtctatattaagttcactaggtttcatctgtcggaactgtgagagtgaccgactgttattatcctagtttttacattttaaactccatacagatgtcttcagaaactcaaaatcaacgaattaattttgcttctattaagaatccgatgcagtatccggatttcctggaagtacagttgaagtcatttcaggacttcttgcaattagataccccacccgaaaaacgaaagaatgatggcttgtataaggtttttgcggaaaacttccctatagctgatacacgcaataacttcgtgctcgagttccttgactactatattgatccgcctcactatacaattgatgattgtttggaacgtggcttgacatatagtgtacctttgaaagctaaattgaagctttattgtaccgaccccgatcacgaagattttgatacagtgattcaggatgtgtatctgggaccaattccttatatgactccgaaaggcacctttgtaattaatggtgctgaacgtgtagttgtttctcagctgcaccgttctccgggtgtattctttggtcagagcatccatgccaatggtaccaaattgtattcggctcgtattatcccgtttaaaggatcttggattgagttcgctacggatatcaacaatgtgatgtatgcgtacatcgaccgtaagaagaagcttccggtaacaactttgttgagagctgtaggatttgaaaatgataaggatattcttgaaattttcaatctggctgaggatgtaaaggttaacaaaactaacctgaaaaagattattggacgcaaattggctgctcgtgtattgaaaacgtggacagaagattttgtggatgaagatactggtgaagttgtttctatcgaacgtaacgaggtagtaattgaccgtgaaactgtcattgaacctgaacatatcgacttgattatcgagtctggtgtacagaatatcctcgttcacaacgaagaagcaaatgcctctgactattctattatcttcaatactttacagaaagacccaagtaactctgaaaaggaagctgtattgtatatctatcgccagctgcgtaatgcagaccctgctgatgatgcaagtgcacgcgaagttatcaacaacttgttcttctcagaaaaacgttatgacttgggtgatgtaggacgttatcgtatcaacaagaagttgaacctggatactcctatggatgtcagagtattgacgaaacaagatattatcgagattattaaatatctcattgagttgattaactcaaaggctgatgtggatgatattgaccacttgagtaaccgtcgtgtacgtacagtgggtgaacagttgtctaaccagtttgcaattggtctggctcgtatgtcacgtacaatccgtgaacgtatgaacgtacgcgacaacgaagtatttactccgattgatttgattaacgcaaaaactatttcgtctgtaatcaactcattctttggaacaaatgctttgtcacagttcatggaccagactaacccgttggctgaaattacgcacaagcgtcgtttgtcagctttgggacctggtggtttgtcacgtgaccgtgctggtttcgaggttcgagacgtacactatactcactatggtcgtttgtgtccgattgaaactcctgaaggtccgaacatcggtttgatttcttctttgtgtgtttacgcaaagattaatgaactgggctttattgttactccttaccgtaaagtaaaagatggagtagtagacttgtcaaatgaaggtattgaatacctttctgcagaagaagaagaagacaagattatcgctcagggtaatgctccactgaatgatgacggtacatttatccgtgaaaaggtaaaagcgcgtcgtgatgcggattatccggtagttactccggaccaggtagaattgatggacgtagctcctcagcagattgcatctattgcggcttcattgattccgttccttgaacatgacgatgcgaaccgtgcgttgatgggatctaacatgatgcgccaggcagttcctttgttgaagactgaagctccgattgtaggtacaggtatcgaaaaacaattgtgtgaagattcacgtacacagattgctgcagaaggtgatggtgtgattgactttgtggatgctactacaattcgtattttgtatgaccgtacagaagatgaagaatttgtaagcttcgaaccggcattgaaggaatatcgtattccgaagttccgtaagacaaaccagagcatgaccatcgacttgcgtccgatttgtaataaaggacagcgcgtgaagaagggagatatcctgactgaaggttattctactgcaaatggagagctggcattgggtaagaacctgctggtagcttacatgccttggaagggttacaactatgaggatgctattgtattgaacgaacgtgtggttcgtgaagatattctgacatctgttcacgtagatgaatatattctggaagtacgcgaaaccaaacgcggaatggaggaattgacttctgatattccgaatgtaagcgaagaagcaactaaagatttggatgaaaacggtatcgtacgtattggtgcacgtattgagccgggcgatatcctgattggtaagattactccgaagggagaatctgatccttctccagaagaaaaactgttgcgtgctatctttggtgacaaggctggagatgtgaaggatgcttcattgaaagcttctccatcattgcgcggtgtggttattgacaagaaattatattctcgtgtaatcaagactcgtagcgagaaaaatgcagataaggctattctgccgaaactgaatgaagaatttgaagaaaaagctgcagctctgaaagcaatcttgattgacaagttgctggtattgacagctgataaggtttctcagggtgtgaaggattatctgggaactgaagtgattgctaagggagctaagtttactaaatacgatttggaatcattggattatactgtaattcagttgagcaagtggactgctgatgctcataagaatgatatgattcgtgatcttatcgtaaactatctgaagaagtacaaggaactggatgctgaattgaaacgtaagaagtttgcgttgacaatcggtgatgagttgccttcaggtattattcagatggcgaaggtttacattgctaagaaacgtaagattggtgtgggtgataagatggccggtcgtcacggtaacaagggtatcgtttcacgcgtggttcgtcaggaagatatgccgttcttggctgacggtacaccggttgatatcgtattgaacccgttgggtgtgccttctcgtatgaacatcggtcagattttcgaagccgtactgggacgcgctggaaaagaattgggtgtgaagtttgcgactccgattttcgatggtgctactttggatgacttggatgaatggactgacaaagctggtctgccacgctattgtaagacttacttgtatgatggtggtacaggtgatcagtttgaccagccggctacagtcggtgtgacttacatgttgaaactgggtcacatggttgaagacaaaatgcatgcccgttcaatcggtccgtactcattgattactcaacagccacttggtggtaaggctcagttcggtggtcagcgtttcggagaaatggaggtttgggcaatcgaagcattcggtgctgctcatgtacttcaggaaatcttgactatcaagtctgatgatgtagtaggacgttctaaggcatacgaagcaattgtgaaaggtgaacctatgccgactccgggtattcctgaatctctcaacgtattgttgcatgaacttaggggtttgtgcttgagcattacgctggaataactttttcaaatgaagaatggaaaagataacttccattcttcatgattaaattcttcattatcataaaataaaaagtatggcttttagaaaagatactaagataaaaagtaatttctcaaagattacgatcggtctggcatcacccgaagagattctggaaaattcttatggtgaggttctgaaaccggaaaccatcaactatcgtacttataaaccggaacgtgacggtttgttctgcgaacgtatcttcggtccggtgaaagactacgaatgtcattgcggcaagtacaaacgtattcgctacaaaggcattgtctgcgaccgatgcggtgtggaagtaacagaaaagaaagtacgtcgtgagcgtagtggtcacattcagttggtggtacctgtagctcatatctggtatttccgttcattgcctaataagattggttatctgctgggattgccgacaaagaaactggatgctatcatttattatgaacgttatgtagttatccagccgggtgtgaaggctgaagatggtatcagtaaatatgacttgttgtctgaagaagagtacctggatattatggaaactcttccgaaagaaaatcaatacctggaagacagcgatccgaataagttcatcgccaagatgggtgctgaagcaatctatgatttgctggtaggaattgatttggatgctctgtcatacgaattgcgtcataaggcaaacagtgattcttcacagcagcgcaagaatgaagctttgaagcgcttgcaggtagtagaatctttccgtgcatctcgtggccgcaacaaaccggaatggatgattgtacgtatcgtaccggttattccgcctgaattgcgtccgttggttccgctggatggtggtcgctttgcaacttcagacttgaacgatttgtatcgtcgtgtgattatccgtaacaaccgtttgaaacgtctgattgaaatcaaggctccggaagtaatcttacgtaatgagaaacgtatgcttcaggaagctgtcgattcattgttcgacaactctcgtaagtcgagtgcagtgaagacagatgccaaccgtccgttgaaatctttgtcagacagcttgaaaggtaagcaaggacgtttccgtcagaacttgttgggtaaacgtgtggactactctgctcgttctgtaatcgttgtaggtccggaattgaagatgggtgaatgtggtattcctaagttgatggctgcagaattgtacaaaccgttcatcatccgtaagctgattgaacgtggtattgtgaagactgtgaaatcagcgaagaagattgtagaccgcaaggaatctgttatctgggatatcctggaacatgtaatgaagggacaccctgtattgctgaaccgtgctccgacacttcaccgtttgggtattcaggccttccagccgaagatgattgaaggaaaagctatccagttgcacccgttggcttgtaccgcgttcaacgccgacttcgatggtgaccagatggccgtacacttgcctttgagtaacgaagctgtactggaagctcagatgttgatgcttcagtcacacaatattttgaaccctgccaatggtgcgcctatcactgtgcctgcacaggatatggtattgggattgtattacattaccaaattgcgtaagggtgccaaaggtgaaggtttgattttctatggaccggaagaagcaatgattgcttacaatgaaggtaaggtagacattcacgctattatcagcgtagtggctaatgaccttgatgaaaacggcaatatcgtgaagaagttgattaaggaaacttctgtaggtcgtgtcattgtaaatgaactggttccggatgaatgtggttatttgaataccgttatttctaagaagtctctgcgtgacatcatcagcgatgttattaaggctgtcggtgtggctcgtgcttgcgaattcttggatggtatcaagaacttaggttataagaaagcattcgaaggtggtctgtcattcaacttgggtgatatcattatcccgaaggagaaggaagaactggtaaaacgtggtaacgaagaaatcgaacagattatgatgaactataacatgggattcatcaccgataacgaacgttacaaccaggtaattgatacttggactcacgtaaacagtgacttgtcagacattctatataagactattaagaacgacgaccaaggatttaactctgtatttatgatgttggattctggtgcccgtggttctaaggaacagatccgtcagttgtctggtatgcgtggtttgatggctaaaccgcagaaagctggtgctgagggtgcacagattattgaaaacccgattctttctaactttaaggaaggtctttcggtgttggaatactttatctctacccacggtgctcgtaagggtcttgccgataccgcgttgaagactgccgatgccggatacttgactcgtcgtttggttgacgtttctcatgacgtgattatcaacgaagaagactgtggtacattgcgtggtctggtttgtacagcattgaagaacaacgatgaagttatcgctactttgtacgaacgtattctgggtcgtgtatctgttcatgatattatccacccgacaactggtaagctgattgtagctgctggtgaagaaatcacagaagacattgcggaagaaatcgaaaaatctccgattgaaagcgtagaaatccgttctgtattgacttgtgaatctaagaagggtgtatgtgcgaaatgttacggacgtaacttggctaccagccgtatggtacagaaaggtgaagctgtcggcgtaatcgctgctcagtcaatcggtgaaccgggtactcagttgactctgcgtacattccacgccggaggtatcgcaggtaatatggctgccaatgcaagtatcgtagctaagaatgatgctcgtttggaattcgaagaattgcgtacggttgatgctgtagaagaaactggtgaaccagtgaagattgttgtaggtcgtctggccgaagttcgctttgtggatgtacatacaggtatcatcctttctactcacaacgttccttacggttctaaactgtatgcttcagacggtgaggtggtagaaaagggtaagctgattgctaagtgggacccgttcaacgccgttatcgtaacagaagctgctggtaagattgactttgaatcagtaattgaaaacgtaacctataaggtagaatctgatgaagctacaggtttgcgtgaaatcattattactgaatctaaggataagacgaagattccgtcattgcacatcttggatgagaacggtggaattatccgtacatacaacttgccggtaggtggtcacgtagtagtagaagacaaacaaaccgtgaagtcgggtgatattctggtgaaaattccgcgtgccgtaggtaaggcgggtgatatcaccggtggtcttccacgtgtaactgagctgttcgaagctcgtaatccgtctaatccggctgtcgtttctgaaatcgatggtgaaattacgatgggtaagattaaacgtggtaaccgtgaaatcatcgttacatcgaagactggtgacgttcgtaagtacttggttgctttgtctaagcagattctggttcaggaaaacgactatgtacgtgccggaactccgttgtctgatggtgctattactcctgccgacatcttggccatcaaaggtcctacagccgttcaggaatatatcgtaaatgaaatccaggacgtttaccgtctgcagggtgtgaagattaacgataagcacttcgaaattatcgttcgtcagatgatgcgtaaggtacagattgacgaaccgggtgatactcgcttcttggaacagcaggttgtagaccgcattgaattcaatgaggaaaacgaccgtatctggggtaagaaagtggttgtagatgctggtgattctcagaacttgcagccgggacagattgttacagctcgtaagctccgtgatgaaaacagtatgctgaaacgccgcgacttgaaactggttgaagtacgtgatgcagttcctgctacttctactcagattctgcagggtattacacgtgctgcattgcagacatcaagcttcatgtcagctgcatcattccaggaaactaccaaggtattgaacgaagctgctatcaacggtaaggttgataaactggaaggtatgaaagagaacgtaatctgcggtcacttgattcctgctggtacaggtcagcgtgagtttgaaaagattgtggtaggttctaaagaagaatacgatcgcatcttggctaacaagaagaatgtattagattacagtggagttgaataatctcaactactatcataaaaagagccgtctcatttgaggcggcttttttttatgtgcttattcgatgtaagcaggcatcgtatatttaaagttttcgttactctgataattgactattgtaattgtgtagtacctctcatttccgcatcataggagggaagactacattccgctgatgcgtattgcccggctttattttcttttccaatatagcagaatgaaacgtcctcctgtagccatcagcgcgagggaaagtccggtataaaagactgcaataaaactttcaggcagcaggcgtgcggtacggatagttatgcccagtgcaatcatgaaagccatcaccagccagcccttcacgtcaaaaaacgagaatggacagcgtttgttggggttaccggctgtgatacgctgtgcatgcttgcggtagagcttgtggaaaatcatgcagaaaaacagcaggaatatcagactggcctcgcagaccttgagcagccagtagtgcgcgtccgttatccagcaggaaatgccgatacggagaatgttgataccggcgaccagccatacgattccggccgtaagcagcagcgtattggaagatactccgtatttcatataccctcagcttagaaccactttattttccggaaaataacaaaggccgttgccgagaggaagatggagaaacatacaatcaaggcaaaggcgtgtggcagtccttcgatgtgaatatccacgttcataccatagaaactggcaatcagcgtcggtaccatcagcacgatggaaagactggtcatgcgtttcatgatggtgttcacgttattggagatgatggaagcaaaagcatccatggtacccgtaagaatgtcgctgtagatgtttacctgattgtgtgcctgcttcagttcgatgagcacatcttctgtcagttccgtattctgatagtccttctcattaaagatattctgcaatttgcctatcatgacctcattgccacggatagacgtattgaaatataccagactcttctgcaggttcatcagtcggagcaagtcctcgttacggatgctacgttccaactccttttccgcattgtttacttcgttgttgatttgtttcaggtatttcaggaaccatacagccgacgagtaaatcagtcgcagaatcagttcgtatttattgggcacgttgatacctttgcgctgcgtatgttcgatgaagtccggcagcatctccgtagagtgatagcacaccgaaatcaccagttcattgttcgtaatgataccgataggcaccgtggcatacggcacttttgaatcaggagtctgtacgggaatacgcagaatggtcagcagccagttaccttcagtatccgtacgcggacgttcgtcggtatcggcaatgtcattcaaaaaagactggggaacttttaattgttcttgcaggaagtggaagtccgcggcatccggacattcaatgttaatccagcagttaggttgccagttggctttctctacaaagccagcttcacaaaaaagatactttctcatctgtctgctcctttccttcattttaagcccggaggagcacttcagagtaaaagacaggattactcacgacaccccttcaggaagtggttaaaataattgtaatacgttcgcgagtaataatcgtccatattagttcgttttagggtataaaaaaagttcgtttattcaaacgaactctcaagctcttcaggttggacttgaaccaacgaccctctgattaacagtcagatgctctaaccgactgagctactgaagaatttttaaacatgtttcaaaaaagagctcttcaggttggacttgaaccaacgaccctctgattaacagtcagatgctctaaccgactgagctactgaagaagattcaaacatgtttcaaaaaaaggagctcttcaggttggacttgaaccaacgaccctctgattaacagtcagatgctctaaccgactgagctactgaagaaggttttcctttaattgcgatgcaaaggtagtaggatattttgaattatgcaatatctttgcaaaaaaaatgaagtaaaatggataaaattataggaatgggcaatgcattggtcgatgtattggtaaaaattgatgacgattctttattgggaaagctacatttgcccaaaggaagcatgcagttgatacaagaagccaccttgtctgaaatacgtaaatatacctcagggatgaagattcatcgctctaccggtggctcggccggcaatacggtttgtgcactagccgcattgggagccaatcccggatttatcggaaaggtaggtcaggacgagacaggagctttctttggcgatacccttcgtcagtgcggggtaaatgccttgctggccacctgcgatttgccgtcgggcattgcgtcgactttcatttctaccgatggagagcgtacgttcggtacttatctgggagcagctgccacactgagagcagaagacttgtcgcgtaaaatgtttgccggatataattatctctatattgaaggctatcttttgcaagaccatgacctgatgctacgtgccgtacagctggccaaggaagaaggacttcaggtttgtctcgacatggcaagctacaatgtggtggaagccgaacgtgacttcttcgaccagttgattgtgaaatatgtggacatcgtgtttgccaatgagagcgaagcactggcctatacgggaaaagcccctcatgaagctctggaagaaattgcgtccaaatgcagcattgccgtggtgaaaaccggaaaagaaggttccctcgtgaagaaaggaacagaagtcattcaattgctttcttgtccggtagataatgtgctggacaccaccggtgcaggcgatttctatgccgccggtttcatgtacggcctgacgtgcagttattcgctggagaaatgcgtgcaaatcagcactattctggctacagccgtcattcaggaagttggtaccaccttacctgccaagaaatgggacgaaattaagttaaatattgaatcacttctgcaagtctaaccggaataatgtgtttatttgcaaggaagaacaattttgtaaacagactatatatgaatgcaagaaaaatgctggccggagcctttatcgtgatgttggggatgggcatgaccagcttcaaggaagacgaccgtaattttcagatatcaaagaatctggacatattcaactccattttcaaggaattggatatgttttatgtagataccgtgaatgccgaaaaaatgattcagaccggagtggaaggcatgctttcactgaccgacccttatacggagtactatccggaagaagaggtgagcagtctcaaggaaatgactaccggaaaatacggcggtatcggtgcggccatccgctattatgaggccaaagaccgtattgcagtggtagaacctaccgaaggcatgccggcagccgaagccggagtcaaggcaggcgacatcattctctcggtaggaggaaaggaaatggtacgtggcgacatgaagccccaggaattttcgtccaaggtcagcgaagcgctgcgtggagaaccgggcacgtcgttcgtgttgaaagtgctgcgtccgctcaagaacgacagtacggtgatggaatttaaaatcacccgtaagaacatccgtaccaatccggtgccctattacggcatggtgaaagacagcatcggctatttggctttgtccagctttacggaaaattctgccaaggatttcaaaaaagctttcatcgaactgaaacagaaaggtgccaagtcgctgatcatcgacttgcgtgacaatggaggaggttccttgtcggaagcggtagacattgtcaatctttatgtgccgaagggacaggaaattgtgatgacaaaagggaaggtacgtcaggcacaaggttcttataaaacccagaatgaaccggtcgatacacagattccgctggcggtactcgtgaacggtgccacggcttcggcttctgaaatcgtgagtggttcgttgcaggacttggaccgtgcggtagtcatcggttcgcgcactttcggaaaagggctggtgcagaccattcgtccgttgccctacaacggcacgctgaaagtgaccacttccaaatactatattcccagcggacgttgtatccaggctatcgactatgccaagaagaatgccgacggttcagtagcccgtacacccgacagtctgaccaccgtatttcatacggctgccggacgtgaggtgcgtgatggaggaggtattcgtccggacattgaagtgaagggagacaagattccgaacatcgtgttctacctgatgaacgacgacctgattttcgattacgctacccaatattgctggaatcatcctacattggcttcggtagacgacttcaaactgaccgatgccgattatgaggctttcaagaaactggtgaagtcgcgtaactttacttacgaccgccagagtgagaagatgttgaaaagcctgaaagaaattgccgagtttgagggttatatgaccgaggcagcagaggaattcaaggcgctggaaaagaagctcaaccataacctggaccgcgacttggactattttgccaaaccgattaaggaatatatctcacaggaaatcgtgacccgctatttttatcagcgtggtgctgcgatggaacggttgaaagatgatactgatttggaagaagccatcaaggtattgcagaatcctgtccgttaccgggagattctttcggcaccggtaaagaaagacgaacctgtcaagaaggagaaggaagaaacgaagaaataaggcctcagagaggcttctggagggctttttgataaggtccggaaaacgcaagtacgttttgtttcaaacgcaagtgcatttgaagtgaaacgtacttgcgtttttagtaaaatgtacttgcgttttggggaaaacgcaaaggcgtttgatatgaaacactttggtgttttgaaatttatcactatattagtgaaaagaaatattaaggacttaaaatgcagcgatttatggcgaaggcaaaggttatatgtattttgagccataagggagctatgcaataagttactaaagggaaaaataatgaataatcatggaaactaaaatcaaggataaaatagaatataccgtgatttgcatatcggagtttgctaagaaacatcagcttacgctaccgcaagcgttcaattatctcaaacgctgggagggcatagattttcttgataaaggatatgatgtagaacatctgttttcaattgaagatgcagtcgatgacttaacagactattgtaaaagacagggagggcagttggcatgatactctatcacggctcgaatcaggatataaaggaaatagacctgacaaagacacgtcctaacaaggatttcggacagggcttttatctgacagcggataaggaacaagctatgcagatggctaagcagaaagtggtacaatcaggtggaacaccgacggtaaacgtgtatgagtttgatgagaaccacctgtctgacaacgaactgaatataaagatatttgaaggctatactgaagagtgggcaagattcatcttagctaaccgaaaccgggaaagtaagacaaagatacatgacttcgacatcgtgataggggctatcgctgatgataaagtcggggtacaattatttagatatatgaagaaatatatcgatttgcctaccttagtgaagaacttgcagtttgtacgactaactacccagtattattttggaacggaacgggcaatcaaattattgaagaagctatgacagacgatgaacaatttatgatagagtgcattaccaccgaactgacggagtatgtgatgcgtgattaccatattggtatgaaagaggctctggatatggtttataattcggaaacctattctaagctaatcgatatgaacagtggactatattatcagagtccactgctggtgtatgatgtctttaaggaagagcaaaccactaacagaaaagagggttaaatgatggcaagtgaagtagcatggcgcatggattagacaactgacttgacagtctgatgagctctagtcgttacttacaatcataagccagaacagctttaaataaagaaatagttattcattgtaattttgtgataaaccagagttttcatgcgcacctgcaaacgttggtaatccgtaaaagtataactgtgaaagatgaataatatcattatagagattgtaaaatgtaaaattatgaaactgataaatcgggaaactatatttttatgtagtttttttattgtattatatcttataagttcatgtgaacaggtaaagcctttaaaaaatacaactgactgtgataatatgaacttaaagagtaatgtatgcttagtcatacaagaaaatttcgatgtgcaggatggtaaagaaacaaactccaatactatcattctaaagtttaatcatcttaaaaatttactaaagaaaatcaaagggaaagaaattactagttattcatatgacgattcaggtaggttaattgtagagaaacattctaaagatataataacattgtctggagaaactgattttattaatctctcagactataaaaaatactattataaaggtgataatgttttcccttttaaaatagaagaatattatggcaatgaaaataatcttaatgcaacgacttttatagaaagagataaatataattataagactaaaacaataaaagtcgaatataaaagggaacctatttctaacgaagcaatcaatgatacgacaataatatcgttcaaaaacaatggaaataatatatatactgaaattgaaataaaacaaggaaaaaggattttattagaaaaatatcaaatcaataaacatgggcagattacatctaagcatatcaaagatttaaatgtaatagtagataccataccaacgtatatcttagaagacataaaaacatggcaacaaaagaaatcttataactatgtaaaatacgatgataatcttttgacgacttatgaaaggaatgagagcggagatatagttcatacgttagagacagatagtacagaaaataaacaacatgaaacttatgctcaatatatatatgatgaaagagggaattggattaaaagaaaaatattcaatagtttacatgaacttatcgctatagctacaagaagaattgagtattatcctcaaaatgaaaacggagaaattgattttagttttgaatatgaaacaacgcctttagagaaagcatttgaaagagagcaaaaattcaagcaaaaaaaagaactttatttaaatgataacttcgtattacaacaattttatgaaaagatgaaagaatatccagactataaagttataggaaatcccaaaataacttataatgaaggatgtacatataatattaattttaatgctacccattatttaggtgggtaccccaatggatatccttcaaaagaaaatataacagttcagatagttttagacttggaaacagaaacatatacttttacagcaataaaaggacaattatattaagaaaaagtctctggtgagatgattttcgtgggcttcgtgtatttaaggggaactcaaaagaaaataagtactttatagcatattttactcttattctgcataaaacaaaaccgtctgcatgccttggaaaaaatcaagatccatgcagacggttttgtatatctgagccagagaatcagtctttataatctccgtttgccttaatcagctcaatcagtttttctacagcctgttcttccggaatgttcttttcaatacattccttctttttgtacagactgattttgcctcttccggcacctacatagccatagtcggcatcggccatttcacccgggccattgacgatacagcccatgataccgattttcagtcccttgaggtgagccgtagcagccttgatgcgggcaatggttgattctaagtcgtacaatgtacgtccgcagcccgggcaagagatgtattcggttttggaagtgcggatacgtcctgcctgcaggataccgaaggcggtttcgtccactttcaggttactgatttggttgccgtggttgtagagcaggataccgtcgcacagaccgtcgataatcagggcacccatgtcggcagccgacttgatttgcaaatcctctgtttcggtttcctgataaagctggaagaatactagcgggtttttcagtccctggttcatcagctgatgtgccaatgcacggaactcacctaagcggttgtagtggttgctttgagctacgatgaccacttccggatgcagacgcaggcaagccattacctcttcattcagtcctaaataagaagtaaagaggaacttcattttggctggatggtgatgcagttcaatcaactgctggtagttgaaagccggataggtgtgctcgctgccttcccatgcacaggcatccacaatataaccgatgtctgctctgcggttttctggcaagcgttggccacagtacagatagtcgggcttgaactgttcgcttacttccaggtcgttgttcagacgggctgagatgactaccggaagctggtcgcctccgatgttacctatggctacggtttctcttcggctggggtgcgtgtagttgaattccggagcttcggtagctggaatatagggatgtccttcgcgtttcaatacataatctaccagtttgcgggctacgggaatttctgcttcgggcgcttcactcagtgatacgcggatggtgtcacccagtccgtcgcacagcagggcaccgatacccaaggctgatttgatacggccgtcttctccgtcaccggcttctgtcactcctaagtggagcgggaaggccatattttctttttccatctgttctaccagcaggcggacggtgcgtaccatgatgaccgtattggaagccttgatagagatgaccacgttcatgaaattctgttccacacagatgcgcaggaactccatgcacgattctaccatgccttccggagtatctccgtagcgcgacatgatgcggtcggacagcgaaccgtggttcactccgatgcggatggctgtgtgattttccttacagatgttcaggaaggggatgaaacggtcgcgtatcttctggatttcttttgcatactcttcatccgtatactccagttgcttgaaggtgcgggcagcatctacatagttgcctgggttgatacgtaccttctcagcgtacaaggccgctacctcggctactttcggattgaaatgtacatcggccactaaaggagtctggtatccctgggcacgcagagatgcattgatatgttgcaggttctctgcttcacgtactccttgtgtggtgagacgtacgtattctcctcccgcctcaatgatacgcttggcctgttccacacaagcttctgtatccatggtgacggtattcgtcatactctgtatacggataggataagcgccacccataggagtggcgcctacatatacctcgttcgcctgtcggcgagaatagttgaagtaattcattcagttagtttgtcttataagcgtatttgacttctttcaactcttcgttggcttttacgattttgtttttcaaaccttccttgtaagctgcaaacttttgagccagttctgcatcgctcagggccagcatctgtacggccaggatcgcagcattcatggcaccgttgatggctactgtagccacaggtattccgggaggcatctggatgatagagtagagtgcgtctacaccgtcgagtacagaaccttttacaggcactccaataaccggaagggtggtgttggctgcaattactcccggcagtgcagcagccattccggcagccgcgatgattaccttgatgccacgtccggcagcttctttcgcaaacttctctacttcagcaggagtgcggtgagccgacagggcattcatttcaaacgggacttgcatttcatcgagcagcttggcggccttttccattactggaaggtcagaagtactgcccataatgatacttacaattggcttcattcgttgtttttattttagttattcgttaataatctctttgtagcctgcagcgtccagcagatcgtccagttcgctggcatccgtaggtttcagcttgataatccagccttcgccgtaaggatcctggtttaccagttccggatgttcttccagttgcgggttgacttccagaatctcgcctccgatggggaggaacaggtctgaaactgttttcactacctcgatggtaccgaatacttcgcctttatccagcgtttcaccttctgtggttacgtcgatgaaaacgatgtcgcccagctgttgctgtgcatagtctgtgatacctacataggcagtgtcgccttccaaacgaatccattcgtgttcgttggtgtacttgatgttagtcgggaattccatattgaataaatttaaagtttaagataatcagttttcaaataaacaaaattcccgtgataccacaaaataaaccgacgaaaaacccgcctgtcacttcatttaaagtatgttgcttgacgatgatgcgggctgaacctaacatgccggcaagcaggatgaagaagcagagccattccactggattgaactggaagatgaagctgtaggacagtaatccgcccaccatcatgccgctgctggccatgtgggtgctgattttccagcgtgtgttgatgactgtgcagatgaccatgcaaatcagggtggctacgatgatgccgctcatatagcgtggcaggtgtatgcgatacatcgtcagcaggcaggccatgtagctcagtatggtcattccgtaagggataaaacgcttttcgcggtgtcccagttcgtggagtgtccagccgttgattttctgaaacagatagatgcccagcatcggtagcaggatggtgaagcaatacaccagccctaaaaccgtcagtttgtactgcaggggcatgatgttcagataagtaaagaaaaaaagcaggcagaatgccacaaacggtaccatgaacggcgtaaagatgagcgatacgatgcgggcagtcataaacagggcatcgcggggttccccagcatggtggggagcgggttcatgataagtcagttcatcggggatactggtttcttccatatcaatatgttatcttcttaatcttgctacggggatattcaactgctggcggtacttggccacagtgcggcgggcaatggggtatcctttttccttcagcatatcggccagctcatcgtcagtgtaaggcttttccttgttctcactggccacgcattctttcaggatgcgcttgatttcacggacggacagttcttcaccgttttcagtcgtgtagccatcgctgaagaagaatttcaacgggtaaatgccgtagttggtctgtacatatttgctgttgctcacacgggaaatggtggagatgtccagctttgtacgttcagccacgtctttcagaatcatcggacgaagcagagactcgtccccttcttcgaagaacgggcgttgcaagtcgatgatggcctgcatggtgctgagcagcgtttgctggcgttgtttcacggcgttgatgaatccttgtgccgcatctaccttctgcttgaggaatatcagggcatcttttgattctttgctctggttctgcttgttgcgggtgtgttcgtccagcagctcggtaaattcccggctcagcctcagttccggcacgttccggttgttgaggctgaggttaatcgtgccgtcgtcttccgtctctaccagaaaatcagggataatctgttgcaggtttttcccgatggcttctcccatggaacttcccggacgcggattcagcttggtcagttcggcggcagccgcattatattgttcttctgtaatattcagtttctgaataatcttgtctttatttttgcgggtgaagtcctcacagcactttccgatgatgtccagctcaatctgcttgagcggagaatcttctttccggcgaatctggatgagcagacactcttgcagacttctggcaccgatgccggcagggtcaaagtcctgaatcactgagagcacatgctccagctcttctgcggaagtgtagactccctggtaaatagccagttcatcgagaatcgtttcagtggatttacgcagcagtccgtcgtcatcaagtgagccgataaggtattcacctaattgcttctgttccggagtaaggtgttgcatgtcgagctgttctttcagcgtttcgtagaaagatacgttgtctgagaaaggaatgtcttccgcccggtcttctttggagcggttgttctcctgcaatttgtaatccggaatatcgtcttccgtgcggtaatcacccagctcgatgtcctcacctgaatcggtattaggttctccgtcttggtcagtcgtattgtactcatcattgagggcatcggaagcgtcggaagtttcttttccttcttcgagtgccggattatccagcaattcagcgtgaatccgttcttccaactccagagtcggaagttccagcaacttgacagccagtatctgttgaggagacagggtctgtacttgttgttgtgcctgtgtctgtacctgacgtgaaccttgtaccatttttattgttgtcttgagttaacagcgtgcaaaaataataattaaaatgaacttcaaagaaaaaggcaaaatttttaatattggaaactgctgccgcctaagaactctcgtagcagggaagtagggggcaattccttatcttgtacggaaacaaaatagttcaggaagcggagcagacggtgtgcttcggagtattccggacaacggttgggcaccttgcgcaaaacgggttccacgtagtcttttaatacagccagttcgaacagcagggccgagttgaacatagcatcggcattttcctggtaggggaaaatccatttttcttctccttcccgtacacttggccagcgtgcgatggtttcttctgccgaatagttccggtacttgtaatcacggatgatacgtcgcagcaggcggttgtcggtggtaggaatgtaattatggttgtccagcaggatggtggtgagtgccgacacgtacaccttgtatttgttctcgttgggaatgtgcggggtcagtgccggattcagtgcatgaataccttcaataatcagtatcatgtgttcgtctatccggagtttcttgccgctcatctctcgttttccggtggtgaagttgtagcgtggcagttccacttctcctccgttgagcagggtgctcagctgttcttcaaagaaagggaggtctacggcatacagcgattcgaagtcgtgtttgccgttttcatccagcggggtatcgttccggttgacgaaatagtcatccagtgaaatggggtaaggcttcaggccgttggtcataagctggatgctcagccgcttgctgaaggtggtttttccggaagaagacggaccggatataagcacgagctttacccgtttcccgtcttggtcgcggtgggtaatctcatcggctatctgggcaatctttttttcttgcaaggcctccgacacatttatcaggtcggtggcatgaccttcgttgcaggccacgttcaggtcgcctaccgtgctgatgcccagaatctggttccagcgatggtattcctgaaacacttccagcattttttcctgcttcaccacttcttccagtttggtcgggttttcacggctggggatacgcagcaacagtccgtcgtagtatttcacaatgtcgaacaggcggatgtatcctgtactgggtaccaggctgctataataacagtccaccgtgtcgcccaattgatagtagtaagaataaagctgaccgtaagtgtccaacagtcgtgccttatccatcatccctcgtttttcgaacagacgaaccacttcctccgtgtgactttcagtgcgtgtgtagggaatatcggccgcgatgatttcctgcattttctgtttgatgcgctgcacgtcatccagtccgatggtacggtcgatatgcagtttgcagaaatatccctttgagatgggatgttccagtgaaatactgccttgcggatagagctcttctaccgctttgaccaggatgaaaaagagcgaacggacataagttcgcataccggaagagctggtaatgtcaagaaattcaatgtctttattgtagtacacccggaagtcgagactctctaccttattgttgactttggcactgaccggaccgtagggcatggccagattaaaaccgttataaatatccaaaagtgagcttccctccgggaattctcttgtcgaattattatttttgcaatatatttgtagcataaatgtaatatgtgttactaaccttgtgaataggcagttaatttactcattaaacaattaaaagcctctttccaacttaactaattacaaatggaatattctttttatgattttttagcgcttcttggatcactggcgctgttcctttatggaatgaaaatcatgagtgagggacttcagaagtttgcgggcgaccgccttcgtagtattttaaccgcaatgaccacgaaccgtgtgacgggggtgctgacaggtatgttgattaccgctctgattcagtcctcttctgctacaacagtaatggtggtcagctttgtaaacgccggcttgctgacgctttctcagtctatcggggtgattatgggagcgaatatcggaaccacggtgacggcgtggattatttcagctctcggttttaaagtagatatatctgcattttctctgccgcttctggcgattggtattccactgcttttctctcaaaaaagttcacgtaaatctgtgggtgagtttatcttcgggtttgcatttctgttcatgggattgaatctcctgaagacgaacgctccggacctcagtcagaatccggatatgctggcctttgttcagaattatacggacatgggctttttttctgtcctgctgttcgtcctgattggtactgtactgaccatgattgtacaggcttcggcggctaccatggccattacgttgattatgtgtgccaacggatggattagttttgaactgggagccgctttggtgctgggagaaaatataggaaccacgattacggccaacctggcggccttgactgccaatacgcaggcacgccgggcggcaatggctcatctgatgtttaatgtgttcggtgtaatctgggtactgatgttgtttgagcctttcttgtcgatggtagactggattatttccgattttatgaaggtaagtgaggccgacggggtggctgtctctttcaaattgtctgcgttccacacttgcttcaacgtctgcaatgtgctgattctgatatggttcgtacatcttatcgagaaaacggtctgcaagattgttccccagaaagagcaggaggaagaataccgcttgcagttcattacggggggcatgctttctacggcagagttgtctatccttcaggcacggaaggaaatcaatctgtttgccgaacgcatacagcgtatgttccgcatggtgcgtgacttgttgcatacggagaatgaaaatgatttcaacaagctgttcagccggattgagaagtatgagaatatcagcgacaacatggaagtggagattgccaattatcttacgcaggtgtcggagggcaggttaagttccgaaagcaagctgcagatacgggggatgctccgcgaggtgacggagatagaaagcattggcgacagttgctataatctggcccgtaccatcaaccggaaacgacgtggaaatgaagacttcacgggtgcgcaatatgagcatatctcacagatgttccaactgacggacgatgccctgacacagatgattgcactggtggaagacatgcatcagcaggtggatgtcaacaagtcgttcaatatcgagatggaaatcaacaactatcgtaaccagttgaagaaccagaatgtgattgacgtcaatgaaaagaaatacgattatcagatgggtgtacactacatggacattatcgccgaatgtgagaagttaggcgattatgcggtgaatgtggtagaggctcatcgggatgtgaaggaaaagaaagcctgaaaataagtggatatcaccatacaaataaagctgttcaaatcttattttgaacagctttatttgtatggtataagttgagtgcaaaaggctttgagtactccttgaagcaatgtcactcagtgatttctactcggtttactttctccagtaagaatcggttttgattccagtggaaaggcttgtatgcattgttcgttttaatcttgttttgtttgaagattaatccgtctaccgatttggcatatagaataggtgcatcgaatgtatcaaattcattgtctgtaatctggatggcgcctggttttcctccgtggaaatattttacctgatgctccaaatcgggaatttccggataaatggaaatcacggcgttggtaaactgaaacatgttggtcagtgcattaatgaaccgattgtaacggatgattacttcccggcaggcaccggtttcataccagccgttgcagtcaccacacaacaaaatcgctgctcctgaagtatggtcaaacaggttgttttctacgattgtttttttaggtgtactgaacagagaacctcttgcgcggttattgctgatggcattaccggcaaaataaacctctggtgtccatgtcaggttttcaatgccgaagtcagtctgttcgtttaaagcttcaggaagtggctgactgaaacggatgataaactcacgggcgccgtctgctgttggtttatctgaggctgtaatgcattctatacaattctttccatccagcagttccatggtttgtgaacggatgaactgtacgctgtcgccgggaaatccccagtcaaatccccatgactggtcgtgcatgtaacgtgctttgagggtgtgggcatcaatttgttggagaactttcagataggttccatgtacattgatggcatcgtccatcatgccttcatacaatccgttgacagagatgatttttcctttgcattgagaaaaatgggttgcatcggcctgagtagtgaaatagcgggagtcgttttctcctttcaaacatacaccaaaaccatccatcgtgatgtcatcacatagctgggctagtaggcccataccttgtgcatagtgtaccttgacattctttattgtggtccgggtgttgtgtgacaagaaaatgccaggagtcggacggtcccatgaacgcatggcaacaatagtccctgccggaagtcgtttgtctttccatttaggagcatatatcaaattctttcctaccatggaacaacctttggtcgggcagctgatgtcgctggtgttgtatacaatatgtcggctagccttttcaaaagcgatacccgacatcgggcgaagtttccaaccttctccctttgtttcgaaaactgagtcttttgtcaggtggtactctacccatggagcgggttgaaaggtgattcctttttctccttcattttttataatttccacttgagctatgtgtgggttggcaaaatcgatgctgaagttttgtagggtacagtctgtacttctgagaagggataccggaatcatctgtccgtggaagatgaattctgccccgtttccttctattgtcagcgatttcatatcctccagtgccagtcccactcttttaggattatcctggtcgtggttggagatgtagtaagtacgttctgcagctccttcaggatagaaatgataagtcccgctttgaaagcgtaaggttactgctttgccttcttttacttcttttctaatttttgcaagtgccttctccatacgagtagacatgttgctcttctttcccggttgaataccgaaacgagccatgtcatacacatgttgtgcacataaagggaggcagaatacggcaaacaatgccaagcattctagtttcattttcatagtgttacattttgagaataagagttgttattttatagtaaagtattgattattataaagaaaggctgacgagttgtatctgaatacaaattggcagcctttctcttaatgagtgatttgtaaagttactttaatatccaggattctgatcctcttttagcagtggattgacatcaatagcagaagtcggtattggcatccacatcaaacggtcatcccatgttttttctactactctatagggggtggtgctccatgcttgtttttgagagtcatatactccgcatggggcataggttgtgccattcatgaccttggcgcagtactctgttccgtagcggcggatatcttcgtagcggtgtccttctccagccagttcgatgcgacgttcgttgcgtacaaactcaatggcatcgtccttggataaagaggtcggtacaggcggcataccgcagcggtcacgtagcttgttcagttcggtagttactttctcgtcccatcctgtggtcatgatatgtgcttcggcgtaagtcagcagcacttccgcatagcggagcaccggatagtcttctgcactattgtagcctttgtagggagtgagcgataccatcttacggtagcagtagcctgtccatgactcatttccgtctatacctgctttcaacgggtcccacatgaagtaatattctccagggaaatcagtttcctgccagcctttcagcggaaattggatggaagcgtacaaacgactgtcgcggttgcggaattcttgcatgtaggggatggccttgatatccagtgtagccactttctcccgatatttatcgggttttatcgattcgttgagtcctgtgtcttcattttttgtgaagaagtaggtctgccacatgtccgcataggctctcattcgctgctccggagtaatcggggtaggtagcgtttttccgtcaatgctccaataggcatccaccaagtcttgcataggctcgtaagaacaatagccggagcccatttgactcggacggatgtaagtgtagcgtgagccgtcgttgttgttgtcatcggccatgtattctctggtcaggatgtattccggattctgtggattcgcattctcagcatgccacaggttttcgtagttgaatatacctttgatgaatttatctttgttgatttctggatgctgattgaagtctatgtatttttccatttcctgggcttctttttgctgattagcattcagactggtcacatagaataagtcgtggtggccttcactgataactaatccggctgatttttccgcttctggatagttcccgaaatagagtgcggcacgtgcacgtacagacagggcagctgcacgggtgatacgtcctgcttcatagaatttgttgccattgtattcatccggtaggagttcggcgatttcctccagttccttcagtacataggcttgtacatcttctttggaattgcagcgtacttggggagcattgtattctggtacatcctcgaataagtaagccttgccgaaacgggtcacaagttggagataattccaggcacggaagaaacgggcttctgccttcattcgtgctttcagggtttcgtccatgtcacattgatcaatgttctgcaggaaggtgttgacgatgcgcacggtgctgtagtcgtagccgaagtcgtttccggctgtgatgccgttcatttgaagcagttcgtaaggaccttcccaaggcttatggctgtgagcgttgtctgtgtacatttcatcccagatgtcaaagcctggcatttgtgcgtatacgccgttcagagcgctccaggcatcattttcgtttttccagaatgtctcagtagagatgtctgaaggtggggtcacttccagatcgcaggaagtagctagtgcggcacagaagagtgccgagaaggtgatatagttgagtttcatgataatcgattattatgttttagaatgataagtttacaccaaaagctatggatttggttcccaaagcagagataccgcgtccggtagaagattccgggtcgaagtctttcatgattttgtccgcacggagtgtgaagagattttctccggtaaggaaaagtttcaaggaagagataccccatttgctcacaacgtttttcgggaccatgtagcccagtgacatggtcttgatacggaagtagtcggaatcgaataactgattgtcagagaaatgtttgttgtattcatccatggaagttcctccgtacagacgaggtactggtgcatgagcattcggattctcttctgtccagcgctgcaggtggtattttctcgggttggagttcagcatgaaagcgaacacctgttctgattcaaagccgacgctggtaccggaaacaccctgtccaaaggcgctcagttcccagttcttccattgcagactcaggttgataccgtaagtgaagtcgggcacatcttttccgatgatagtacggtcgtcgtcggtaatggatgcattggctgtggactcgccttttgccaggtcacatacgtatttcactccttcacgctgtggcacatattttatgtcacctgcttgtggagcacgtccgtaaatgtagtagcggcctgcgtctatttcttcctgtgtgtagagcccgtcggtcttcagtccgtagaaggagccgatggattcaccttcttttaaaatccagcgtatgttgtcgccagcattctgtatcatgttgtcagaaccggccaggtcagtgatttcgttgtggtttgtggcgatgttggcactgattgagtaagagaaatcacctatctggttgcggtgagttaccgacatttcgaatcctttgttgcgcaccttaccgaggttcaggctgggattggaccagataccggtttctctcggtacattgtaaccaagcaggatgtcgctggtattctttatataatagtctgctgaaatacttaatttgttgtctagtacatccagatcaagaccaatatcggtcagagccaccgtttcccatccgagcgaggtgttcggaatttgtgcttccacaacacctttcacagctgtgtcactgaagttgtagttgctgccgctggacatcagacggaaataatcatagtatcctacgttgttaatgtttcctagtgtaccgtaagaggcacggagcttcaggttattaatccatgtgacgggtttcatgaacgactcttcgctgatacgccatccggcagatacagaagggaatataccccaacgattgtccttgtagaagcgggaagaaccgtcggcacggacattcacttccagtagatagcggtcattccaggagtagttcacacggccgaagtaggacaacatcttgctttccatgatggaacttcctcccggagtttccttggatacttcgtttccctgctctatatcttccagtccgtcgctgacgaagtcggtacgcttgctgtaaaggcgttcatagttatagtgttcgtatgacgtacctgccagcaggttgatagcatgtttaccgaagttcatgtcgtatttagcagtaagggtagttagcatggtgctgttgctgatccagtgcattgccatggagttcgggctggtactttccgtgcctggaataggttctcctgtagtgaaatcgttgatagcagagcggttgcccgtgtagcttttgcttttgtattcatagcgcttgtagtccatctgtccagaaactgtcagtcctttgagtggcttaaggtcgaatcccagactgtacatggagttttcagttgtgctttttgaccaattggggtcgcttagggcacgtaacgggttgttgttcatgaaggtctgtgtggcctgttttcctccagcaatgcttccccattctccgttcgactgttgggccaccatgatagaaggtaccatcacaaagttggctatccatgcggtgccgtgtttggtatccgattggttacggatgtatttgacaccgcttttcagggtcagccatttggtaatgtctgcttgtacgttcaggtctaggttatagcggtcgttgcttacgcccggcatgaagtcgtcgttgtagaggtagcctgcactgctgaagaagcgtaccttgtcgcttccaccactgaagttcaacgaatgctgggtggtgagcacgtgcttgtcaagtaccaggtcggcccagttagtgttcggataatagtcaggtttgctaccgtcacggaaccactggatttcctcattgctgtaggcttggtgtttacctccagccgggtcttcgttgtatttggcttcgttcagcaggctggcataatcccatgaatccaatacgtccggcagataggtcggcattttcacacccaccatgccgctgtaagatacgttcatcttttctttcttaccttggcttggtggtgacgagtactacaccgtaggcagcacgtgatccgtaaatagaagaagaggctgcatctttcaggaaagagatggattcaatgctgttcggatcgaggttggagaagaaagttgcgtccgcgatagcaccgtcaatgacatacaagggttctgatgtacctaaattgccacggccacggaagttgatacttgggctcgaacctgggcgagagatgacggtaacaccaggtacagtaccttgtactgctgataatacgttgctttgtacgcggtctttaatttcatcggtactaacagaggcaacagaaccggttaggtttacttttttttgagtaccgtatcctactacaacaacttcatctagtacttctgtatcttcttttaatgtaatacttaaaggttgcccatcccatttgatggtttgtgttccatagccgatataagaaatgatgatagaggctcccttttgtacgtttgataaagagaaatttccgtccaaatcggtaattacaccgtttgtggtaccttctaccatgacggatgctccaatgatgggttctcccatgacatcttttactgttcctttacaagatgaggcttgttgagtgatttgaagatggggtatgttagcgaatgcggtcgctgtccatccagagatgatacctatggtaaataatataactcccacaggcttaagattttttctcataatctaagatgttcttttaaggttaagaattttttaatcgcccgcaaatatatgaaaatattaaatagctcaacggtattttattaaaatatttcttttagtttttctgtattagataaatgtaaacaataatggtggaaaagagtaaaatatttatcatatttatgccggattagttgataattgtagtttgctaagtctgtttttattatttactctgaagttaaaaacaaaaatccccgccttgtttattgaacaaagcggggattttgtttcagttatacagtgaaattatttttcaatgtctaccagttctacttcaaaaatcagagtagagaaaggtttgattttaccagcttcctgagcaccgtatcccagttcctgaggaatatacaattcccatttagaacctactggcatcatcttcagtgcttcagtccatcccggaattacacggttaacggccaatgtaataggctctttagaagagtcgaattcagtaccgtcaatcattgtacctttgtagtttacttttacacgtgaagtgtcagcaggcaaagctcctgtacccttagtgatgattttgtactgcaaaccgctggcagttgtctgaataccttccttgctcttgttgttagccaggaattcttcattctgtttcttgtagtctgcatatttagcttccaatgcttttgacttgatcaattctgctttcagacgtacataagcacttgcagagtcagttgttacgatgctctgtttctttacagcagcgatgaatccagccaggaagttatctttgttcaaagcctgagtagaatcctgtccaaagatctgacggttgttgtagtcgaacatgtcaccgcttacctgctggccaatctgcatacctgccaaataagctttctgcttagcgtcagtttccttgcagccttgttccagacctttgatgaagtctgctacgtatgctgaatctactcccagacgaccctgtacatattccatcaatccctgagtgtttgtaacacccatcatataagacaaagagtctacatcgcttttcaggtttgctttcggtccctgtgctgtacatgatgccaggctggctgcagcggcaagcatcataaagaatgtaccttttttcatttgctttattttttataatacttcaattaattctacttcgaaaatcaatgtgctgtgcggcggaatcatttcgcctgcaccctgtgcgccgtatgccaggtctgacggaatgtagagtttccatttggcaccttctgacatcagttgcagtgcttccacccatcctttgattacctggttcacaccgaacacagcaggctcaccacgtttgatagagctgtcgaacaatgttccgttaatcaatgtaccttcatagtggcaacgtacgcggtcggttgctttcggttttttaccgtttccttcagtgattacttcgtattgcaatccgcttggcaaggttacgatgttcgggtttttcttgttttcttccaggaaagcctttcccttttctatgttttctgcgttcattttctcttctaattcagtgaaatatttgttgacgatttcacgtgcttcattgtgagaaattgcagtttggtttccttccaatacgtctttgatagcctgtgcaaagtcatttacatcaattgaacgagcacccatgctcaatagattttggccaatccccagaccaatggcgtagctaaatttatccataaacagattttgtattaataaatgattaacggggagcaaaggtatcttttttctgtgaatgtgaggaattttgattgataaaatttcttatttttggacgatgaaactttttaatgataatgtatctaaaatcaggaggataagaagatgaaaaatctggtagtattgacaggagccggcatgagtgcggaaagtggaatcagtacgtttcgcgatgcaggagggctttgggaccagtatccggtggagcaggtggctacccctgaaggatatgctgccaatccgaagttagtgattaatttttacaatgaacgcagaaagcaactgcttgaggtgaagccgaacagggggcatgaacttttagcagagttggagaaatattttcatgtgactgtgattacccagaatgtggataatctgcacgaacgtgcagggagtacagaggtaattcatctgcatggggaacttacgaaagtgacttccagctttcagcccaataatccgcgttttataaaagagcttaaaccggaggaatatgaggtgcggatgggagacaaggcacccgatggctcgcagttccggccttttattgtctggtttggagaggctgtgccgatgattgaaactgctattgattatgtggataaagcagatatttttgtgataattggtacttcgctgaatgtctatcccgctgccggtttgctgaactatgtacattccggggtaccagtctatctgatagaccctaaggaagtacgtattgcttccggacgcgcggtacatgtgattcagaaaggggcttccgaaggaatggaagaattaaaaaaaatgttattggaaatacgagattaaacaaattctttctatatttgttatcattttaaactgagaatagatactaattattgttttaataaactgactgattatgaaaaagtacatttgcacagtatgtgattgggtttacgatccggaagtaggggatccagaaggtggaattgctccgggtacagcttttgaagatattcctgaagactgggtttgcccggtttgcggagttggaaaagaagatttccaggtagtagaagattaataaacttttcttgataaggacggccttctaaaaagtatgccatatacttttagaaggccgttttcgtatctttattcttgtagaataattcccatttttttcatcaggaaacaggcgttcatgttttgagccactccttcgcgcagtttataggagaaggtcagttcattctcctttatatcggcttcgaaacagtaattccgtatttcttcagggaactgtttgatgaggcttcctaacagaaggtcgtgtgtggctataatgccgttggccttcagctgcataaactgacggatcaaatcaaaagatcctttttgtttgtccatggagttggtcccttttaatatttcatccagaataataaatagctgctgtccttgatttagcaggtcgataatgcgtttcaaccgtttcagttcggcaaagaagtatgattcattatcggaaagtgagtcagaggtgcgcaggctggtaatgagctgattcgggtaaagcttgagcctttcgcagcatacgggggctccaatacaggccagcaggtaattcacgccgatagttctcaggtaagtgctttttccggccatattggctccggtaataatcaggaaaaacggacgcgacggaatggtggcatcgtttttcacgcattgggaagctggcataaggggatgccccatttgtgtggccagaaagcagaaaggcttttctgtcagttccgggtaggtgtattgcggatgattgtaggcaaaggtacccagtgaacataaggcatccaattcgcctacggtctccagccatttgctgatatgctgtccgtagcgtgctttccatcgttctatgcggacgatttcctgaagttggaaaaagatgcttccttccaataacacataaagaaactggttgttgcgtaaatccagccggtcaagttctttggataattgttgcaaagcctgtataggtgactggccgttcaggttgaaccgttccatcagttcctgcatgccagctgacttccagttttctgcttttgctagagcgatgagtcgggcatatccgttcaggcttttcaactgttttccgtaggtttcctgtatataggtggcccgtttgataattccaaagctaagaaccaggaagataccgaatgaaagtcccaaccaggaaaatgaagtccatcctgccagtgaagttatcaacaggaggctgttaataactggtactccccagataaaggctttcacccatccggcgtgcaggtattgtgcaggactctgactccatgcctgtattttttcgccatcggatgactgaccgtggtgtaccagtcctgccacgcggaactgttcgcggaacaaggtatgttcgcttatttcccgtaccatttcctgccgtttttcgatggaagttttttcgtgcagatggttttgcagccattttgccagacggttttttccgaaaaaagtacaagtacggttgattgattggaacagggagcgtcgtccgaatatatccaggtcgaatgaataaggatgctctgggttgacgtattctttcccgtcctcaaaagaactgtaatcaccggaaagggcttgcagctcttcttgtataatacgtgcctgtgtttctagccattctttgcggataaaaaaacggttgtgtatttttaccaaaataaagagcggaaggaaggtaagacagatacagataattagcagagtggtttgattaaagaaaaagtaaagtcctgctattcctgctatgaacaaagcaaggcgtagcatgctgatgcggaagatttgcttctttacctgttgcaattgtccttcagtgagggacagtctttctgtgtagtgattttctgggttcatgttattgtgtttgtgttagttgcgcaaaggaacgaaaaactctagatacatgattgaaaaaactgttaaaagaagaaatccatttgtataattcatgaataaatcccttctttgcaatgaaatcaagaatatttcttattgaagtgtgcgcggtaacgcgttttctttttcagtaaatgcgtgtccgcacacacatgttctttcgaagtggtatgcagaaaaataaaaacatacgtcttactgacattgcccgcttggcgaatgtgtcggttggtacggtggacagagtgattcataaccgtggacgcgtatcggaagaaaacatccggcgtgtgaaggaaatcatggagcaggtagggtataggcctaacctgatagcgcgttcgttggcggtgaagaagccgtgtcatctggtggcactgattccggatttccgtccgggagattactggagtgcgatggaatatggcattcgtcgggcagaagaggagtgggaaagctatggagtgaaggtttccgtactgacttttgaccagtacagcaaggtcagctttgagcaggctgtttcacgtttgcaggagatgactgaaacggtggacggagtcattgtcggtacgcttttcaaggaggctgtcatccagctttccgaacatctggatgcgcgtgagattccttatgtgtatgtcgactcggatatagaagagcaaggccgtctggcttattatggcacggattctgtggccgggggagagattggagcccgtatgctattggcttccatggcctttcagggagatattctggtcgctcatattcagcatgacaaaggcagtatgtccacccaagggcagaaacgctattccggtttcctgcaatacctgaaacaacagggctatgaagtgaatctggtggaggtagatttatggataggcgatgaggctcataacgaacaggtgttggatgaggctttccgaaatcatccgggcattcgtggagcggttacgttcaactcttcctgctacattttgggagattatctggaaaagcggcagaagcacgagattcggctggtaggctatgatttgattgacccgaatgtgcggttactgaacgagggatatgtgcaggcactgattgcacagcgtccggaactccagggctataacggagtgaaggctttgagccggctgttgctgttcgatgaaaaaccgcaggtggtgaatctgctgccgatagacattctgttgaaagagaattatcaattttataatagagtatccaatttattgcaaatctgattattatggcaaacgaattatttaacgtggccggcaaggtagttgtaatgactgggggagccggtgtgttgggaaaaggtatttccaagtatttggctgcacaaggtgcaaaaatggtcgtactcgaccgcagtgaagaagctggtaaagcactggtagatgagattgtagctcaggggcatgaagctaccttcctctatacagacgtaatgaacaaggaagtgctggaacagaacaagaaagacattctggaaaagtacggacgcattgacgtcttgttgaatgctgctggtggaaatatggctggtgcaaccattgcaccggacaagactttcttcgacttgcaggtagatgcttttaaaaaagtagtcgatttgaatcttttcggaactgtattgcctacgatggtctttgccgatgtaatggtgaaacagaaaaaaggttctatcgtaaacttctgctctgaatctgctttacgtccgttgacacgtgtagtaggttacggtgcagcaaaagcagccattgccaactttacaaaatacatggcaggcgaattggctatcaagtttggtgatggcttgcgtgtgaatgccattgctccgggtttcttcttgaccgagcagaaccgtacgttgctgactaatccagacggctcactgaccgaccgttccagaacgattctggctcacactccgttcggccgtttcggcgaaccggaagatttgtatggcaccattcactacctgatcagtgacgcttctaactttgtgacaggtacggtagctgtcatcgacggtggatttgatgccttctctatttaattgaagtatgaacctttaaaaagaaacgttatgtatttatgtgaacaaacctggcgctggtacggcccgaacgatccggtgtctttgtgggacatcaagcaggcaggtgctacgggtatcgtcaatgcgctgcaccatattccgaacggcgaagtctggacggtagaagaaatcatgaaacgcaagcagatgattgaagaagtgggcttgacatggagcgtggtcgagagtgtgccggtgcatgaacatatcaagacgcagaccggcgatttcatgaagtatatcgagaattataaggaaagtctgcgtaatctggccaaatgtggcatttacattgtgacttacaactttatgccggtgctcgactggacacgtacggacttggcttataccatgcccgacggttccaaggctctgcgctttgaacgtgcggcgtttgtggctttcgacttgtttatcctgaaacgtccgggagctgaaaaggattactcggaagaagaaaaggccaaggcaaaagcacgctacgagcagatggacgaagaagaaattcatcgcctgacccgtaacatgattgccggactgccgggctcggaagaaagctttacgctggagcagttccagcatgaactggaccgttacaaggatattgacgcagaacagttgcgtgccaacctgattttcttcctgaaagaaatctgtccggtggctgatgaagtaggtgtcaaactggtgattcatccggatgatccgcctcagtcaattttgggcttgccgcgtatcatgagtacggaagaagatttccgcaagctggtggaagccgtacctaatgaatccaacggtttgtgtctttgcactggttcactgggggtcagtgccaagaacgacttggccggcatgatggaacgttggggcgaccgcatcaacttcgtacacctgcgcagcacacagcgcgatgcagaaggcaacttccatgaagcgaatcacctggagggtgacgtagacatgtatcatgtgatgaagaacttcctgctcatgcagcagcgccgcaaggtgtctattccgatgcgtccggaccatggtcatcagatgattgacgacttgaagaagaagaccaatccaggctattcttgtctgggccgtctgagagggctggctgagctgagagggctggaaatgggtattgccaagtctatggaagagcaaaattaaggaagtgtatagcgcatattcgataagctgaaattgtcgaagtgaagaaatggttcatgaaggaagtttttttctgttcatggactattttattttgtgccttttattcgtatttttatcgccggaaataacaatttatggcatcatgaaaagattttgtttattctgtctgtgcctgcttggcttctctgtgtggggtgcatcggatcaggtagtggaaaaggtacttgatattttcgaagcagacagtctgcccggttcaaacgtggcggtaacggcggactcagattcggttcacttgtcgactgtgaaaaaggaactggcggctgcccggttgaatgaagccaatctccggatggagattgagcagatgaagttggctgcatatactgccgattcggtgaaactggccagtcagagacggcgtattgacttcttgcgtcatgaaacacggggtgttccggttgtggtagatggggatacgctgttttatttttatgccaagcgaggaggagacatactccccagcagcgtgcagagaacgtggcgaatgatattacggccttgggcaaacgctttaacctgaaacctgattctgtatacattgagaccagtgacatcgtgacggatgtgatgtatgataataaagttcttgtttcctttacagaccaggacggcttgtgggaaagctgtacacgcgaccagctggctgcgaagaatcggttggtcattatcgaaaaattgaaagtgatgaaggaggaacatggactgatgcagttattcaagcggattggttatttcgtgctggtgattgtggggcagttccttctgttctggggaaccaactggctgttccgtaagttgaagctgcgtattatgcgactggaaaagacgcggctgaaacccttctccattcaggggtatgagttgctggacaccaggaagcaggtgaaactgctgatattcctggccaatctggtacgttatgcgtttatgttcctgcagttgctgcttacggttccgctgctgttctccattttcccgcagactaagaacctggcctaccggctgctttcctacatctggaatccggtgaagagcattcttaccggaatactcgactatcttccgaacctgttcactatcttcgtgatttacatggccatcaaatatctggtacgcttcttccgttacctggccgaagaagtacagtccgaacggttgaaattgagcggattctatcccgactgggcgatgcctacctatcatattgtccgtttcttgctctatgcgtttatgatagccatgatttatccgtatctgccgggttccaattccggtgtattccagggaatatccgtatttgtcggtttgattgtatcgcttggttcaagtacggtgattggcaacatcattgccggactggtgattacttacatgcgtcctttcaagattggcgaccgtattaagctgaatgatacgatgggaaatgtggtggagaaaactccgctggtcacacgtatccgtaccccgaaaaatgaggtggtgaccattcctaattcctttgtcatgtcttcgcatacggtgaacttcagccagtcggcccgggaatatgggctgattatccattcggaggtaagcatcggttatgacgtgccgtggcgagtggtcaacaaacttttgattgaagctgccttgaatactcccggagtggtggacgacccgcgtccgtttgtactttccacctcgctcagcgactggtatccggtgtatcaggtgaatgcgtatatcaaggatgcagaccggctggctgatatttattcggcattgcatcagaacattcaggatcgcttcaacgaagagggcgtggaaattatgtcgccgcattacatggctgtacgcgatggaaatgcgtctaccatacctccaaaggaaggagcggacgaggaaggataattattctacatacattttctattttatgataagggctggagttttgggataaacttcggcccgttttttatgtttcccaaggcaaaaacgtaggtttctgggggcggaaccgtatgtttccgcaggtggaaacgtaaggctccggcgtggaaaacgtagaaagtgaaaatagactgtgctctcttttctgaggcgtttctctcttgatggaaagctattcgtgtgataagagatggtggtaacgtaaggggataaaaagaacgccccggctttggaaaccgaggcgttacagtgaatcagatatgttgtactgatttattcgtgtgcgatatagcctttcaccggagtcatgatgaacgtaaattcataatctccgtaaggaagcatgtacttgtcttccggcagggcaccccagctgttgacacaacctaagcccatctgtgccttgtcaatcaacaggttggtcaggtcagcttcttctacttcgaacgagtggctctgtttcttttcagtaccgtcgtccagtgaagcgatggtgtagtggagagcagaagcagagaacggtgcttcagctacgaatatcagtccgtttccagccatgttcacctgtttccaccagcggatgtcagtcttgttgccgttttcctgcggacggatgtacggatagaactggtcgcttacattctggttgtagatacctaagtcagtgcaatggttacggtcgctgtagttttctatcggaccacgtccgtagtaagaaatcttctcaaatgacttcggcattaccatctgcataccgaaacggaacatcggtgaaaccttggcattcttgtcggctaccatcttctgtgtcaccttcactgctccctggttgttgatctggtaagtgagatataacttggcagatacttccttgaggtcgtaagtagagtttacgatggcctgtccgttttctaccttgtagttgaagtcagtcagtttgatgcccgggttcttccatgcagcatatttgttctgcagaccagcaccgaagtcgttgtcggtcggggcacgccagaagttcggtgtcagtgcttcgccttctttcaacatgcttactccgtttacatcgtatctgtcaagataaccgttgcgtttgctgaattccagatagaatccgtcgccttctacagtgatgtagtccggatagttcgggttgatttgcggttcaactacctgctggttggtttcagctacgttcttcagttccatagccggtgctttgtacggattcagcacaagctggtctttagctactacgaaaccggccggaatcaaaccttcacggttcttctggatgtatttcacgttgagcagccattcaccgcactggcaggtcttgcccagatcaagtttcacgctggctgtctgatgaggtgccacgttcaggttttcaacgcgtccgctacggatagccttaccatctttcagtacttcccattccagtgcgtatgcagacaggtcacggaagaagttttcgttgtataccttgatttctccctttgccaaatcgcccggagtagtccagatgttctggtagaagtactgtacttcgtatgcatgcggattcggtttgcggtcagggctgataagtccgttgttacagaagttcttgtcgccagaatcatccatgcggttgaagtcaccggcataagcataaatcatcttgccgttcttgcctgtccagcggatagactggtctacgaagtcccagatgaatccaccctgatatttcggatacttgcgaatcaagtcccagtattctttgaatccaccttgtgaatttcccatggcgtgtgcatattcacactgaatcagcggtttctggtatttgtcgtccttgctgtattcttcgcaccatttgtagttggcatacatcgggcagtagatatcagtctttccttcgatgcgggcttgttcgtattgtacggcacggctggggtcttctgccttgatccagtcgtaagcagcttcgaagttcggaccgtatccggcctcgttacccaatgaccagaagatgatgctcggatggttgaaaccacgctgtacgttgcgctggttgcgttccatgtgtgccttcttgtaagtcggttccttggccagtgtcttgtcgccgtatcccattccgtgagattcgatgttggcttcggccactacataaataccgtatttgtcgcagagttcgtaccagaagttgtcgtccggatagtgacaggttcttacggcgttgatgttgaactgcttcataatctgaatgtcctgaatcatgcggtcgcgtgaaaccacgtatccaccgtccggatccagttcatgacggtcggcacctttgaagagtactggctggccgttgaccagaatctgtgcgtttttgagttcaatcttgcggaaacctactttcacaggtacaacttcgctggcctggctgccgtctttcagtgtagcacgcagtgtgtataagtaaggagtttctgcgctccattttttcggattttctacctgaagtgtagtagaaacattgcctgaaccttttacttcggtagaagctacggtctggttctgggcatccagcagttccaggctgacatttccgcttcctttcaaattcaggttgatggccagtgaaccgttcttgtattcgctgtccaggtcgggagtcacgcggatgtcatcgatgcgtttcttgttgcgggtataaagatagcagtcgcgtgccactccggtataacggaagaagtcctggtcttccaggtatgaaccgtcacaccagcggaacacctggaaagcaatcaggtttttctgtcccggtttcaggtacggagtaagattgaattcagcttccagcttgctgtcttcgctgtagccaacgaacttaccgtttacccacaggtacatgttcgagctgactgctccaaaatgagcgatgatgtctttgcctttccagtcggccggaaccatgatttcacgacggtaagaacctacgtggttttcttcagtcggtacgtaaggaggattgttttcgaaacggctgcgccatccataacctacgttgatgtagatagggtcgccgtatccgtgagtttcccatactcctggcacctgaaggttgtcccaacctttatcgttgaagccggttttccagaaatctgtggggcgtgcatctgcattccgcacccagaagaatttccaggttccgttcaggctcataaagttcttggagtcttccttgactgccttggcagccatttctgcattttcgtacgcaaagaagtttgcgtgcatcggtgcccggttgatggcatttatttccgggtcctgccattctttaaatgtctgtgcattgcccgaaagcacacaggcacctaagagtcctaacactaattgttttttcatggattaatgattataataaaaaatgataactatgtgtctttattcactcacccacgcggggttatgagggtgtgtcaccctcggattgtaatacatctccgtagagtcggggatacgaatctggtattcttttccgccatggttgggaagagaacttcctctaagccagggattcatgctcttgagcaaactgtagttgatgccctggcctttggaaaagcgtgccaggtcgtcaatatcttctgtcacttttatggtacgataaggaataggaggatacaggtcgctggctctcaggtgaaaaccgaaacgggtagggtcggtaagcagaagcttggctgccagtatccggtatacatagcgggaagtttcttccactaaatacaggtctagtgcattatctgtatattgtttttcctgctgctggctgattcttccttgtccggcattgtaggaggcagctacggtttcccaattaccgaatttacggtaagcttgtttcaggtacttgcaggcggctacggtagatttctccacatgataacgttcgtccacatgatgattgacctccagaccgaactcacgggcggtgccgctcatgaactgccacaatccggcggctccggctcccgaccgtgccagcgggttcacattgctttcgatgaccatcaggtacttgaagtcatcgggtacaccttgttcctttaagattgattcaatgatggggaaatagcggttggctcttttgatgatttgcagggaagtgctgtgcatgtaagtaaatgccatcagttccctatccactcgttcgcgccggtcatagcgcgtcaggtctatttccgtgccgcaaaaattgatacttttagggacttcgatacagctgtaagcaggagatgagtttgtttcggtctgcgcggtgcaggaagtggaaaatccgggtaacaaaaaaccggttacgaataaagtaactgtaagcgataaagtatataagcgttttgtcaatttcatattcaaggtcttcttgtaactatcgatttcttgtgaatctgtggcaaaaataaagacttattcatataagccagaggcataaattaggcaaaagtcaagtaaaaatcgttcaaaataagtctgaacttacttgattccccgtttggttatgtacatgccttttctgttttgagcctttaggacacaaaaaatcaacagctctttgtttaaaaatcgctctaaaatacgaaataaactttgggaaaacgctacctttttaatttatttcacaaaatgatattcctcataaaagattattcttccatgtggaaacttttcaggattgtttctggcgttttgtcattttcctgacggtatacaatggaaacatagaagccgcagcttccgtcttttgctagcaggtaactgtaaacgcatttttcttcttcacagtttcctttgagctgcacaccatggaactggggcagctcaaaagattgtacgctgctttgcgatgtcacttcatcgtctgtggcaatagcctttaattcctgtcctaattcttcttttttcagcccttctccctctaaaagctggatggtgaggtaataggtatcgttcccggcaatgtatccttcggaagaatcatcttctactactaagtcggctggagcctggaaagaaactccatacgaactccatgtggttgttttcaggttttgtgcaaacgcgggaatgactactgaaaaaaatgcaatcagggttaagaataaatgtttcatacttttcgttcggctactacttttcgtgcatatacttcttcttccttattaaccagcacgcatacggaacctcctccataggaagaagttacggcagacaatggcgtttcatcttttagcatggcatccacaccggcagactttaataagccctttatcaactcagcttcccagagatctcctctgaaaacttcaatcaatgaatcgtaatttttcgcttccatagtcacatgttttaagggttaataaatcagaagttttctctctctcttatttatttcaaagataagaaactttcgggaataaatattcagtttgggaatatatttcttatgaaatggcagattattttgacgtttgtgctttgaaactttgtttgaaattgtatttttgcgataatttgcaatctgaataaaacaattatgaatctgaatgaaacttttaaggcggttcgagcagcatctcgtaagttggcgatgatggatgcacagaccattaatacagtgttatgtgccgtagccgacaagatagaagaaaaaacggatgtgctgctgaaagccaatcaggaagacttgctgcgaatggaaacgtccaatccgaaatacgaccgcttgaagctgacgcaggaacgtttggaaggaatagcagccgatatgcgtcaggtggcttctttgccttcaccgttaggaatagtgagagaagcttatacggtacccagcggacttcgtttacagaaggtgagcgtgccgtttggggtggtaggagtaatctatgaggcacgtccgaatgtcagttttgatgtgttttccttgtgcctgaagagtggaaatgcgtctattctgaagggtggaagtgatgccgatgcctccaaccgtgccattgtgcagctgattcatgaggtattggaggagtttggtatcgattcgcacgtcgtggaattgttgccttctactcgcgaggcgacagaagcgcttctgcatgcagaaggttgggtggatttaattattcctcgtggcagcagtaacctgattcagtatgtacgtcatgaagcgactgtaccggttattgagacgggagccggaatctgtcatacgtatttcgacaaggcgggtgatttaaccaaaggaactgccattgtcaataatgccaagacgcgcagggtgagtgtctgcaatgctatggactgtctgctgttgcatcgggcacgtttggcagatttgccggcattgtgtgttcctttggcggaaagccgggtaattctatatgcagatgaaccggcttatcaggctttggaaggaaactatccggcagaattgttgcagcctgctactttggaaagttatggcaccgagttcttagactataagatggccatcaaaacggtgaatgatgtagtagaagctgtaacgcatatttatacatacggttccgggcatagtgagtgtatcgtgacagaggataaagaggcggctgctttctttacccgggcagtggatgccgcctgtgtctatgtcaatgcgccgacttcgtttaccgatggggctcagtttggtttgggagcagaaattggtatcagtacccagaaactgcatgctcgtggtccgatgggattaagggagatgactacctacaagtggattgtggaaggtgacggacaggtacgaaaaaaatgaataaaataagtggtgtattgtatttttatagtatatttgcgaggaaaaataaattaatatacaattttgcgtatgaaaacttataccaatgtattcgatttgggcgatttgaagactgccctggcagaagcgtttgaaatcaagaacgaccgttataaatatgaagcgttgggcaggcataagacttgtctgcttattttctttaataatagtttacgtacacgcctgagcacgcagaaggctgcccgtaatttgggtatggatgtcattgtgctggatgtgaatcagggtgcctggaagctggaaactgagcgtggcgtgattatggatggtgacaagagtgagcatctgctggaggctattccggtaatggcttcttattgtgatgtgattggtgtacgttctttcgcgcgatttgaaagtcgggaagatgattatacggaaaagattctgaatcagtttattcagtattccggtaaaccggttttctctatggaggcggctacgggacatcctttgcaggcatttgctgacttgattacgattgaagagtacaagcgcaccgaacgtccgaaagtggttttgacatgggcacctcatccacgtgcgcttccgcaggctgtacccaactcttttgccgatttcatgaatgaggcagatgtggactttgtgattactcatccgcagggctatgaacttgatccgaaattcgtgcgtggagcaaaggtggagtacgatcagaagaaagcttttgaaggtgcggactttatttatgcgaagaactgggcttgcccgggtgtgacttgtccggaagattacggaaagattctgagcaaggatatgagttggacggtagataccgaacacatgtcgtggactaacaatgcgttctttatgcattgcctgccggtacgtcgtaacatgattgtaacggacgatgtgattgaagcaccaacttcactggtaattccggaagcagccaaccgtgaaatttctgctacggtggtattgaaacgtatgctgcaaaatttgtaatcagatagagtttacataaaaatgccgtgatatagagagcaggactcttttatatcacggcattcttgttgtaaataaggaggttattgttcgatttctttacccaactctttccagttgtcgaaacctttgtctaggttgtacaccttgaatccttttttgaccagtatctttgcggcattccggcttcggcggccgcttttgcaatatacggcaatggtttgttccgggttcagcagctcatcggcattggctgagaaactttcatccagtacgttgatgttgaggcttccgggaatatgtccttcgctgtattcagctacggttcttacatccacaatctgtatctgttcatttccgatgaaaccttcgaattcatcagcagatacgttcttgaagtcgtcgtttgatttccctttgcatgccaccatggctacggcaaacatgcatataaagaacatgaagtaaatagtcttaatcataaatgtagttttagtaagtaaattcatagcttacaaagcctttttcgtaggtgttgatgcggagcacgaccttgtcgccctgagtcagttgtccttcgtaggcccacagaggaatggaaagatagctcttgcgggtgaatgcttcataatctccgttctggttgtggtagagtgtcagatgaagtgtccggcttccgtcgccgttatccgagataccttcgtcaatgaagtgaaaaatatggcttttctctttagccataggcaacagaatcaggttgatatagttccctgatttccatacactctgaatatccaacgggtcagtcttggcggtcgcttccggcagtttgtccactgtaaccggtttcacggcaatgatgagctggcaggaatagagcagggcagtcgcttgtccctcatctgctgattctttcggttcatagatggacacactcctgtagatagagtcaggagtcagtccgtccatcccttcccggttgagaatttgcaggctctctcctttgtctgtaattagtttctgtagtgtaccgctttcatctgtggccgcatcaataaaagtggtgattacattgggatagacatattcatcttctttgcatgcccctaaaaggagtatgcaaagaagactgtataagatgacgccgaatttcttcattgtgcgatggccttcaagtgattgatagccggattggcgtacatggtcaggattcgctggcgcaggaagccttcgtccttattcggaagctgaatcaagtccagcttcttttgcaggtaagcttcaaagcgcttcttttcttccggagtatatttcccggcaaatgtttctgtgccattcaataggtcgcaagccacataattacccggataaagtcggtagttacggtggatatgcttgtcaatcagtgtagaaacctgagtgaaaacttccgttttaggcaagcctctgagcgcttccaattcttcgttgatgcaaggtccagtctggaagtgtacacgtcccttgtaaccgaagatacctgtttgcatattggtcaggtcgtctgcctggctcttcttgaatgtctccgagtctctcttctgctgcatttccttggctttcaggaaatcacacgggtcgtattcgtatgacaaggcaaccggtacgatgtgcagttccttcagacggtcgatgatgtcaccttcccctcccatggccagcattttcagtacgctgtcctgtgtgcggtcgttggagtcttttgcacggccttcacgttgtgcaatccacacattctcttgcttttgtgttacggcaaaatgaatgtaccgtgacatgcgtgcagatgattccagcatttgtcgcatgctcagagcacgctgtacgatgaacgacttgttcactcgcaccagtttttttatccacggataaataagcaggttatctccgatggcgatttctacggtggtagggaaaccgttgtccagcaagcctactgaaagaaatcccgggtcgagcacaatgtcccgatgattggaaataaacgtatagctttggttcttgtcaggaagcgaagaagcatccatgtcgaaaccgtcactgtgctgttgcatgatgtcgtgcagcagcttgtggaaaaacgttttctgtacgtccaggttggtcttgcagtggcgcaattgtgcggcaatcatttccaaaggaacattcggcatcaccgattggatgacagcctgaaagtctttgtcagaaagtaattcctcgaatatctgtggaagttcttcgggggtatacggacgaatgtcgtcaaattctgcaggtatgttcatgatgttgagtgacttgttctttccaaagatacaaaattaattgaaatggtcttcaataatgtcggtcataacgtccttaatatccagaccggcagcccgtacctgttgtggaatgaagctggtggctgtcattcccggagtggtattgatttcgagcatattgattttttcaccttctgtgatgatgtaatccacgcgcacgatacctttgcatcgcagtatgtcgtagatggcagatgtcagttgctgtacgcggctggtcaattccggactgagacgagccggtgtgatttctgttacttcgcctttgtatttggcgttgtaatcgaagaattcattctggctaactacttctgtgatagggaataccacttcatttttcttggtcttgtagcatccgttggccagttcgatgccgtccatgaaagcttcaatcatcacatcatccgactctttgaaagctgcttccaaagccggctgaatctgttcctttgttttcacctttgttacaccgaagctggaaccgctggcattaggtttgatgaagcaaggcaagccgatttttgcgatgacatcttcgtcgctgataccgtgacgtttgtttaccagcatggattcagctacccgtactccgaatcccttcaggtactggtttaaagtgaatttgctgaaagtcagtgcagaaaccagcacgtcgcaggtagagtagggaatgcctaacagttcaaaatatccctgcaggataccgttttctcccggagttccgtggatggtgatataagcaaagtcgggtatgattttctgtccatgatccatgaaactgaagtcattcttatccacttgtgcacggctgccgtcggaaagaatcgcttcccagcgtgctttagtcagttccacgatatagagggtatatttgtcctgatcgataaaagagtagataccctctgcacttttcatggagactccatgttcagatgagtctcctcctgctacaatcgcaattgtacgtttcatagttgttattctctgttactgatatacgttctccatcgttccagcaggcaggtcatatcctcgggcagttcggaagtgaagaacatttcctctcctgtgcgagggtgtacaaagcccagtgtcttggcatgcaatgcctgacggggacagatttcgaaacagttgtttacaaattgtttgtatttgctgaaatgagttccttttaagatttcgtgaccaccgtaacgttcatcattaaacaaggtatgcccgatgtgtttcatgtgtacacgaatctgatgggtacgcccggtttcgagtacgcactttaccagtgtgacataccccaatcgttccaatacctgataatgtgtcacggcgtgtttaccttgttccgggtcggacatgacagccatctgcatccggtcgcgcggattacgtccgatgttgccggtgatggttccttcatcttgttctacaatcccccagaccagcgcattgtattcacgcttggttgttttgttgtaaaactgaagtcccagactggtttttgcatcgggggttttagctaccaccaatagtcctgaggtatccttgtcaatgcggtgcaccagtcccacttgcgggtcattcgggttataggtcggtacgtcgcgcagatgccatgcgatggcgttgaccagggtaccgtggtaatttccacatcccgggtgtactaccaaccccgcaggcttgttgatgaccatcaggtcatcgtcttcatatacaatgttcagtggaatatcttccggaataatgtcattctcatagcgcgggcggtccatcataacggtcagcacgtccagcggcttgaccttgtagctgcttttcaccggtttcccattggccatgacaaagccgttgtcggctgccatctgaatccgattgcgcgacgcgttgacaattcgctcaaataaatacttgtcgatgcggacaggagcctgtcctttatctactaccgtacggaaatgctcatacaattcaggctcaccctgaatcggctcgatatcgtctggcgcctctccgtccagttcgtaatcaatcaaatcttctgccatctttttctttagggggttagatttagaaccaagagtcatctacctctgcttcactgttggcagacgaattcatatcgatagtaatttgtgtagaatccatggcaagagagtcacgaatcgccgtgttgcctacacagagggtcagcatggcttcatggggaactttatctccgctaaccagacttcttccacggtatttgatgccgtaaatccagtcctgctctcccgaaacgtattctggttccgtcagtttgaagcccatcgcctttaatttggcttccgcctggcgcaaagaactgttgtctatcaagtccggcaattttaccaaaggaaccttagaagtggtgacggtcagataaatcgttcttccctctttcacgcgtgctccccctgctggattttggtctaataccatgccgtcgggcacacctttcacatagctggagtcgataaccagccctttcagcttctggttactgagagcctgctgagcttcgttcaatgttttgttcttcacattcggcaccatgtaagcttctccatggtgtgtatagctgtccagccagagcaaggtaccccagcatacaccaattattacgacaatcatggctatgagattcagccagaaaaagcggttctttttaaatgaaaagaattcttttaaagttatcatgttgtgtcaagtatataatcggagcaaagatacaatattttgttggaatactggggagttacgggtgaaacctatgtctttttaacatggttatctgtagctttagaaaataaatgtttttgtgagtgctttgttcagataaaaaactaagaataaaatttttgcttaaaaaagatttttctttctttgtatctgaaaaggtagggaattcttataatttgtactgactaggataaaatatgtaatcaaaataagatcgtggagcaaaaggagataaatattgacaaattagtagcgggtgatgaacgtgctttcatcgcgtttattgaatatcattcttctgctttatatcattatgcttttaatattcttcatcaaaaggagtgtgcagaggaagtggtaagtgatgtttttctagaagtatggaaacatcggaaaaaattaggaaaaatagagaatataaaagggtggctatatcgtattttatataacaaatcaatatcatttcttcgtaaagatagcgttgaatataccaatctgtcttttgatgaggttgaagactttacttttgagttagtcccatctcaagaagaaaagttaataggggaagaaaaattgtctattttaaatgcggctatcgcttctttaccatctaaaagtcgtcatgtgttatatttggtaaagatagaacgtctttcatatgcagaggtcgcagatttattgcatatttcagtgaaaactgtgagtaatcatttgacgtatgcaatgaaaaaattgatggaaaccttaaaagatgaagtggtattgtggctttttctacttccgtattttcaataaggagtgtgcaaaaaagcctggccagaggccaggctaaatgattaattagtatgcatatttataaattgataattccttttagaggtagttcagaggaagatgggcctactaaaatctcaaaatctcctttttctatgacaaaattctttttatcagtatcataaaaactaaaagcgtcttcattaagtagaattgttatacgtttcgtttcgcctttttttaagaacactttttcgtaaccttttagttcttttaggggacgagggacagaagctttacagtcttttacataaatctgtgcaacttctgctgcattcatttttcccgtgtttttaagttcaaaactcacttctacttggttcttttgtttttttctaagttgcaaattttcatacgtgaattgactgtatgataatccgaaaccaaatggataaagtggctgttttcctgtacggtcgtaacctctgtagcctacaaatatgccttcagcgtattgaactctcttgtgcggaacattacgcttgtcatagtagttgttgaatgtaggattgtcttcccatttttcttctatagaaataggtaatttcccacttggagatattttgcctgttagtatttctgctattgcttttccaccttcctgtcccggataccatgccataagaatagctttgactttatttctccagttgcggaagtctatgcctcctcctgaatttattactgttattacattattatgtacttttgttacttcatcaatgaggaactcctgaccgtatggcaaagcaaatggtctgtcaaatccttcagattctatattgctgtcaaatcctaagcacataactacgttgtctgcttttttcaattcataattcagcagttttttatccaacatacctgcctgaaatttgatagtagcttcacctacattctcaaaataatctatctgcaactggtaaagactgtctttttccacttgcatgaaggcgtttcttgagcttaaggcatgatttccccagtctcctgtaattgttttcccattgactaatattctgtatccgtcatctcctgaaatctggaagcgtatagttccgctttgttcagccttatagatacctttccattgagcagagaaatggtcatcctgaatgtctggatatggagaaccgtatttccaagcatagtttattcttgtggtagtttcctgatggcatggtttacctgataactttttgtctttaaaataatatcctgtaaatccttgtgttttcaggctgttgtcagtaaaaatatttttcgaaatatctttatacagtaaactgtctgataaaagagttattttcttatcaccttttatttgtgtcaaaccttcgtaaactgatacagttgaataaggagttacaaatccacttcctcctcctgtaggaatcatgtctgcatttggaccgataataagtgtatgtccttttttgagcggaagtacattatcatcattttttagcatgacaataccttctcttgctaaatttaatgcagttgcttttgattctgcgttatctttttctatagatttatcctctagcggattgtcaaatagaccaaatgttattaaggtttgcagtatatgctgtactttctcgtctatggtcttttcttttactattccattttcgataactggaatcagtttttcttttatcataaacttacctataggcatttccaaatcaagtcctccattggctgcgcctactgtagaatatacggaagtccaatcagacataagaatacctttgaatccccattgttttctaagtatttctatattcatccatgcattctcagttgcatgtactccgttgacggggttataactgtccattacggctccaacaccggcctcttgtacagctttacggaatgaggggaaataaatttcctgcaatgtacgttcgtcaacatcggagctggcgtgatgtctgctccattcttgattgttggctgcaaaatgtttaactgtagcaataactcctttatcctgtactccaaggatatattgcttggctgtttcactgcttagataagggtcttcaccgaaatactcaaaatttcgtccgcataaaggcgaacggtagatgtttacacctggacctaacaagatacttacacctcttgccttggcatctcttccaagtccgtttcctaattctcttaccaattctctgttccatgtagaggcagacaggataccggaaggatacattgtactttgagtgttgttgcgtattccttgaggaccatctgccattctgatttcaggaatacccaatcggggtattgctctgatatagaatgatcgaactccggagatgtaatcaattttctcctctagtgtcattttttctactaggctttttgcccttagctccgcttggggagtaattcttacttgtgctgtagttgagttcagagcacagcacagtaatagcaagcaacttgctttttgtttaatgttcatgttttaaggtttaagttattaataaaaaattgtccgatggcaaaaataatattaaaatatgagatgactatatttttttgttaaaagtgtatgaaatattttgtgtatctctactgttacttccaatcatgaaaataaatactccattttctactatgaagttcatgttattatcataaaatcctaaagctttttcatctattataaatgttacagttttggtctcactagatttaatgaatattttctggaatccttttaattcttttacgggacgggtgatactagcaaccttgtcttgtatataaagttatacaacttcttctccatctatagtcccagtattagtgatatctatttgtaaactaatagtattattagagttgtctgttattttaaggttgctatatttgaaatcagtatacgacaaaccaaatccgaatggataggcaggctctgttgatgagtcaatataagaagtacaataatgtacaccttcccgtgttggccttcctgtacttttatattggtaaaatattgggatttgtcctatattggtaggaaacgtcattggaagctttgcagaaggattatattttcccaaaagaacattgtatattgcatttccagcttcgctacctaaccaccatgtgcataaaatagcatttgaatgtttgcgtactttgttaaaaataacaggtctgccacacatcagtagagtaataacaggctttcctgtttttttaactcttttataagttgttgctgttcttctggtatttcaatgaagtgatttaaacttatgtatatcaattaaaatgttgtcaaacagcgtacaaatagaattattcattatattatgggtgac

SEQ ID NO: 3799 - DNA, 62901 bp, Unknown
  gut microbiota DNA sequence
ataagtatgtctgtccaatttctctattttgagacagcctctttttgttttccatcccctctcttcacgaagaagacatagaaatatcataaatttccccgtacgaatatgaaaacaaaccgtctgattctcttattattcatcctatttccagcctatgtattggccggcaatcgctttcaagaactatacaccaatatccatcagtttatctcacagcaaaaagctgaagtgggagtagccatcattgcagacggaaaagatactgtcaccatagagaacaaccgacgctacccgttgatgagcgtattcaaattacatcaggcactggctgtgggagattactgtaaaagacatcagctctcctttgataccttgcttaccgtagacagcacagacctgcagcccaatacttacagtccgctaagagaccggtaccctcacggaggaaagttttcacttaagcaattaatggaatacaccctccacttaagcgacaataatgcatgcgacatcctgttcaaatttaccggaggtcctgcggtgaccgaccgttatatccgtagtttgggaatcaacgatttttctatccaatacacagaagacgacatgcaccaggacctgaaccttggctatgaaaactggagcactccgctggctaccgcagaagtcatcgaggctctacttacccggactttattcgacaaacctcatcaggaattcatcaaagaagcccttgtcacctgtcagactggaacaagcagaatagtccaccctctacaagacaagcaggtcaccgtagggcataaaaccggtactggcgaccgcaacgcatcgggacaactcattgccattaacgatgccggatttgtacagttccctaatggtcaccgttataccctcgttgtttttgtcaaagactcacaggaaagcatggaggatacggaagccattatcgcacaaatttctgaaatggtttatcaggccttctctaacccctgataaactcctctcaccagctgacaagccgttttcaagtcaagagccccggtattcagcatcaaatcataccgatgaggttctccccatttctctcccgtatagtattcatagtgatgaatgcggttgcgattcacccgcttgatttccgtttcagcactttctttcgcaataccgtattcgctcacgcaacgggtcacagaatgagacaaatcggaataacagaacagtttcagcaccttcggatagtctttcaatacaaagtcggcacagcgtcccacaatgatacaagattcctttgcggccagttcctgaataatcttactttccgacacaaataatacatcgtctgaagaaaggctggattccaatggctgctcactattttttgaaagaatgcacttcaaccagaaggaaggaatggactgctcgtttttcacaatatactgttcatccatcccgctccgctgggctgccatacgtatgaattctttatcataaagtttgatgcccaattctttggaaagcatttcacccagcagatgccctccactgccatattcacgcgctatagtaataaccacatgttgcccttgtgaaaaatccggtacgttccgcacagaagcatctgtaatccatttatctaggaaacggtaatacggacttacaaaatgcacaatcggaccgactaccaaggcagaaatcacagttccttcacgcactccgtacacccccgacataaaagcaagtgataacaagcaagcaatagctaccaatgtcacgtcaaatccgagttttatataaccgaactctccgcgaaaccgacgggtaatgacctttacaaaatattctccggccatcatcgcggcattggcctttacctcaagtgcaattcctacagctaaaatcacacatccaatcaataaggccacaatcatatacacatattctacgggattgagccagaaaagaatataatgcatacaaaggtcaataaacataccaaagctgaaagagataggaatctgcagaagatacatgcgcaaatcagatttcaaatcttcacgtgtcattaagaacaattccagtatcacaaaaagaagattcaacaggatggtccactgaccaatggtaaagggagtgaacatactcaatacgtaagtcacactcgtaataggcgaagtacctaatgcagctttggtaatgaaggcaattcccagtgcattaacaaacaaagatacgcaaaacagcaggtagcgccggcacataaatttattcatacttgttctctttatcaaaagtgccgcaaagttcccttatttttttcattccttattcataaaaggaagactaattttggtcaaaaacgaaacaactcttaattttatccacaaaaataaatacgatgaatccgactctacttgaaatcatacaaacacatggcaacggaactgaaagcacatgctactgcgaacttacctcctcatcggttcctaccggaaaagccgaattgaaagaaggatttttctttcttctcgtcacaaacggaacagcccaactggcagatgaatatcagacttacgaacttcaacctgcacatttagttacacttacccccagcacaaaatgcatgattcaggctacgagttctcacttccagtccatgctcctctatctgaaaccaactttctttgatagcttacccgacggacagccactatatgaacaactggcacactacttgggacactatcagctaccggtattcttattggaaaacgaacaagctacttacctgcaaaaaatcttcgctctatttgcaccatgcagaaaaaatgcagtcaactattacgacagtattctgaaccacttatgcagtttctgtcttctacagatagctgatatattgactcaaacccgccatgaagttccggattatgcacgacgctccacagatattttcaggctattcaaaaaaacgttgatggaaaattatcgccagcaccatgacatagggttttatgcagaaagtctgcacatctcaaccacctacctttcgcgcatcgtaaaacacatcaccggacatacggtccgctttcacatcagcgaactgctctgtgccgacgcacgtaagttgttggaatgtacaaacctggatattaaagaaattgcagaaaagttaggattctctgaccagtctgtctttggcaaatttttcgtaaagaagacagggctttctcccatgaaattccgcacacagcgagaaagagacaaaaagaattatccttttcccgatgctgaaggttcgtaagtccatccacagtcattatgatataccatcagacggcttatacctccatcgaccgtaatattttctccattgataaatgaattgcgctcatcacaaagaaaatccaccacacgggcaatatcggcaggctctcccaccctgcctgacggatgctgggcggtatctcccgtactatagactgcttcataatgcgcttcttcatgataggcaccggtatcaatccatccgggagctaccgaatttacacgcgctatgcccgacaaactaacggccaaagcatgagtcagcgcagtaattcctcctttggctgccgtatagctctccgtatccggctgcgattgaaaagcacgcgtagacgaaatgtttacaatcgctcccatcccttgaaaatggtctttgaacaaccgggccagcatataaggtgccactactcccacacgctgcacatacagaaaatcttcatactcacagtcagaaaggatacctccccgcatcagacaagcattattaatcaagcaatgtatgccttccggatgttcacgaagcaccaaagctgcaaattcctctaatgcctgtttttctgccacatcgccgacaaatccggtcacctgccagcctctctcacgcatcttttccacttgtgtgagagtggcctgctgattctggtctataaaatatacactatccccctgagaagcaaaatgtgcgacgatgcaacgtccgatacctccagctccacctgtcactactataattctattcataatactgttgattcttgtttgtacctaaatttctctcttacaaaggtaaaaatttacagatgaatatctgtaagcttccatcaacaagcaacaacaaaaaaggcagacttcatcaaatcaatgaaatctgccctcttatatttatcaaaaatcttcctgagtcaagttctgccacagcaatcagccaatcacgacctctccatcggctgtggcctgatcttcccaggctccgatactgccagcggatacggtaataccgtcacgtcccactttcaaggtcagagtgcacgatttaccactttccaatgcagtctgcgggttacccgactgcttaaataaagcatccagagtaaaatgcttggtttcgccacctaaagtaagagtgaaagaaatcccatcggtcgcttggggcactagatagaacgaagcttttgcccccgttacagtaaggcttccttgttcatccttcacctccttcacacttcccttaacggcatctatcacacatgtggtttttgcagagaaagtgcatgacagcagagtcaaatcctcctccgtgtaaccatttcccggcacaaactctaaattaaggcggtgcaatgcatgacagaaagtaagtgccaccgtttcagaagtgccgacttctaccggctgagcagtggcaatcaacaaatcaccatagggagccttgaacgaattaaattcaaaagtgccatccttctccactttttgtgtgggataacaagctgaaaaagtgacttgtgatacctcttctgaaagtccaaaatcaggccatttaagaaaatcaagctcataagcataatcagtcactactggtgcagctcctcccgttacacaaagagtcatcttatctcctttctgaaaactgccgcttccatcacttcccaattgtggagcacgcgtttgagaggcaatactggcgacaatggaaattttaccagaattaccagacaagtcacccgagccactgccggatgtgtcttctgatgtatttcctgaagtatcaccattcacatttgccggtatatcgtttgtacaagatactgctgtcagcatagcagctatgaatgcataaagcacactttttttcatcatcattctttttatcatgattattatttaaagagtcaaagcatgaggcgtaaatagttttttacaaaaacaggaaacgcatttcatcaataaattatacgcaaaggaacatgatttgttcaatacagtctgttggtgattcaaaaccttaccatttattttcacctgttcacatatatatacaatctcatacctgcaacataagaacttcattttcattcttcccgaattattcgataattacaccgagatttcctatctttgcgattgattaatattaatgcacatttaattttttgacatggaaaataaatacatcacagtagcatataaactttatgcggtaacagacggagaaaaagaattacgtgaagaagcccctgcaagccatccgttccagttcatctcaggaatcggttatactttggaacgctttgaaaaggaaatcttagcactgaagaaaggtgacaaattcaactttacaattccttgtgcggaagcatacggcgaaagagacgaagacaacgtacgccaggtgcccaaatctatgttctgcggtccggatggaaaattcgatagcgacaatatcttcgaaggcaacatcatcatgctgaacgatgcagaaggccatcagttctatgccaacgttggcgaaatcacagaagataaagtggtgctcgacctgaaccacccgcatgctggtaaagacctgatttttgaaggtaccgtaatggaaatgcgcgatgcaaccaacaaggaaatggaaagcatcctcaaactgatgagcggtgaaggctgcggatgcggttgcgacagctgtggaggcggttgcggcgaacacgaagctgaagaagacggctgctgcggtggcggttgcggacactgtcattcataatctaatttttacttaaccataaaaagaagacggcatgttccgtcttctttctttttctacctttctaattctgtttttcacatgattctcatagccgatagcggagcgaccaaaaccgactggtgcttcggaaacacgttacacgattgccaggttgttcacaccgaaggtatcaacccttttcatctgacagaagagaaaataaaacagcttcttcaggaaagcctgcttgcacaactgccttttccacaagaagaagtgaaagccattttcttttatggggctggctgtacccctgaaaaagccggcaatctctccggtttactcgccgaagcattccctcacgcaaccatccaggtggaaggtgatttgcttggagctgcccgtgcattgtgcaagcatcagccgggaattgcctgcatattaggaacaggggcgaactcctgcttgtacgatggtcaacgaatcacgcataacactcctccattaggctatattttaggagatgaaggaagcggagcctatttaggaaaacgatttataggcgactgcatcaagcagcagttaccttccggcttgctggaaggcttattgaaggaatataacctgaccgtagcagagattttagataaagtgtacagacagccgcagggtaaccgttttttggccagtcttacaccttatatatataagcacaagaaccagccggaagtccagcagttcctgaccgactgcttcagcgatttcttccgccgcaacatactttcttatccgggacatgcccaggttccggtctcttttgtaggttccattgcatggttcttccaacatgagctaaaggaaacagccctaaaattcaaccttcatacgggcattttcattcagtctcccatacaagaattgaagggttttcacctccctgaaaaaacgctttgacgtttactgtcaaacgcaagtacattctcattcaaacgcctttgtgtttcacttaaaacgcaaaggcgtttgagttaaaacgtaaaagagtttttcaatctataataaagacagggaaaattcattggaaaatccaataaatttcaataccttgcactcagattccgaatatctaactataaataaaaatcatcatgaagaactttagaatcgaagccattattctggccatcggcctactgctattaggcgtattcatcgaaaaaggattcagtaagtttgcagaaaaagaccgcagtgtcaccgtaaaaggcctggccgaaatagaagtcccagccaataaagtaacctggccactagtgtacaaaagcctgggaaatgatttgggaagattgtacgacgacatcaagcgttccaatcagaccatcaccggtttcttgaaagaaaaaggactgacagaacaggaaatcagcgtgaatgccccggaaatcatcgacctggctgccgaacgttatggcaacaaccagaatccggccaaccgctacaatgtgactacagtcatcaccgttacttccgacaaggtagatttgatacggggacttatcagtgagcagggagaactgctaaaaagaggcatcgccatcacttctggagaataccagtacaaagtacagtatgaatatactgatttaaacaaggtaaaaccacagatgattgaagaagccaccaaaaacgcacgcgaagcagccgaaaagtttgccaaagactccggcagtaacctcggcaaaatccgtcaggccaatcaggggcagttcagcattaccgaccgcgacccgaataccccttatatcaagaagatacgcgtagtcaccaccatagactattcgcttgaaaactaacagaaaatccaaaaaacttataaaaaaccggaaaaacctcccatatggagcctttttccggtttttctatttttcttcctcctaaaaaatgcaggcaagccttttaatattcaggattttattatacctttgcagccgatttatataaacaatataaagtctaacacaattagttatttaaaaacaatttttttatttaatggaaaacttaaagaacattgctcctattgaagatttcaactgggatgcgtatgaaaatggtgatgcagtaaccagcgtaagcaaagaagatcttgaaaaagcttatgacagcacgctgaacaaagtaaacgaccgtgaggttgtagacggtactgtaatcgcaatgaacaaacgcgaagtggttgttaacatcggttacaaatcagatggtatcattccattgagcgaattccgttacaatccggatttgaaagtaggtgacactgtagaagtgtacatcgaaaaccaggaagacaaaaaaggtcagttgatcttgtctcacaagaaagctcgcgctactcgttcttgggatcgtgttaacgctgctcttgaaaacgaagaaatcattaagggttacatcaagtgccgcactaagggtggtatgatcgttgacgtattcggtattgaagcattcttgccgggttctcagattgatgtgaaacctatccgtgactacgatgtattcgtaggtaagactatggaattcaaggttgttaaaatcaaccaggaattcaagaacgtggttgtttctcacaaggctcttatcgaagctgaactggaacagcagaagaaagaaatcatcagcaaacttgaaaaaggtcaggtactggaaggtactgttaagaatatcacatcttacggtgtattcatcgacttgggcggcgtagacggtttgatccacatcacagacttgtcttggggccgtgtaagcgatcctcgcgaagttgtttctttggatcagaagttgaacgttgttatcttggacttcgacgacgaaaagaaacgtatcgctcttggtttgaaacagttgactccgcacccatgggatgcactggatcctaacttgaaggttggtgatcacgtgaagggtaaagtagtcgttatggctgactatggtgcattcatcgaaatcgctccgggcgtagaaggtttgattcacgtatcagaaatgtcttggtcacagcacctgcgttctgctcaggacttcatgaaagtgggcgacgaagtagaagctgttatcttgactctggaccgcgaagaacgcaagatgtctttgggtatcaaacagctgaaagcagatccatgggaaactatcgaagaaaaatatcctgtaggttctaagcacgttgctaaagttcgcaacttcactaacttcggtgtattcgtagaaatcgaagaaggtgttgacggattgatccacatctctgacttgtcttggactaagaagatcaaacatccttctgaattcactcagattggtgcagacatcgacgtagtagttttggaaatcgacaaggaaaaccgtcgtctgagcttgggtcacaagcagttggaagacaatccttgggatgtattcgaaacagtattcactgtaggttctgttcacgaaggaactatcatcgaaatgctggataagggtgccgttgtagcattgccttatggtgtagaaggtttcgcaactccgaaacacctggtaaaagaagacggttctcaggctcagttggatgaaaaattgccgttcaaggtaatcgaattcaacaaggatgcaaaacgtatcatcgtttctcacagccgtatcttcgaagatgctgctaaggcagaagaaaaggcagaaaagaaagcttctaagaaggcttctaagaaagaagaaactccgatgattcagaaccaggcagcttcaactactctgggtgacatcgatgctttggctgcattgaaagaacagctggaaggtaagaaataattctttctaaataaaactcaaaaagggattgtacacttgtacagtcctttttttttatcctatatttgcaacgtcaaataacttaaaaaccaaaaaacaatgatcagactaaacgtatttattcaagtagagaaacagaactacgaccaagtagtaagcatagcaaaagatctggtagctgcttcacagaaagataacggatgcgtagcttacgacctctttcagagcactacacgccaggatgtcctgatgatttgtgaaacatggaaagatgcggcttctcttgcagcacacgaacaagctgcacatttcaccaccctggttccaaagattcaggaattagccgctatgaaactggagaaatttgaattctaacaagaactcaagaacccgtatgatacgaaaaaatcccacctgacttctaaaagtcccggtgggattttttcataaagaagtgaatcttcttcacttctataaagaataatgaacgaacaaatcaaagtttaattaccattccacgaacttgccgagagccttacgttctttcaaaagctctgccagacgcttattctttgaagaagcaatgaaacgacgtccgaagatgttcggaatagcaactcccaaagcaatacacataatcacaagtccggaatttacaccgctttctattgctttcatcagaggagttacttgatcaatgctctgcacattaatattgatgataccgaacaacatacgatacatcagtactcccggaatcatcgggatgacagaaggaatagtcagcacatggttgggcacgtggaaccagtgaactgccttaatggcaatcaagctaaccagtacagctcctgagaaagaaccaataaccagtcccatatccaaaccgatattgtctgtgctcggtcctaagttcacaaagttacgcgtacatacggcaataatacctccgatagctactacccacaacaaacgacgctgtatattgaaaatcatcgagaatcccatggctgaaatagctgcagcgatggcatactcccaatactgatgatgaggaaccatactgatggtcgggaagaagttctcaatacggcaaagtttcacggcaaatgcgataccgaaagccatggcagccaccatcagcaaggtattcaccgctctgacaatacctacctgaatataattatccagcatatcgtccacaaagttaatcaaaggaaccccaggcacaataaacaaggcacaggcaagcaacggatgccaaggagtagatgtccattctgcaggcaacagagtagatgcccacgcaatgatggtagccacaaaggcagaaatagcgattcccatgtaatgattcaaaccagactcattgcatacctgacgcaagcgcatacccaatatggcagcaattgatgcatacaagaatgccacccagtcacaaccgaactgaatacagaatccgccacaggcaaacccggcacctatcgccacctgccacggagtgtaattacgttttttcttacgaatcttttccagttcttcttcatactggtcgagcgtgtaatcattttcaatcgcacgccaggaaagcttgctgacttccgaaatggccgtcatattcactccatgaccttcaattcgctggaatttagtaaaagaatagtcaccatcactcacgttcaccatcaacatggtaaaactgacgttgatgtgaagcttctcttcggggataccaagataagcagccgtacgtttcatgtttcttacaatacggttcgtatcggcaagactctctaccaataattttcccgtacgcaacaataaatccactctacgatgcaattgctgatcgtgagcctttacagttgtctctaaatgttcctctaatatcattttgtttaaagattattttgagcgcaaagttacgaaaaatatcaattctattcgtacctttgcaaaccgaagttctatataaaatatgaataaactttcacggatagaagaagaaaaacagaccatagaacaaatgattcacttttattgccgacataaggagaaaaatcaggccttatgttctgcatgcagcgaattgcttaaatatgcacatcaaagactggagcactgtccgtttggagaacgaaagaagacgtgccgccaatgtaccgtgcactgttaccaccccaaaatgagacaaaaaataaaagaagtcatgcgttttgctggtcctcgaatgatatggtatcatcccatctggaccttcagacatttgtggagggaacgatgaccacagtcagattgtggaatttttctacaataacttgtaaaattccacaatacatttttattaattcaaagttaaatctccctgattttcagctcataaaacatttttgtatctttggcacaaatcttgtcagccattttaaagataatggcatctaaaactataaaagaattgaacttatgaaacgctttttgactaggaaagaattaaaggtaaaaagaaaagaaatgatttacatggttatcggcatcgcagtcattttatccctttactatatctttactcgagagaagaaacccgtagccgaaacaccgattgtgtcagttatgccagctagccaacaaaatgtacaaattttcggtgaatatgtaggacgtatccgtgcccagcaattcgtggaagtgcgtgcacgtgtagaaggttttctggaacaaatgcttttcgaggaaggaacctcagtcaaacgtaatcaagtattgtttgttatcaatcaagaccaatatcgtgccaaggctgacaaggtacgtgctcagttgaaaaaagatcaggcacaggcgcaaaaagcgaaacgtgacctggaacgtatccgcccgctgtatgaacaaaatgcagccagccagctggacttggacaatgcggtggctgcttacgaaacagctgtagccagcgtaggtatgagccaggccgacttggaacaggctgaacaggaattaggctacacgattgtccgctcgccgatttcaggagaaatcagtgaacgtcacgtcgacttgggaacactggtaggcagcaatggaaaatcgctgctggctactatcgtaaaaagtgataccattctggtggatttcagcatgacagccctggactacttaaaaagcaaggagcgaaacgtgacattcggtcagaaagactctacccgctcctggcagcctaccgtaaccattacattgcctgataattctatatacgagcacaaaggtctggtagactttgcagctcctcaggtaaaccctaaaactggaacattctccgtacgtgccgaactggctaacccagaccacgtattgctgccgggacaattcaccaaggttaaagtgttgctcgacgtacgtgaaaatgccacagtcgttccccaaaaagctcttatcattgaaaaaggaggagctcatatctttgtcatgcgaaaagactcaaccgtggaaagacgattcattgagttaggccctgaattcgagaacgatgtcgtagtagaacgcggattatcagccggcgaaatgattgtctacgaaggattccacaaactggctccgggaatgaaagtccgcgtacaagatccggcaaaattacagagcgaagcgaaaaaagaggaagaataactcacccctaaacaaatttacgcatgaaagtcagcttttttattgacaggcctgtattctcggctgtcatctctatattaatcgtgattgtaggtatcatcggtttgatgatgctgcctatcgaccaatacccgcaaattactccgcctgtggtaaaaatcagtgcctcctatccgggagccagtgccgtaacggtatcgcaggctgtagctactcctatcgaacaggaattgaacggaacaccaggtatgctttacatggaatccagcagttccaactcaggaggattctctgccactgtgactttcgatatctctgccgaccctgacttggcggcggtagaaatccagaaccgtatcaaactggcggaatctcgtctgccggcggaagtaattcagaatggtatctctgtagaaaaacaggcacccagtcagctgatgacactgtgtttgacttcggatgatccgaaattcgatgaaatttatttgagtaactttgctacattaaatgtactcgacttgcttcgccgtatcccgggagtaggacgaatctctaatatcggaagccgctattacgccatgcagatttgggcagaccctgccaagctggccaatttcggattgacggtgcaagaccttcaaaacgctttgaaagaccagaaccgtgaatcggcagccggtgtactcgggcagcaacctgtgagcggcattgacattacagtccctattaccgcacaaggacgtttatcgtcagcctcccagtttgaagaaattgtattgcgtgctaaccccgacggttcactcgtgcgtctgcgcgatgtggccagagtatcactggaagcttcttcctatagcacggaaagtggtatcaacggaggaaatgcagccattcttggaatctacatgcttcctggagccaacgctatggaagtggcgcagaacgtcaaagaggccatgaaggaaatcagcaaaagtttcccggaaggactggaatacaacttcccgttcgacatgactacttatatctcgcagtctattcatgaggtatacaagactttgtttgaagcattggtgctggtaatcattgtggtattcctttcactgcagagctggcgtgccacacttattccggtcgtagctgtccccatctctttgattggtacattcggcttcatgctgatattcggcttctcgctcaacatgctgaccttgttagggctggtactggccattggtattgtagtagatgatgccatagtcgtggtggaaaatgtggaacgcatcatggaagaagaaaaactcagcccatacgaagctaccaagaaagccatggaaggtctggtaggcgctattattgctacctcacttgtgttggcggcagtattcgttcccgtaagttttctgtcgggtatcaccggacagctttatcgccagtttactattaccatcgtagtatctgtgcttctgtctacggttgtggcgctgaccttgagtccggtaatgtgttcactcatcctgaaaccagttgatccgaacaaacccaagaacaaggtgttcagactaattaatgaatggctggctatcggaaacaataaatacattatttatatcaagcatgttgtcaaacacccgcgccgtataatggcaggctttggaatggtattggttttcatctatgtattccatcgccttgttccgaccagcttccttccgatagaagaccagggatatttcaccgtggaactggaacttccggaaacagccactttggaaagaacacgtgtcataactgacagagcaatcgacttcatcatgaaagacccggcagtggaatacgtacagaatgtaacaggtagcagtccacgtgtaggtaccagccaggccagaagccagttgaccgtcatcctgaaagaatggaaggaacgtgacaacacaaccattgacgaagtaatggaccgcatacagaaagagctggaaaaatacccggaaagtaaagtgtatctttctactcctccggtaattcccggacttggtactgccggtggttttgaaatgcagctggaagcccgtggcgatgcaacgtatgacgatttggtaagagctacggacacactgatgtattacgcttcacaacggaaagaaatagcaggattgtcttcttctctccaggctgaaattccccagttgtatttcgatgtagaccgggataaagtcaaactggcgggtgtaccaatggccgacgtattctctaccatgaaggcctacacaggttctgtttatgtgaatgactttaacatgttcaaccgtatctaccgtgtatacattcaggcagaagctccgtatcgtcagcaacgcgacaatatcggtctgttctttgtaagaggatctgatggtgacatgattccgctgacagcccttggaactactgattatacaaccggaccgggaagtatcagacgctttaacatgtttaatacagccgttatccgaggaaccacagccaatggagcaagttccggtcaggtaatggaaacgctggaacagattgcacgcgaaaaattacccgacaatatcggtgttgaatggagcggtctgtcctatcaggaaaagaaagccggcggacaaaccggactcatcctggcgctggtattcctgttcgtcttcctgttcctggcagccctttatgaaagctggacagtgcctatcgccgtattgatttcacttccggtagccgttttaggagcgtatgcgggtattaccctctgcggtttggaaaatgacacctattttcagattggtctggtaatgcttatcggtcttgccgcgaagaacgccattttgattgtggaattcgccaaagacgaagtcgataaaggacgtgatatcgtagaatctgctcttcatgcagccagcctgcgtttccgccccatcttgatgacctcactggccttcatcctgggtatgcttccaatggtgattgctacaggtccggggtcagccagccgacaagccatcggtaccggtgtattcttcggaatgatagtggctgttaccgtaggtatcctgctcgtgccgttcttctttgtaatgatttacaaagctacccacaaaattaaagcgaaacagtaaaccttacagatgtagcttatgaaactgaaaaatcaactatataaaattttggtgattcccgtagcagccctcctgatgggaggctgcaaaatcgggaaacaatacacccgtcctcaaatagatttgccctctaccctcgacagcacaagtgtagatactgcatctattggtgactatccctgggaacagctttatacggacactatccttcagcaacttatccaaaagaccttggacaacaacaaggacatgctgattgcagcagcaaaagtcaaggaactggctgccatgaaacgtattgattatgccaacctctttcctcaagtcggacttaagttctatgcagaacaagaaggcgaagaccacggaggcggacactataaatcagacgaccagtatgatataaaactgggggttacatgggaaatcgacctgtggggaaacctgcgctgggccaaagataaaagtatggccgagtttatgggttccattgagaatcagcgggccttgaaaatgagtctggtggcacaagtggcacaatcctactttgaactggtggctctcgacaacgaactgtctatcgtgaaaaagacagtagatgcccgccgggaaagtctgcacctggcacgtatccgctacgaaggaggattgacttcagaaacggccttccgtcaagcacaggtggaattggcaagaacagccactttggttcccgatttggaaaagaagattacattgaaacaaaacgaaatagccttcttagctggagaatatcctcacgacataaaaagaacagtcctgcctgaagatgtaattcatgcagcttccttacccgtgggactcccctcttccttgctggagcgtcggccggatgtacgtcaggctgaacaggccgtcattgctgccaatgcagccgtaggaattgcttataccaatatgtttcccaaactgacactaacagccagccatggttcagaaaatgaagagctttctcatctgttcaaatcgccccattacctattggcgggaaccattcttcagcctattttcgccatgggaaaaaaccgggccatgctgaaagcaaagaaagctgcctgtgaacaagctgcctacgcatacgagaaagtggtactgaacgctttcaaggatgcgtacaatgccatagcagaatataataaggtaaaagaaatctatgaaacccgcttgcgactggagcagtcttcgaaaattacacttgatttggctcagctgcaatatatcaacggagtaattggttacatggatttgctggacgcacagcgaggttatctggatgcccaaatcggattgagcaatgctgtacgtgacaaacagattacaatggttaatttatacaaggccttaggaggaggctggcaataatcctcccataaaaaaacgcggaaactgatatatcaaaccaatctagtttccgcgttttttgtatattatacagattctacgccatataccttacggtaaatttcatcccgtatagattcaaattctttgtctatcgtttctgttcctgcatacatcaggaacatgggaagtgtttctcctccctttcggtacgaaggctgtacatactctttttcgcataaactgaatccgcaccgctgataaaaaccgatacgccggcgactccattcgtccaccggtttctccacttccagaataatgactcccgggaattgctgctgaaggacttccatgattttccgtccataccctttattgcgcacagatggagaagtagccagatgctccacataagaaaagccggcaaacttccacactgtaataagtccgaccagaagttcatcatctgaaatcaagtagcaggtaaaagttgcacagttatccacattatctcgttgtgctacatcatctctccgctccgcttcagggaaagactcatgtaacaggttttctacaaaagaatagtctttgtctgtggtttgaagtggtgtaaattgaagcataacccatagatttagaaattattactctgtataaaaacgaatcgtccgttccaaggagcgctggcatacgggacagaataccggtgcctcattgattctcatccggcattccgtagtcgggcgataaattccctttttagtgtaaccagctccttcatataccccgacttttgtgtaaatcagtttttcatcggcctgaggttttgtcggcacaggagttccctgttccagcatatccttccatttatcttcaaaatgaaccaaagtcgtaatattcggttcccaaggctctatgtcataaggatacaacggactgggagcctcatcatacgcatattcatcggccaaccctccaaaactatgcccaaactcatgtaccacgactggtctgaacatagagtgatgtgccgtagtcaatgtgtaggagttgtaaatacctcctcctccgtaggtatccgtattggcaaggataatgatatgctcgtatggaatacctgccagccagttatgaatggccttcacgctacgggtggtcagataacggtcggaataaaacgtatcaaaatgcgaacttacggctgtttttttccattcatcctttcggggaatacttaccccgctatcttttgactcactaaatacagccacaatattgaagcggtctttcagtttcttaaacggttcatgcgcaaacaaagcttcacacgccaccgccgcatctttgtaaaacaaatccgcttcattagctgcatagccttctgccataatggccacgtcaatgcatttatccgaagaacctccttgccacagataacgatgcggtgtcaactctccttcccctctttgatgaatcagaatatcggaaggattaacctcatgtaccagcgtggcattcacttcgcgtgaggcgttccgcaaaacaacggtgatttctgccggctgcttgggataaggcatcaaaaatgtattttcaaatccacgtttcaccaccttggcttcctgttctccaatccattcctgaaacaagctggagaaggatgtacggtagataatcttcccggtagccttatccttcatggttatctctccatttccctccaacggaagttccgacaaatgatggcgtcttcctgcccactgcggaagaaccgacaattcatccagacaaatgtcctgcttgtctgcatttcccataaatatataatccagacgaagcgtcttgtctacaaaataatcttcaaaagtctgcgcaaaggtactgctgccaagtgacaggcccaatgctaaaattaatgctgctcttttcatacgttcttttattttcccacaaaaataacgaaatgtcttgtttccacacaatccgcagtctaaaaagcatttcaatgcatcattctttcataaaatcagtactgttcataaagtccagtacttccacgaaagtactacagtactgcaaagaaagtactccagtactttcaggaaagtactgcaatactgcaagggaagtactgaccttatgacttttcctgatataattagacgttttttctttttataaactggaacagtaaacattttgcatacatgaaaacactttgaacaacacataaaaaaagcggcgcctccaccaagagacaccgccatcccaatatttatcatcaattaattaaagaactttattccaataaagtatgtacgcggctgtgttgggccatagaaatacttggagtcacgattcatacctttatccaaatccttctggaaggcattaaagatattctgcacacctccattgacctgcaacttcaaatggtcattcagcacaaaggtgtaattcagcttcaagttgaaatccataaagtcaggggtatgttccaagcggtccttctcgatgtatccggcaaagtgaggaacaatcatgcgtcccgtatatacgccggaaagagaaaagtcaaagttcttcaacggggccgaactgaacgtaaagtatccatagtagtccggcgtacgcggcatgcgtttgatagctgctacatcttcatcttcgctccatctcaccgcttccgtgtaacggctgcgctgtaccgtaaaacctaactgcaactgtgcttcctttccatgggctatcttgtaatcgatattggctccatacacccgtgcaccgtttccgtttctgcgttcctgcaccaatgtgcccgatacagggtcctttcctaaactctccagatagaatacatcgttcaacgccgtatagaaaccttcaatcagcaagttcgactggaaatgtccgaaattgaaactccagtctacagagccactgaaactattggagcgttccggtttcaatccttctgccagtcgcacttccatagcctcacctcctacggccgccacatgcaaatcctcatcgtatgcctgaggtgcacggaaacccgtcgaccaggtcagacgtccctggaatctatcagaaggtttccagagagtattgatacgcggactgaaaatcacgttatccaccaaattgtgtttatccaagcggaacccagccaatatcgtgaaataatccagtttccattcattctgcacaaatccgctggcaatcttcacatcctgtctcaagtcacgtccgtaacctgtcatcacatcatgcaaggagttatactgatattccactccaccggtaaaggtagccggagaaaagagacagttgtccatgtttcctacatacatagcaccacctacagcagtcaagtctttggtttttccgtatgcattctccgccttgtctgccccgtaatagctgttacggtcggtgtgctgagccgaagcatatacagaaagcttgtgcttgtactcattgaaaaaaacatcatacgtcagccccccactgttaatgatatgcttggtctgttccgtaatatccgtttcgtgaggctgcaagtcaaacttgtttcctccgcgacggaactcgttggtggtatgatactccagactgatacggctgaactgtgtcggacggtaatatgcccgcagtccgaatgtattcatattcagtttacccaattcagagaatccgtctccatccgcatcatacggattacggttgcgataagactgatacagcgcgatgccatacgaattgtcggacgaaaccagtgaggcattggctcccatatactgttcccacacctttccgttcaagttcgacatggtagaagccacctgaaatgaattacgaacggggtctttggtaatgatgttaatggtaccccccacggcattggctccaaataaggcagaaccacctccgcgaaccacttccacgcgctcaatcatattggttggaatctgttccagtccatacacgcccgaaagcgcactcattaccggacgactgttaatcaggatttgtgaataaggtccctccaatccattaatacgcacctgagggaaaccacagttctggcaattgttttccacgcgcaatcccgactgatagttcagcgatttagccaaatcggtggaattgacaatttcaaacaacttgttgctcattacattcaccaccacaggcgctaccttacggctggtttcattccggttggccgatactactacctcatccgtcatgatactttcttcctccataacaaaatgcatgtcgaccacaaagtctttgctcaccgtcaccttctttacctgagtggtatatcccattatctgcaccttcaaggtatattctcctgccggaagctttttaaaacggaaatatcctccggcatccgtcaccgtaccttctcctgtttccaccaacaacacggtagcataaggcaatcctgcttccgaacctttctcaattacgtgtcccacaatggcatttccttcttttacgggaccatcagcgtatgcaatagtacagctgacaagagcgcataccactcccatcagcaaattgatatattttttcattatttgctcctaaaaaattaatactatgttcttcaaattcccaataagaacgatagtacaggaggagcacgaaggtacatcccttccgtacaacaacatacggcatggaatgtattctttatataaggtaatgaatagagcaggtgcaaatcgggagtctctacttccgtatgcccaggctccaatgaagaaaaagtcgacagaaaatgcagcgccaatgtctgcccgtcactatgagagtgagaatgcgagaagggatgcgagtgcacaagcatcaccccgtttaccacatgcacgtgggtaaacagggcagtcgtggcataatatgcggcaaacagagtggccagacacaatgcccatactcgtatatgtttgcggaaccctttacacattttccgtcttcctacgtattttattcgttatctttgtttccaaacaaaagttcataatcacgctttgcagctggtacagtccattcttcaggaataaacttccactggttcagcggagccggattcagtactttaacctcctcaatccgtttcatcaggtaatagcgcaaatccttatccgttgaaaagacaatacgctttgccagttctgctttgggaatacctgctcccttggtcagcaagtctcctcctccatttccacgataggaattgacggctacccgatattgcttgtccatctcgaacggcttgccgtcggccatccgttcaatcgtaattctctttccgtatggtttggtcacatccaccgtatagatgatacccgccgcagaatcaaaattgaagctgggattacggaaacgaccgaaaccgttgtctttttcgttcagcaacagcaggtgctcatcgggtgaagtcatctggttcacccaaaggtcatacgacatttccagaaaatcctttacttcctttccggtcaacaccatcgtgtagagcatgttctcaaacttatataagttgaacatatcgctcatacgaatgtctccttctttaatctcagcataagccgacaaaggcgcacagaaagaaatatcagctccggtaatatccagttgcaactgatgaatcaaatcaataaaagcagacgggccaaagaacgcatccttggaagaaattgtacgttccatccgtccgattttccgggacacaaaagcctgcgtcgcctcatactgtttctggaaagtatgcataaaatccttatctacggcatagtcatccatgttcaccagctttccatctacttgcttcgaaacaatctttccattctgtttcttcaccgttacggtcacttccgataccacttttgccgtattggccggatcaattaccagcacagaatcgcccgatgcattggcaactctttcattccagcgggtatggtcatgtcccataaaaacaacatcgaaccctggcacattggcagccacgcctttcgagccgttttctaccacattgtccagtttctttccatccattcctgaatgaaacaatccaatcaaaatatccggttgttctttttcacgaatttccttcacccatttcgccgcacatgcttccatgtcctcaaaacgaagtccggcccataactgctcaggcaaccaggatggtaccgccggcgtaatcattcctaacacaaccaccttcactccgttccgttccaatacctcataaggtttcagataaggctttcctgttttcacatccacgatattggccccaagtatagggaagtcacactggcctacccaacggtcgtacaccgcatgtcctgtctccacatcatgattgcccatattgcccacatcatagcgcatatagttcagcatagcggcacatacatgtacggaagcagtatccatataattgtagtaataagccacaggctgtccctgcagaatatcaccgttgtccatcaaaataagattgtcgccatacacctcacgttcttccttcacgtacgaagaaacgcgggccagacttcctctcatctgtttgttctgtataaaatcataggggaagtagcatccgtgcacgtcgctcgtctctacaaatttcaatgtgatggtttcctcattattcgaggctttcaaatgcccttgacccataccgagtaatgtaatcaggctgattaaaaaataaaatcgtctagtcatcatttttgcagacttttatataagtttttgcaaagatacgagaagttgccgacattcccgcagaatacttcctaaaatacccaaatacgaaaggtttcacaaccgtttttttatgccattttttcactacttttgcaaccaaataatataaagcccctatcaatggaagaattcagccagatgattgccgccgaactgaaactgccggcacatcgcatagccaatacactcaaactgctccagggaggagctaccattcctttcatcagccgttaccgtaaagaagctaccggcggactggatgaagtgcagataggcgacactcagacacggtatgagaaactgtgtgaattgtccaaacgaaaggaaaccgtactttccaccatcgaggagcaagggaaactggctccagagctgaaagcccgcatttctgcctgctggaatgcaaccgaactggaagacatttaccttcccttcaagcctaaacgaaaaacccgagccgaggctgcacgtgccaaaggactggaaccgctggccctcttgctcatgatgcaaaaggaaaacaaccttgctgccaaggtacggaacttcgtcaaaggagaagtcaaagacgaggaagatgcactgaaaggagcacgcgatattctggctgaacaaatcagcgaagacgagcggtcacgcaacctgatgcgcaaccagttccagcgccaggccctcattcagtcaaaagtggtcaaaggaaaagaagcagaagaagcttcggccaagtaccgcgactattttgatttctgcgagcccttgaagaaatgttcttcccaccgcctgctggcccttcgccggggagaatcggaaggtgtcttgaaagtaaccattttcccggaagatgaagatatgtgcaacgaatgcctgcaaaggctgttcgtacgggcaaacaacgaatgtgcacaccaagtggaagaggccctcaccgatgcctacaagcgcttgctgaaacctgccattgaaaccgagtttgccgcactcagcaaggagaaggccgatgaagaagccattcgggtattcgcagaaaacctccgtcagttgttgctggcccctcctttggggcagaaacgggtgatgggtatcgaccctggattccgtacgggatgcaaagtggtctgcctggatgcacaaggtacccttctgcataacgaggccatttacccccacccgcccaaatctgaatatgcacaggcagcccgaaagattgtgaagttagtggaacaatataaaatcgaggccattgccatcggaaacggaacggccagccgtgaaacagaacaatttgtaaccagtcagcgttacgaccgtgaagtacaggttttcgtggtcagcgaagatggagcgtctatttactcagcctctaaaactgcccgcgaagagtttccggattacgacgtgacagtacgtggtgccgtatctatcggcagaagactgatggacccactggcagaactggtgaagattgacgccaaatccatcggtgtgggacaataccagcacgacgtggaccagaccaagctgaaggcttcactcgaccagaccgtagaaagttgtgtcaacctggtgggcgtgaatgtcaacaccgccagcaagcacctgctgacctacgtttccggattaggtccgacactggcacagaacattgtggactaccgtactgaaaacggtccgtttgagtcacgccgccaattattgaaggtgccgagaatgggggccaaagcctacgaacagtgcgccggattcctccgcattccgcaagccaagaatccgctggacaattctgcggttcacccggaaagctacccgattgtagaacagatggcaaaagatttgaactgtacggtagccgacttgattaaagacaaagagctccgcagtaaaatcgatttaaagaaatacgtgaccgatacggtcggtttacccaccctgacggatattcttcaggagctggacaaacccggaagagaccctcgccagaaaatacaggtatttgagtttgacaagaacgtacgtactctagacgacctgcaggaaggaatggaactgcccggcatcgtgaccaacattaccaactttggctgctttgtcgacatcggtatcaaggaaaacggactggtgcacgtatcgcaactggccgaccgttttgtcagcaatccggccgacgtggtacgcatccaccagcatgtacgtgtcaaagttatgagcattgaccacgatcggaaacgtattcagctcaccatgaaaggattgaacaactaaattgacagataacaatgaaacaagatgaaaaggagctgtgcggctggtttattttctgccccaaacagcagctccttctggttaaagacggagacaggttccacatcccatattccgtggaacctcccgtacagcttcctgctgatacgcccatacataccgtcggggaaattctgggccatccggcaaaagcatgtgcccttccgctggaagcactaacaggacagaacacctcatttattccgacagacctgcgtgcttcgtacgatgtactgccactggaagaataccaatgcgcaggtaaagcctctcaaatactgacatgggacaagaacagccgcttttgtccggcttgcggcacccctaccacacagacgggccccatcaccaaacgatgccctcactgcggacaggaaatctatccgcgcatttctcctgctgttatcgttttaataaagaaaggggatagtgtattactggtacacgcacgcaacttccggggcagtttcaaaggactggtagccggcttcctggagcctggggaaacactggaagaatgcgttcaccgcgaagtgatggaagagaccggtatccgtatcaaaaacctgaagtatttcggaagccagccctggccttatccaagcggtatcatggtgggatactatgcggaatacgaaagcggaaccatcaaattacaggatgaagaactgagtgccggagcattctaccaccgcgaccacctgccggaaatccccaagaaactaagtattgcgcgaaagttgattgacgcatggttaaacaacgagatatgaaaaaagcagtatcatttcttatccgactttttcaacagcttctgagccggataaccaaattcgggaaacagtgcataagctggtatgtacatactttccgtaaattgccatggtacgggcgtaccggaatgggaatcctcaccggcattggcatgctcatcgtcttactggtcatgattgacctcaatttcttgtggctgttcggaaaatcaccgagcatgttcaacatcaaagagcctatacagcacatcgcctccgagatttacagtgccgacggaaaactgattggaaaattctattcagaaaaccgtacaccggtggaatacaaggatatttctccgatactggtcaagacgctggtctgcacggaggacgaacgcttttacaagcatttcggtatcgactttgaaggagtatttgctgctgccaaagactacgtagctcacggaacggcacgtggagccagtaccatcactcagcagctggtcaaaaacctgttcaaagtacgttcacaatactctaccggactcttaggacatatccccggagtaaaactgctgattatgaaggccaaggaatgggttacagcggtcaagattgaaatgctgtacagcaaggaagaaattctgaccatgtatttcaacacggtagacttcggaagcaacgcattcggtatcaagacggcctgtcatacctattttaatacaactcccgataaaattaccgtagaacaggctgccacacttatcggcctgctgaaggctactacctattataatcctaaaatcaacccaaagaatagtctttcacgacgaaatgtggtattgggaaagctctatgaacaccatgtgctgaacaagcatcagctggactccatccggaaacttcccaccattctgaaattcaagcaggagaattattacactggtccggcactctatttccgcgaagccatagccaatgaactgaaggaatggtgcaaggaaaataatacagacctctatggcgacggactgaaaatttataccacactcgacagccggttgcagcaatatgccgaagaagctgtcaaccgtcagatgcgtgaagtacagaaacggtttgatgcacattggggcacgcaggctccgtggcgagaccggaatggggaggaaattcctcgcttcatcgaagagctggccgaaaagacaccggcctaccagtatctgtcccataaatacggtaaccagactgattccatcacctactacctgaaccagcctcatcgttgcaaggtcttcgactatgacctcggacaaaaagataccctgttcagtaccatggactctatccgctacatggaacgcttcatgcactgtgggtttgtggccatcgctccgcatacgggagaagtaaaggcatgggtaggcgacatcaatttccagtcatggaaatacgataaggtgctttccaagcgtcagcccggctctaccttcaaactctttgtctatacggaagccatgaaccagggattatccccctgcgacctgcgtgtagatgaaaacatcccctgggaagtggaagaaaatggagaaaagaaactctggatgcctcacaatgccaatggaggtgccactctcgataccatgtctctgaaaatggcgtttgcccaatcggtcaacaccattgctgccaacatagcccatgaagtaggcattcaccagatagccactaccgcacaccgcatgggtatccagaccaagctggaagaaacaccggccctcagcctgggagcttctgacgtatcgctattggagctggtttctgcctacggcaccgtagtgaacgatggagaagccattcagcccacactgattacccgtgtagagaataaagacggaaaagttatctaccaacaagaagctgaagcaacccaggccattccttacgccagtgcctatcttatgcaacagatgttaagaggtggactgacttgcccgaaaggaacttcacaagcgctctggcgtttccgcatctttgataaaggtacggagttcggcgggaagaccggtacctcttccaatcactccgatgcctggtttgtgggtatcagtcccaacctggtaggaggagcctgggtaggcggagagtaccgcagcattcatttccgcacaggcgaactagggcaaggcagtcgcaccgcactgcccgtattcggatatttcatggaaaaagtattggccaatccggagcttgccgcactttatgccaagaaattcccaagtcctaaagaaaagctggaccgttcatgggattgtaatgactatttccctcactactgtgacagcgattccattctcatcacactgggcgattcattacttttcgaagcagaacacgccgctcctacagaagattaacctattgatattcaacacgaatctaaattcaactcaaaatacacttgtgtttaagacaaaacgctttgacgtttgaatcaaaacgcaagtgcatttaagataaaacgcctttgcgtttgcattgaaacgtacttgcgtttcaaaccaaatgcaaaggcgttttttaacgaccttcaaaacacctattaagtatgtaaaaatctataccttattctttcttttttattttttttcttacctttgcggtgcatcctctcgaagggatgtctgtaacaacagaaacactttaaacaaaaaatattagagattatgatgactattgacaaattcaactttgccggcaaaaaggcaatcgttcgtgtggacttcaatgtacctttgaacgaagaaggtaaaattacagacgatactcgtatccgtggtgcactgcctactttgaaaaaaatcttggcagacggtggtgccttgattatcatgtcacacatgggtaaaccaaaaggcaaagtaaacgctaaatattctttgagccagattgtagacgctgtagctgctgctctgggtactccggttcagttcgctcctgactgtgctaaagctcaggaagctgctgctgcattgaaaccgggtgaagtattgctgcttgaaaacctccgtttctatccggaagaagaaggtaagcctgtaggtatcgaaaaagaagatcctgcttacgaagacgctaagaaagctatgaaggcttctcagaaagaattcgctaagactttggcttcttacgctgactgctacgtaatggacgcattcggtactgctcaccgtaaacacgcttctacagctgttatcgctgactacttcgatgctgaccacaagatgttgggctacctgatggaaaaagaagtacaggctgttgacaacgtattgaaagacatcaaacgtccgttcactgctatcatgggtggttctaaagtttctactaagattggtatcatcgaaaacttgatggacaaagtagacaacttgatcctttgcggtggtatggcatttactttcgctaaagctcagggtggtaagatcggtaactcattggtagaagatgacaaactggatctggctttggaaatcatggctaaggctaaagctaaaggtgtaaacttagttttgggttgcgactgtgtagctgctgacaagtttgctaacgatgcaaacactcaggtttgcgacgataagaacattcctgacggatggatgggtctggatgcaggtcctaaaactcgcgaagaattcaaagctgctatcaagggtgctaagactatcctgtggaacggtcctgccggtgtattcgaaatggacaacttcgctggtggttctaaagtaattgctgaagctattgctgaagctactaaagaaggtgcattctcattgatcggtggtggtgactctgtagcttgtatcaacaagttcggtatggctgaccaggtatcttacatctcaactggtggtggtgcattgctcgaagctatcgaaggtaaaatccttccgggtatcgcagctatccgtggcgataaataatgcataaatactttatcgtaaatatttcaaggcatgacttttcggtcatgccttttttattttctatttctacataaagctccgtattattttgataagagattgttttttccgaaatttgcacttatcaacaaaagtattatgcagaaatttatttatctcatttgcctcttattatctgtcatatacacacgttcagaggcacaaatatttcaatatatcggtatagcagacggactcagcagccgaagagttctctctattcaacaaggagaatatgattacatctggattcttacccacaagggtatagaccgctataacggaaagcagtttacacactatccgctgattaaaaatggtgcagttgtcaactgtttccctaatctgaatattttaaagactgacagagaaaagaagttatgggaaatcggaaaagacggactggtattcaatctgaatgaggccagagactccttccagttggtattcgacttgcatgaacagtatccggaaactcaaaagtgtccgataacctgcatttatctggacgaagaaaaaaatatctggttctgcacagaaggttatcagtacatctacaatggagatactcagaagaccagaaaaataagtcataaaattccaggaaaagtaacctgcatcacacaggcaaagggaaataactattttatttcgaccgaacaaaccttgtattcagctaccctgaacaaaggagaattaaccaacgtacggaaaattgatatttccaatatcaacatcattgattacatttattatcataagcctaccaacaagcttatcatcaatgccctgcttgataagctgtttatttatacccctgaaagcggagagctgacagacctcgggaaacacctgaaagacatcggggtaaacaccatcacgcccaaccggaaaaacctggatgaggtgttcattgcaaccgatggtgacggagtatataaactggatgtcaagaaaaaagaactttctcatttcttaaaagaagacaatgagagcttcaacaagatgaacggaagcatcatcaaggatatttacatggaccagaacaaccgtatctggaacgtgatttatcctatcggcattaccatctattccgaaaagtaccctgaataccaatggttcaaacatgcgtcgaacagcagtaacaccttgtcaaatgactgcatcaacggcatcatggaggattctgaaggagatatatggtatgccacctgcaacggaataagctgttatgacatcagtgaaaagaagtggaaaagctattgtacggagaaggaacttcctcaatatgaaaaccatattttcttgtccgtatgcgaaataagaccgggaattatcctggccggaggctatatgtccggtatcttccgcatagacaagaaggctggaactacgaccttccatcagcaaggaaaatcgcaggcacgtgaaactccggacaaatacatccgcggactgataaaagacaagaatgaggttatctggagtggaggattctacagcctgaaaagctttgacacacgcacacaggaaaagcaggaatacagcagctcctaccctatcacgtatcttttagaaagaaatgaaaattccttctgggtaggaaccatacaaggattgtatgtattcgataaaacgaaacggcaactgtatccttacatggaaaaagaagatttcggctgtatcaatgcaatctacaatactcccgacctgaaaaagacctatgtcggcacctacggaaacggattgtttatcattgataatcaaacgaatgaaatcacacactgcatggccaacaacagcggcttgcagacaaacaatatctatagtattgttccggacaaaaacgggaatctgtttttaggtacagaaaacggactgtctttctacaaccggaaagaacagacctttaccaactggacacgggaacagggattgcaaggagcaaacttcaatccgactgccggaatacatacccgaaacggtcagctgatttttggaagcaacgaaggtgtcatcattctgcccgacagtctggaactgccctcaagcttttccagccacatggtattctctaatctgaacatcatgtatcatccggtgcacccgatggaaaagaattctcctttgacaaaaattttggacgaaaccaatttcatccaattgaaatacgaccagaacacgttctccatggatgtgtcttccatcaatttcgacaatccatcgagcattctgtacagctggaaactggaagggttctatgaccagtggactcctcccaccagcaacggaaccatacggtacaccaacttgtcgccgggaaactatacgctgaaggtacgctccattctgctcgacaaccagcagatactggaagaaagggaaatacaaatcttggtagaacgtcctttctggctcactttctgggcattcctgatttatgccctgttcattatcggagcggcatacgccttcctgcgctatcagattatcaagcgcgaacgaaaaacttcggaagaaaaaatcaatttcttcacgcatgccgcgcacgacatacgcactccgctgaccatgatcaaggctcctctgagtgaaatcatggaaaaggaaagtctgagtgaaaacggacaaaagaacatccaactggccatgcagagcacagagaacctggctgaactggccaataacctgattaatttccagaaggaagaattatattcctcacagaccatcgtgacggcgcacgaactgaatcattatctgagcaactatatgcatcagtttgatagttttgctcgtcaaaaggacatcacgctttcctacgaaagttcgttcgacagtctggatgtgtggattgatacgagcaagatggattccattttgcgcaacctgctttctaatgccttaaaatatacgccacaaggcggacgtgtatcattaaaagcggaaagcaacaaaaacacatggacacttttcctctcggacacaggtatcggaatgaacaaggaagaccagaaaaagctcttcaaatatctgttcagaggatataatacggccaaccagactactaccggatgcggcatcggcatgctgctgacgtaccgcctgattgagaatcacgaaggtaagatttcatttaccagcaccgaaaatgtgggtacaaccttccagctgaccttcccgatacgaagtaaaaactatcaatataaaaaggaggaaaaagagggcactgataaagtactgactacggaacaagaaacagcaggaaatatcacgaccgacatccagtttaccgactcacagacagacgagcaggctccattaatattggttgtagaagacaatgctccattgcggtcattcattatccacagcctgtcggacacctaccaggtggaaggtgcaggcaacggacaagaagcacttgacttcatcaatgaacgtcagcccgacctgattctttccgacatcatgatgccggtaatggatggcaagaagatgtgtcagatagtaaaaagtcagatggaaaccagtcacatccctatcattctgctcaccgcacttggtgataaggagcatattttagagggactggaaatcaaagccgaccaatatttagtgaaaccctttgacgtacacatattgaaagctaccatacgcacgctgatagcaaaccggaagatgctacgcaatcgtttcaaatcggctgtcacggcattgccggaggaagctcctgccgtagaattacctacaagtctggacgatgagtttatccagaaagtgaccgaactggtcaaggaaggattaggcaagaacttcaatgtagataccttatgcgcttcggtcaacatgagccgcaccagcttctacaataagattaaggctttgacaggcatagctccggctgaatttatccgtaacatccgaatgcaggaggccgccctgatgttaaagagccagcgctatacggtagccgaagtttcagacaaaatgggctttgccgaccccaaatattttacggatacctttaaaaagttttatggggtacccccaagcatttatatgaaaaagaactaaacgcaataacatgaatttctatttaagagcatttctcatcttcttccggataggattattcaccataggaggaggatatgccatggttcccttgatagaagctgacctggtagacaaacgaaaatgggtgaaaaaggaagactttctggacttgatggcactggcgcaaactgtgccgggcatctttgccgtcaacatagccatctttatcggctataagctgaaaggattctggggagctttctggatggcacttggcaccatacttccctcctttctcattattctgaccatcgctctattcttcagacaattccagcatgtggaagccgtagaacatgtgttcaaaggcatccgtcctgcggtagtagccttgattgcagctcctaccttcaaaatggcaaaatcagcccgtatcaaccgatacaatatctggattccggtggtttcggcactactgatatggcttcttggcttttcgcctatctacgtcatcatcctcagcggattaggaggttacctgtatggacgctaccaaaagaaatataactaaaaggagataaactatggtacttttattactgaaactattctatacgtttttcaaaataggcttattcggatttggtggaggttacgccatgatttccatgatacaaggagaggtagtcacccgttacgaatggctcagttcgtccgattttacggacatcatcgctatcagccagatgactcccggtcctatcggtatcaattctgcgacctacgtaggctatacggctatggtaaatgacggctactcgcacgcagccggcatattaggctctacggtagccaccttctcagtggtattaccctcatttatactcatgatatttatcagccgttttttcctgaagtaccaacgccatccggcagtagaagccgtgtttaatgggctgcgccccggagtagtcggactgcttgcggcagccgctctcgtattgatgaacggagaaaacttcggaacagacacgtatcaggttgtcatcagcatcctgctttttatcggatgtttcattgcttccaaccgatacaaagtaaatccgattctgctgattgtatgcagtggtgtcttaggctactttatatactaaatcaactttactcttcactctccggtaaaatagactggggagtggggatagaaaagtcattgtcggcaaacaaggatgccaggcccgatacctgtttcaagcgaagcagttcatccttatccatacctatatttttcataatccatttatccgacatgcctgcctgagtcaattctgacacaatattcgtcatcaacccgatgtcatgagtacctcgcgcacgattatgacggatagtagagcccatacggttggacaaatccttgtcaatcactaccaccggaagcatacctttctcccgctcataaatccgtcgggaggttttcagcacctgatagcggtgaaaaccatctacaataatatacttgtcattttccttgtcataatagcatacacaaggcatcgtgaaaccgtcttcccaaatagacagttccagcagcttcatttccggaggagctaccacattcggattataattgttggcacacaccttctccaccggtacggcttttacatggtaaaccggacttgttttctcttctatgtccatatctttttatattgttgtaaaatataatctttcatctttttctcttccttgcttacggcaaatcccatatatttacaggcataatcattacgcagtatgcacagacacatacgcttgtaagtaggaatttctctgaattctgcaatatcaatatcatccaggtactccatcatcaccggacgcttagtcgtcttgtagttgctcttgtttctcaccgtaattgggatattcatgctttcgagtttggctatggtctcatcactcaggcagccccctttcgttctccaaaacttaatgctggtatgaagtttactcaaatatcccctgcgggtttcctctggaagtgtagaaagcagaaactccataaacgatttccaggtatgcccttccggcaacttgactgaaccatatcccatcgcatgtgttcctccataaatggcagagaaattaaccccgttcacacgcccaatcattcgtccccaggtatccggctcaatcaccttgtataaatgcagactttcaatggcttcaccaatgaagggactggccactcgctgacgttccagacttacacctgcgtaataataaagatcatacaaacgattgtaatcccaaccaaactttccattagcagtccagatatccgtagttttccagtcataaatgggataaagattatatacatcattggcaatcttcgaactccactgatagttgtgataaagctgctgcttcaaaccgccataaatggtacgccagcgattgtaactttcctgtgtacgtatacccaccagacaagccgtacggacagcctttttcttttcatgcaaccaggcggcaaaacgtaactgaaactcataatcccacatgttgtcatgaaaaaaagtaaaatcttccgccttcataaccccttccggcatctctcgtacccagatgtcacgaagggcctcatcccatggacgccagtaatgctggtacatggaagtacaggttctcactttaaagggaacacaaatccgatatacctccagtatgtccttattattttccaaaatacgattgataaatgcgatggtatggtcatactgcacctcataatccatgaaaaatacaccaagctttatcttcaagttgttccggcgtatataatcaatgcaaagattcagcagtactccactgtcctttccaccggaaaatgacacataaatattgtcaaactccttgaaaagtacagccagacgttcttgtgccagctcgtacacatttttcacgttctcattcttcttcattcgttttcttcattttaagatacaaactccatgcacgtactatttcaaatccttgcgtctgaaaataagattcatgaggcttttggactaccgcctccagttccttttccgtagatagaaattcatttgtcacagcttccaataaactcaaaaacacatcctttgtatcctcctccacataataattgttgattatcgcagattttttccgtatttccacaggaaaaaagcccaggacatgattgtcttcgtctgaaaatgccacaaaccaaacgaatgattcactagttttaaaaggataatcatgattatacttaataacttccggattcatcaccaatggagcgatacaactatataattcaggagatgttccggccattttcaccacaactgccataaatttattatttttcttaccaataaacctgacaaaaataacaaatatccggcaaataagcttattctctgataattatatgttatgaagcaatgtctcaaaagtagaatagcatgtagtctgtccgttttcatctgtataaagaagcatatcgggtgcttgcacatccagtaaaggcagcttccgaacagaagcacagacatccagacaaaagtagtgatgacggttcaaggcattttgtgcccaatgacgcagcacctcatcttccgcctttaacacaatggatttctctcccgacacttcaggagaaaagccaccgtgcatcaaatcaaactttatccgggcatgattggcaaacaatgtatccatccggttgcgcaatatcaagtcttccgtcacaccacattccagtcctccggttgaagaaagcaaccaaaggcgatcagacaagaccagtgcctgttcaatatcatgcgtagacaaaagaattgctctcttttcctctatagccaaacgatgcaacagattcatgatttcaatgcggcttaccacatccaagaaagcagtcggctcatccaataatatcaacggacattcctgcaccagtgccttggcaatcatcactttctgtcgttctccgtcagaaagttctgccatatagcaccgtgccttatgagctatctctacggcttgcagcgcatgttccaccagttgcttgtcggctttgttcaaacgcccgaaaaatcccgtataaggctgacgccccaaggctaccagctcatatacagtcaaccctcccgcctgcgtacggtctgtcaatacgactcctatggtttttgacaactcacgttcggagtaagcagacaaatcacggtccaacagttccaagtcgccagataaaaacggttgagcagccgccaaagtgcgaagcaaggtagatttacctgctccgttcgctcctagcagacatgtcagttctccacgaaaaagctgaaaattcagcctagaatgcacttccgtccgcttcttccctacctgataaccgattgtcaggttacgaccctctaccacgatttccgattgactcatcagttaaaatattgaattcgacgttggttaatgatcacataaataatgaccggcgctcctaagattggagttacggcattcagcggtatcactcctgactctcccggaagtacgcaaatcaagttacacagcaatgccaatgctcctccggcaagcagcgtaacaggcatcagcgaattatggttggaggtacccagcatcaaacgagccagatgaggaactgccagaccgataaaagagatagggccacagaatgaagtcgttaccgcagtcagcaatccggtagccaataataagaagttgcgtacccggcgaatattcactcccaaattttcggcataacgcggtcccaaaagcagggcattcaaaggcttaataagcatgacagccactaacaaccctaccacggtcagtaatgaaaaagccggaagctgttccaaagaaaccccaccaaagtttcccattccccacaccagatacgagtgtactccttctgccgtagcaaagaagttcaacaaagaaatcagtgaagaagtaatatagccaatcatgatgccggctatgagcagcattacattactttttatcaaagaggataaaaacaagaccaaagccaacacagctacagcccccaaaaatgcgcctaatatgacagagaaaaacccggaaagtgtaaacacacctgtggcaatggttcctcctccggcgagcatcacaagcgctactcccaagctggctcctgaactgatacctaaaatagacgaatcggccaatgggttactgaacaccgtctgcaacatcagtccggaagccgacaaggctgctccacaaagcaaggctgtgatgcattgaggaaaacgcgattcccaaacgataaacgtccaacttgccttttcagcctcttcgccgcttaaaatgcgtagcacttcctgcgccggaatatttaccgaacctaaaaataaattggctaccactaaaagcactatcaaaagagccagggtgccgaataccacataatgctttttatcagaatgtatcattccgctaaattactaaaatatttcggttcatagccttccagcaactcgggatggaatatttttaccatatctttcaacaatatctccggatgaaaaggtgactcctcataaaaaggtatccgatgggtgttgcatccataaatccgacgttcgcggaatgccttgaaacgcgcataaagcgaataatccttctgaagttccttataggtcttatcctgtggctgattgtattttatcaaccagaaatcggcatgctcacctttgtcgaagacggtttcaaaagccatcggcacagaaccgctgttcggcagttctgcaaaaacatagtctgccccggcatccgcatacaagcgtccagtggtactctgtcctccggcgatataccatgcagagccatacttcaaatcacttaataccgtaggacgagaggttgcctgtgccgccaaatcctttaatgccaggtattctttttctatctgtgcaaaaagtgaatctcctctctgttcctgccctaccagcaatccgtaaaagcgcagccattctgcacgtcctaacggggaggtttccatgtaatccgcacattcgattacgggtactcccaactttcctacccgaccgtatcctccgctgttctcaaacggagaaagcatgatggcatccggacgaaggtcgataattttctcaatatccggattcattccgtttccgcaatctacgatttctccattccggcatccatcctgcacctctggcatcttaaaatattccaggttacagactcccttgatactttttgcctgtcccaactctttcagtacacttccatgcaccacagaatacaccacggcccgttctaacggaacccgtacgacagtcccctcaggcagattctccggaaccggctgagtcttatcagtcaacagataagtatgcaatattttcaatgtatcccatgggttacggatagaaaccatggtataatcaggaaactttaccacagacaagttggtggcatacctcattttcagggtatctccttcctcctgaacggaagaagtcttgcttcctccgccgcaggcagagagaagcaagactgtaattactatatgggcagatagtaaaatttgtttcataaaaatcaatcaatgaaaaccattgttttaggattctgaccaccacaatcaaacttttctacaaagttgccgttacggtcaaaacgatacatcgtaccatttgagttcgaatagaatgtcactccaatataaatatctcccttctcatcatccacactcatcatgtacacacttgatgtagccagttctgccggtgcatttttcaggaaagaagatgaatttaccgtagcagtcttaatattataagagaagaatgtatttgtagtagtaaacgtattccaatcagtctccgaatttacaaaatacaccatatcatctcctacggtcatattagttgctactcccaatgaaatcggtttattaccattcttaggatcaatcatttgagcagaatatcctttgtctgcataatttccccaggaaatcaagaaaatctttccatcttcttccaacacctgattgggattaatatcaacagctaaagtcgtttctaactgcatgttatctgcattaatgacaaacaactctttctgatactgatacccggcatcattcttcaaatatgaattagccacgtacaacttgccgtcacattctgcaataccttccaagttattccccccggtaaatgtagctaccaccttcagggtatttgcatccagtttcgtcacccgaccaccatattgcgtcatataaatatacccgtcatcagctaccagataacgaggatcaccttctgatgcaggaatctcataacgttgtttttctactccagccgtattcatccgaatcaaatatcttgaaccggaaatgatggcataaaggtcattattgtattcaatcagagcctgacctgtatctcctaattttgcctgattctgagtataaaaaatatctttgataaaatccgcattgccatccggtgcataaaaagacaacgtcgcattattagccccttgagttccttcgttcaaaataaatgcccgatgcacaggaagagtaaccttagaaccactatcatcaaataactcttcatcttcactacaagctgccagtgacacccctaatgccaccatgcagcacaaactgaaaaataattttctaaattgcatagatatttaaatttaaaaatgaatagcagcagttattttccatgaacgccccggcattggataatactttattacctcatattgctcattcatgaaattaataaaatctgcctgcagtcttaaacggcaggccttaaatgaaaattgccgagagagagtaagcgtttgctccacatatccgtcaatttcattctctggaatattctgtgagaaataatatctttttccgactccaatcaaactataccccagttttacccatggagtttccaaaatgacggaaccgttcccattatgttctggtgtataaggcaattgatccttataatttttagcattcgggtcagtcaaatcaacagccttttgccatgtataacttcctgaaaaatataccttaaacaattcacctaaaggaatacccatagaaagagtgatatcagctccccatatatgagttttcccataattcgccattctccatacataagtagaaggaaaagccacaatcttgtctgttacctgattaaagtacacatctcctgtaaatgtcaaatagtcccatacagagttccttttggccccccacgttacgcctatgttatattcctttgctttttccggacgaagagagcgatttcccaatcgataataatacagatcgttaaaggttggagtacgaaaagtacttttatacataacccttaaaaagaaatcttgttcactgaaaggtttccaattcaccgaaaaagacggggataatttcttcaaatcatccggtttttctccactctccacatgttcttttacatacgtatttattaaagatgcatccatttgcacaccgcccaattgatagcgggcatgtaaggctgtcaaagaagttacacgggtgggaaatggacaatccggtaaattgctatccagtgtattcactgctaaatcttgagccaatgatacggaaaagccctgaaacggtcgatacaaaacagctcctgaagcataatattcatgctgggtataatgatctgtggaaactctcccctcatattgtgcccccttatcctggtatttattccaggcataattgtatttagccaacacctgcaatgaccatttatcagatattttatcctgatattttgcttgtacgaaagcattcttatcccaaaggcgttcatttgaaacgggattatacaaaatcacggctcccggtaatccacgttcagactgataatagtatgccttaacattcaattttttatcctccttaaattcatgaataagattccattctgtatgccaggaatccacttccgaattacttcttttctctgtttgggtatatttcccatttttcagcaaaaaaggatactgtccatccgaacgtaaatagtctccgtcaacagacaagaccgtcttttcgcctaactgttgtccatatcgaaaataaggattgaccagtccaaaagaaccgccttttacctgaaacaacaattgccattttctatcctccagaaactcgggacgagaagtttcaatattcaaaactccagccgaagcatacagtctggcagactgaagcatatcttcattctgacctacacttaacgataaagattctacgttgtctaaagaaaaacgccctatatctatctgtccagcctgacaattgcttaccgcaactccatcataactaattgcagtatgggcagctcccatatttcgaacggaaactgttttcaatcctcccgtacctccataatcacgcacatcagtgcctgcaaaacgccttactgcatctgccatattctgaatacccagatcttccatcatgtcttttcccaaacgttgtacgggaacaactgaagatattttattcatcgtcttcttcccgctcaccgtcacatccggaatctggtgcacctttcctgtaatactatcagactctgcatgttgggcataaataatatctacacctgcaaacatgcaaagacacatagctataaaaaagcgacagccgacaataatagccagtttcttcaatcttttcattcaaattttaattgtaattctacattacgcacgttcttgccatcctttcctcgagaatgcaagcatgactttgttttgcaggtcttctgacttactcccgtttgtcttgccttcccatcttcagttaaaagacagtggccttgcagagggtagacaaacgtaaatgtctggagcttacagcagcgggactgtccgggactttcacccgattcccttttcatccgtgatttcgccgaaccggaaatcaatacggaacaaaacattgcaaatatacattttttcttgaaaacaaaaataaatttctatagaattatagtaccattccacaaacaagtataaattgccctacatattcctaattttctcctcatacattctacaaaacgtaggaaaaagttctctgtttcacagtgcgagatttatatcccacagtgtgaaatatgtatcccacactatggtttttgtatttcacagtgtgaaacagagaatttgtcgtagaattttccacttttagcaagtacatactgaaaaagtactacagaagagacaatagattcacaaaaatctttacaaaaagcatttgcctgccaaacattttcttacctttgaacattataatacatatacaacattcacattactttatttattattacataatcatgatttttacagctgaaaacatactgatgattggctctatccttattttttccagcattctcatcagtaaaaccggataccggtttggtattcccactcttctacttttcctgatagtaggaatgtgttttggcagtgacggactcggactgcaattcaacagtgcttcagacgcgcaattcattggaatgatggcactgagcattattctgttttccggaggtatggataccaaatacaacgaaatcaaacccatccttactcccggtattatcctgtcaactgccggtgtattgcttaccactttattgaccggtatatttatattctatatttccgactggaaccgaaccaacatagaattaaccctgcttagttccttactgctcgccgctaccatgtcgtctacagactctgcatctgtgttcaacctgctccgctcccagcgcatgaacttgaaacagaatctacgccccatgctggagctggaaagtggaagtaacgacccgatggcctacatgctgaccatcgtgctgatacaggtgatttcaagtggaagcaatcctgattttctactgattaccaaagacctgctcgtacagttcttcttcggtggggtcatcggctacgctatgggacggttcagtgtatggctgattaaccgtatcaatctgtccaacagttcgctttactcaatcctcttgttgagtctggtattcattaccttcaccattacagaccagctgaaaggaaatgcttatctggcggtctacatcatgggagtcattcttggaaatacccgactggcttaccgaaaagaaatcaataccttcatgagtgggctgacctggcttttccagattatcatgttccttactttaggactgctggtcaacccgcacgaaatgctcgacattgcagcggtagccttgctgattggtgtattcatgattctcgtcgcacgtccgctcagcatattcctctgtctgctgcctttccgtaacattacgaataaaggcagactgtttgtttcgtgggtgggactgagaggagctacccccatcatttttgcgacttacccggtattggctcaaatagagggttcacagcaattgttcaacattgtattcttcatcacccttctttctttggtgattcagggaatgaccattaccaaggcggctaaaatcctgcagctggacttgcccgcacctaaagaaggaaatgaatttggagtggaactgccggaagaaattgatacccgattgaatgacctcaccctgacagctgaaatgctggaagacaaaaacagactggccgaaatgcagattccgaaaggaacattggtcatgctcgtgaaacgtggcaatgagttcctcattcccaacggacaaatggagctgaaaccgggagacaaattactgcttatatcagaaaacaaaaacaagtcggctgattaattttcagccaacttgcttttcaagtattcataaaaatcgtactgggcacgtacatcgtcgttacccggttttcttttaaagatattccgcaactgattgtccacccagcatgccttacggttagccgacagctgaagttccagcatgtctgtcagttctcgacggagtctgccgtcaagaataggagttaccgcctcgatacgacgatacaaattacgacgcatccagtcgggcgaaccgataaagaccaacgggtcacctccatttccgaagtaccacacacgggcatgctccaagaaactgtccacaatacgggtaacccgaatattccgactaaacgattctcccggcaccaggcagcagattcctcttacaatcaaatcaatctgtacccctgcctcactggcacgatacagctcatctatcatagccgtatcctgcaaggcattcatcttcaaaataatccggcctggctttccctctttcaccaaatcgatttcccgctgaatgagggctttcaattccggaagcagattgaaccgtgctatcaacaggcgtttgaaacgaggctctgtcacttccttccgcaagaccttaaacagggtacacatgtcatccactatctgcttgttgcaagtatacaaagctatgtcagcataaatctttgccgtcttctcattaaaattacccgtactgacatacgcgtagcttcttaaccgttctcccttgtcattcttccggagaatcaatgctaccttggcatgtaccttcagtcccggaatgctgaatataatgtcaatccctgccttccgcatcaattcggccgtagccaggttattttcctcatcaaagcgggctttcagttccacaaacaccgttacatgtttcccgtttcgtgcggcagcaatcaaggcattaatcacttccgaatgttccgccacacgatactgcgtaatcatgatttcacgacaaaatggatcgtgaacggcttcatacagaaaatgaatgaaatgttcaaaactgtgatacggataataaagcagcatatcccgtttggctatccggcgatacataaagtgtttttcgttcatcccgggcaagaacatcggctgtggcttgacgatggccggaatatccggattcggattgggaagggacgccaagtcttccagattcagatgcttgtcgcccggcacaagctcttcccggttgattcccagcgcttctaccaaggcatccagaaaatcacccggcattttccggtcatacacaaaacggcagatggctccaatcttacgttttttcaccttctccttcagtttttccaccatgctctctgcaggtacatcatctacaaacacgtcggcatcacgtgaaatcttacaacagtaactgcactctacttcgtagccgataaacacttccttcaagtttgccttaattatatcctccagaaacatgaggtaatagtttccctcatgcgaaggaagctgtacaaaacggggcaccttgctataaggcatttttataatataatattccggcttctcctgcgcatccttccatacctttacagccagatacaaacgtctgtcccgcaagaaaaagcgtacgttttccggatcaatcttcaccggctgaatgtagggaaacacttcttccataaaaaagcggtgtacaaattccttatgaaaatcctccacctcacttttactctgataaaacaccacatgattgcgccgcaatgccggaagaatcttttcttcatagatgcgtacacgatcttccagctgccggttcacggtatccgtaatctgccggataagggcatgagcctcatccacggtcatgtcttcactcttacctccagatgcaaccgccttatgttctgccacacgcacctggtaaaactcttccaggttagacgaataaatagctatgaaattgattctctcgaacaaaggaagcgtatcatcatctgcctccaataatacgcggtgattaaatgacaaccaacttatatcgcggttgaaatagttatagtggctttccatatactgaaatcattcaaggttttttcaaatgtagtatctttgccggacaaaagcaaaagaaaaatgaaaagaatcggactcttatctgatacccatgcctactgggacgaacgttatctgaaatattttgatacctgtgatgaaatatggcatgccggcgacatcggttcactggaagtagccgaacggttggccgcattccgtccgctgcgggctgtctacggaaacatcgacggacaagacctgcgcatacgctttccggaaatcaaccgtttccagttagaaggcactgacgtactcatcaaacatatcggaggttatcccgggaagtacgatccttccatccgaaaaacactcatgacacagcctcccaagctgtttatcagcggtcattcacacattctgaaagtcaaatacgattccagtctgggactacttcacatcaacccgggagcggcagggaaatatggttttcataaggtacgaacccttgtacgcttcagcatagaaaacggaaatttctctgacctggaggtgattgagctgaatgattaaaacaaaaaaatcttgtcacattcaaaaaactttccgaaatttgcacccaaaataaaactctatatgaaaacttatttagttactggagctgccggattcatcggagccaactatataaaatatatcttaggcaaacatgatgacgtcaaaattgtcatcctcgatgcattgacgtatgcgggaaatttagaaactatttcacaggacatcgacaatgaacgctgcttcttcgtaaaaggaaatatctgcgaccgtaacctggccgaccagctatttgctgattacaaatttgattacatcgtgaatttcgcagccgaaagccatgtagaccgcagcatcgagaatccgcaattattcttgcagaccaacatcttgggaacccaaaacctgctggatgcagcccgtcgggcatgggtcaccggaaaagatgaaaacggatatccaacctggagaaaaagtgttcgcttccatcaggtatcgaccgatgaagtatacggttctttgggtgcagaagggtatttcacagaagaaactcccctctgtccgcacagtccgtacagcgcttcaaagaccagtgccgacctgattgtgatggcttaccgcgacacttataaaatgcctgtaactatcagccgctgctccaacaactacggtccttatcacttccctgaaaagctgattccgcttatcatcaagaatatcctggaaggaaaacgcctgcctgtatacggagatggaaccaatgtacgcgactggctctacgtggaagaccactgcaaggccatcgacatgattgtccgcaacggcaaggacggtgaggtttataatgtaggaggtcataacgaaaaacagaatattgaaatcgtcaaactgaccattgctactattcaccagataatgaccgagcagccggaataccggagcatccttaaaaagaaagagatgactcctgacggacaaatcagcattgactggattaacgattcactgattacttttgtcaaggacagactcggacacgaccagcgttatgccatcgacccgactaaaattactcgtgaactcggatggactccagagactaaatttgaagatggtatcgtaaaaaccatccgatggtatcttgacaaccagaaatgggtgaaaaacgtaaccagcggcgaataccagaactattacgaaagcatgtacaagaatcgctaaacagcctttctttatattacataatagaatgtcattctggaaatctctttccagaatgacattttttattttcatcattcccttttcactttatcagtaagtaaaaagaaataaaaatcattttgataacttatttctaaaatcgcttgcatatttacaaaatacacctatctttgcaagcaaataaacatttaaagaaattcacacatgagttaccttataaaaccagtcggctataagccgttgcttgacatgaaacagaccgaactgggcatcaagcaaattaaagagtttttccagcagaacctctcgtccgaacttcgtttacgccgtgttaccgctcctttgttcgttttgaaaggaatgggaatcaacgacgacttgagcggtacggaacgccctgtcagcttccccattaaagacttgggagaccaacaggcagaagtcgttcactcactggccaaatggaaacgtgtcactctggccgactatcagattgagccgggctacggaatttataccgatatgaatgccatacgtgccgatgaagagttgggcaacatacattctctttatgtagaccaatgggactgggagcgagtgattactccggaacagcgtacagtggatttcctgaaaagcatcgtgacccgtatctatgctgccatgcgccgcacggaatacatgatctgtgaaatgtatccgcaaatcaagtccttcctgccgcacgatgtacacttcattcattcggaagacttattgcaaatgtatcctgataagactgccaaggaacgcgaaaacctgattacagaacgttttggagccgttttcatcatcggaatcggaaacaagctgagtaacggacaaccacatgacctgcgtgctccggactacgacgattacaccactgtagatcccaaaacagggcttcctggcttgaacggtgacttgctggtgtggaacgacgtgctgcaacgcgcactggaaatttcctccatgggtatccgcgtggacaaggctgccatgctcaagcaattggaattagccggaaaagaagaacgtaccaaactgtatttccaccagcgcctgctaaacgacacactccctctgaccattggaggaggtatcggacagtcacgcttgtgtatgctttatctgaagaaggcacatatcggagaaatccaggccagcatctggccggaagatatgcgtgaagaatgcgcacgactgggtatgcaacttatctgacaaacacatagatcatcatataaaataacaatccccttgctccgttttatgggtggagcaaggggatttctttttgcgtatttattgatttgttgtttcttaccagttgataggagtctctccatgagccaccaggtattcattggtgcgactgaaatgcttgtttccaaagaaaccgttataagccgacaaaggagacgggtgcacagaagttaacaccagatgcttgttgcggtcaataaacgctcctttcttctgcgcataagccccccacaagataaacaccaaatgttctttctgttcagccagcacacggatggccgcatccgtaaactcctcccaacctctgcgctgatgtgaaccagcctgatgggcacgcaccgtcaaggtagcgttcagcagcagcacaccctgctcggcccaacgagtcaggttaccactggcaggaatcggcatacccagatcatcgtggatttccttgaatatattctgcaaagaaggaggaaatgctaccccgtcgttcaccgaaaaacacaagccatgcgcctgtcccggtccgtgatacgggtcctgcccgataatcaccactttcaccttatcaaaaggacaaaggttgaatgcattgaaaatcaatcttccgggaggatataccgtagtctgctgatactcctgacggacaaaatcggtcaaccggacaaaataatctttttcaaactccggcgccagtgcctttttccagccttcttctatctgtacattcataatacgatgagtaaataattaatcccaaaggttcagtttattcttttgagcttccgcaagtgaaaccgtctgtaccgttttctgacggttcttttcacgcaaagcctgatattcttcattcaaagcttccacaaaagccggacgttgctcacgattcagcaacttggcagccaccaatgcattttgtgaagcatccttcatgtatactaccggtgcatgatatactggagcaatcttcagtgccgtatgcagcttcgaagtggtagccccgccaatcatcaccggaatatccagtccagcccgctgaagttcagtcaccacatgcaccatttcttctagcgaaggagtaatcagtccgctcagtcctacgatgtccaccttttcacggatagccgtttctacaatcttctcggcaggcaccattacacccaagtctataatttcatagttgttgcatgccatgaccaccgacacgatgttctttccgatgtcgtgcacgtcgcccttcaccgtagctaccagcacctttccggcactgcgggtaccttcttctttttccgcctcgatataaggctgaagaatagctaccgcctttttcatggtccgtgcagttttcaccacctgcggcaagaacatttttcccgaaccgaataagtctcctacatgattcatacctgccatcagcggtccttcgatgatgctcaccgcattcgggtaacgtgaaagcacctcctgcaggtcttcctccaaataatccgaaagtcccttcaccagcgcatattgcagccgttcttccaccgtagtgttattccgccacagtagttgagccgacgcacttccttcttgagaagcagtaccttctttctcctgcttcagccgttctgccgtttcaatcaagcgttctgcagcatccggccgacggttcagcacgacatcctcaatccgttccagaatatcctgcggaatatccgtatacaatacagacgtagccggattgacaattcccatatccattccctgctgaatggcatgatacaagaatacggcatgcatagcctcacgaatgtagttgttgccacggaaagagaacgacaagttgctcacccctccactgacatgagcccccggcagattcttacgtatccatccggtagcctgaatgaaatcgaccgcataattattatgctcttcaatacccgtagctacggccagcacattagggtcgaaaatgatatcttcaggagcaaaccctaccttatctaccagaatgcgatatgcccgttcgcacacctcaatcttgcgactgtacgtatcggcctgccccttctcgtcaaaagccatgacgatgactgccgctccaagctgcttcacctcacgggcgtgcgctataaagacctcctctccttccttcaaggaaatagagttgacgatacattttccctgcacacatttcagtccggcacgtatcacttcccacttggaagagtcaatcataatgggcacacgggctatttccggttccgaagccaccagattcaggaaggtagtcatctcttgtgcggcatccagcaagccatcgtccatattcacgtcgatgaccaaagcgccgtcttccacctgcttgcgggctatcgacaaagcctcatcgtatttcttctcattaatgagtcgcaaaaacttacgtgaacctgccacgttacagcgctcacctacattgacgaaattgatttccggagaaacttcaagcaactccaatcccgacaaccacaaatgagcatgcttcttcactggcacacggggctgtactccttgtatcaaatcctgatacttagcaatgtattgttccgtcgtaccacagcatcctccgataatatttaccagcccttcttcaatatactccttcacttcggcagccatatcttcgggagtctggtcatattgtcccagcgaattcggtaatccggcattcggataagcactgatataataaggcgcacgtgaagcaagctgctccaggaaaggtttcaactgacgggcaccaaatgagcagttcaacccgacagagaacaagtccgcatgctccactgaagctaaaaaggcatccaacgtctgtcccgataacgtacgtccggcaatgtccgacacggtaaccgacagcatcaaaggtaccctacgtccaattttttccatcgacaattctgctgcccgaatagccgccttggcattcagcgtatcaaaaatagtctcaatcagcagggcatccactcccccttccaacaaggcttccatctgctcacaataagctgcctgcaattcatcgaaagtcaacgcgcgaaaagccgggttgtttacgtccggactcatggagcaagtcttgttggtaggccccacggaacccgccacgaagcgcggcttttccggattcaatgctgtaaactcatcggccatccggcgtgccagacgtgctgccgcaagattaatttcccgacaataagcctgcacatgatagtcggccattgacaccgaagtggcattaaagctattagtttcaataatatcggcacctgccacaaggtatttccgatgaatatcttctattacttccggacgagtaagacacagcaaatcattattccctttcaattgcccgggaatatccttaaaacgttctccacggaaatctgcttccgaaagattatattgctgtatcatcgtacccatggctccatcgagcaccaggatacgctcccgtatcagttgttgtatcgtctttgtctgcatagttttcgtgcaccttatttaatttagcgtttgaacatacggtccatcatccgtctgtcttctttttccttcaacgtctgacgtttgtcatactgtttcttacccttagccaatgcaatgaccaccttagccagtccccgctcattgatatacatgcgggtaggcacaattgtaaaaccaggttcatcagaggtacgctgcaacttgcgcaattctttctttttcagcagcaacttacggtcacggcgagccgtatgattgttataagagccatagaaatactccgcaatgtgcatgttctttacccacagttctccacgggaaaagaaacagaaagtatctaccaaactggcctttccctgccggatggacttgatttccgttccggtcagcacaattccggccgtgtacgtatcgataaattcataatcgaacgacgcccgcttgttcttgatattaatattatttgaaacaggtctcatcaattcaaaattacagacaatttattaaacacaaattctatcatcaccggagaaaccagtatcagaatggaggcgacaaccgtataggaagtcaacttgttttccggtatttccaaaaagcgtcgtgcgccttcaaacactacgagtaccgtatagagctgaagaatccagtgaagtatctcaatggaaatcagtccatttacaatatcgagcacaaacagcaccgtcatggaataacccacaaatacttggagagtttcccttggaatatacttgttgaacaagttccagctgattttatccagcagataagttgcgacaaaaaaaccgctaaacaacgataccgcaatggcacaacagcgagtcaaagcccactgaaaaaactccgtgctgacgtcacgcccgataaacgtacctataaattccgaaagtccgcacaatccgataagcggataaacgtactccgacatcatccggcttccctgcccttccgtagcttctttttcccaaaaacgactgggagaagaaagcaaaaaagccattttattgaacaattctttataattcattcccaattcttttcattatgcgatgaaacgaattgcaaatttacaaaaaagtatgagattaaggaaagagggaggtatcttttcaagctatttaaaattcggtattcctaaaaaccaaatccccttgaaaaatagcgcaaaacgaagtgaaaaaagccgctttttatgaagggttttgataccttcaaaaacgcacttacgtttgaaaccaaacgcctttgtgtttcaactaaagcgcccttgtgttttaatcaaaactctttggcgttttatcttgaacgcaaaggtgttttgaaaagaatgcaaaggaagtttttcagaaagaaaaaactgcaccgcaaagccttgctaaaggactttacaatgcagcttttctaacaaaacatcctttttattaattattagaagaagtttctgtatacaaattataagtaacagtcttcgtttgtttctttgctattgttggaatagatgaagtactattattatactcatattctactgttactttttccggctcgcttccgctatgtgtagatttatacattgaaattataggctgcaaattcacatgagacacgttggtataccgaacgttatagtcacttgcccagctctctttatcatctgtttcttcagttgaagatcctccaatgccagaaatttcatagcgcaaatatagttttaacgtattagcatcttcatcaccttcagcagataaataataaagagtcaaacgatggttcagcaactcagttgagagattttcactcgttgtccccttcttcaaaagaatagtaggcgccaaaattaaatacttattatttccccacacaagcgcatctctctctcccaatgaataaatagatactgtctttgtttcttccggcaaagttgtagttaaacaatccaatcttttcaaataaacaggatcctgcaacaatgtcacaggtagcttcttagtctgctctatttgagccatatcgtcatccttatactgataattaatgtaagccagtgcagaagaggctggagcatcaataattgttttattcggcacgagctgtatccctgtcggatccacaaaattcacactaccatacgtgttgttcacttcaaagtatccgccccattcacggattccatcatcttctgagttcaaacaagaactaaaccccaccattgttaataacgcagcaaaaacgactgccaatttttgttttttcatactctattctactcttatctttagtttataatcagtttttagatttaaaattcacaaaataaataagaaaagaaaaaaagactgcatgagagcagtgttattttaacacaaataaaccatttaagcttattgtacctgagcaaaactgtccaaatgttcgtctacgtaggttgctatctgcgcagtaatctgctcttcctcttccatatattgttcttccaagtcatcaaaagcctcgtattgctcatacatggccatgaactcctcttccgtacgttccttctccaaatccgcacgatgggcatcgtaaatcttttttgcttcgtaaatcaatttagagaaatcttttgccccaaacatacgcatcgctttggcaaacggattatcaaagatatacggtccgtatccattctggataagctgcacgaaacctccttccatcacctcctcacgaaagaaatgatagcctaacaatgtatgctgatacccgttcagcaacggcatggtatccgcattaatcttcccccctgtcacttccaggtatttgtcaataaatactttcaaaaaagcatccattccttcttctgctcctttgcgcaaatccgcatccgaaaccgtaatctgattcatttccattctatacctaataattgttacctatttttatgcaaacccttcactgggcatatcgccgtattcaaggcaaagatacaagtttctctcagaagataaaaaacattttgtcaagcggactttgcaaaacggcccaaaccgaaaaaaatatcattaaaatgtaacaaaaagtttggtttcccccgttgcagaacgaaataaaacgactaactttgcgaatggattaaggaagaaatttcctaaatcaaggtttacgaaatacctattttttattaccaataaaacgtaaagaatatgacttattcacacgaagttgaacacatgtgtgttgtaaaaaaaggacctaatcatggtccagctccaattcctgaagaaggaaaatgggttaaatcaaaagaaattaaagatatctctggtttaactcacggtattggttggtgtgctcctcagcagggtgcttgcaagttgacactgaacgtaaaagaaggtgttatccaggaagcattggttgaaacaatcggttgctctggtatgactcactcagctgctatggcatctgaaatcctgccgggaaaaaccatcttggaagcattgaacactgacttggtgtgcgacgctatcaatacagctatgcgtgaattgttcttgcagattgtgtacggacgtactcagtcagctttctctgaaggcggtctgatgatcggtgctggtctggaagacttgggtaaaggtctgcgtagccaggtaggtactctgtacggtactttggcaaaaggtcctcgttacctggaaatggctgaaggctatatcaaaactatcgctcttgacaagaacgacgaaatctgcggatacgaattcgttcacctgggcaagttcatggatgagatcaagaaaggcactgacgcaaacgaagctttgaaaaaagtaactggtacttacggacgcttcacagcagaacaaggtgcagttaaacatattgacccacgtcacgaataatataaggaggaaagaacattatgattagagaagtaaaatttgaaagccaggaccgtcgtatcaaacagattcttgctgctttgaacgctaacggtatcaaagacatcgaagaagctaacgctatctgcgaacaatatggtcttgatccttataaaacttgtgaagaaactcagcctatctgcttcgaaaatgcaaaatgggcttacgtagtaggttgcgccatcgctcttaagaaaggttgcaaaaacgctgctgaagctgctgaagcaatcggtatcggtttgcagtcattctgtatcccgggttcagttgctgatgaccgtaaagtaggtttgggtcacggtaacttggctgcaatgttgctgcgcgaagaaactaaatgtttcgcattcttggcaggtcacgaatcattcgctgctgctgaaggtgctatcaaaatcgctgctaaagcagacaaagtacgtaaagaacctttgcgttgtatcttgaacggtctgggtaaagacgctgcacagatcatctctcgtatcaacggatttacatacgttcagactcagtttgactactacactggcgaactgaaagttgtaaaagaaatcgcttactcagacggtcctcgtgcaaaagtaaaatgctacggagctgacgacgttcgcgaaggtgtagctatcatgtggaaagaaggtgtagacgtatctatcacaggtaactctactaacccgactcgtttccagcacccggttgcaggtacttacaagaaagaacgtgttcttgcaggtaagccttacttctcagtagcttcaggtggtggtacaggtcgtacacttcacccggataacatggctgctggtcctgcttcttacggtatgacagatactatgggtcgtatgcactcagatgctcagttcgctggttcttcatcagttcctgctcacgtagaaatgatgggattcctgggtatcggtaacaacccgatggtaggttgtacagtagcttgcgcagttgacgttgctactgctttgaataagtaatctatactttatcaaatatataaactcctgtaatctaaatggttgcaggagttttttatttgccgtaaattatagtttagggatattctaatagccttctttttggttatcttgtcttatcaagtaagaagaaaaatgagactataacaacctaaaatatagttcacccaaaggccattatactcaagcccaaagctgagcaattgtcacttaattaagccctgaaaaggtgatttttgcagcccatttgcagcccaatttgccattttcaaaaatgggctgcaaaaacttatataatcagctatagtacaatgagatatactccattttacaatcattttaatatggaaaaacattgtacgatggtttacttttcattgagagaaagtaagcaaaacaagaaaggtttatcacctattgaggtttctatctccacaaacggaaaaagaatctatttcagcacaggtaaatatgcacgctctacagactggaataaagaaaaacagttagtaaaaggtaagagtgaagaagctcaattagtaaatagttatcttacacagctaagaaacaaaatataccagaaagaaattgagctacttcaaatgggctacctaatcacagcagagctactaaaagaagctgttgcagacaaagtagaagcattgaacgaaaaaagcctgtttgaattttttgaagaacataacagagaacaggaaaagctggttggaaatggagtttctaaagctacttattggatttctgtctatacagtaaggctactcaaaaaatttgttcagcagaaatacaaaagagaagatttatacctacgtgaattgaatctgaactttatccagtcttttcatacattcctaagaatagacaaaggaatggcacaaaattcatctaccaaacatctaaagctacttaaaaagattgtcaaccttgcagtagctaattcatacatggctaccaatccattcattacttataagatagaacgtgaacccgtagaaatagatttcttggatgaagaagaactaagaaagattatcaactttgacactcccctacccagactggagagagcaaaagatatgttcctctttgggtgcttcactggattgagctacattgacatcaaaaccttagcaccagaacattttgaaaaggacaatacaggcagaatttggattaagaaacgcagggttaagactggagttctatcacgcatccccctactccctattgccaaactgatactggataagtacaaaggtggagagaaattacttcctatccaagacccaccagatataaacaaatacctaaaggatatagccattttgtgcgacatcaagaagcgaatcacatttcatacaagccgccacacattcgccagcaccgttactttag

SEQ ID NO: 3800 - DNA, 42134 bp, Unknown
  gut microbiota DNA sequence
gtcgtttctaagatgcttggtcacaccaataccagaatgaccaaccattatgccaaactgatagataagtgcataggtgaacagatggacaagctcatggacacatttacaggagattccaactactaagccttacaaactatgattatcccacttgcagatattgtgagtgagattttcttttttaattttgctccaaactaaaacattatggaaaagttaaaagaaaattatataaacattgaccctcgtttagaatatatggaacagatagctacattatatgttccagatatagacatagacccatctacaggtgaaaaatatatttgtggtacagctgctttgccattctttataaatagatataatcaaaacggattatatggtcacttcacatacgaagattatacaggcaatgaaagcatacaagaaatgctgaaaggcttgggaattgacatagataagttctggtttttacttctatttatctttgattacacctgtggcacgtgtttggatggaataaaagctacaggagttggggtagaacaactcactaagtttgctaaagccatagctgataaccataaagaagttaatcggtttggagtaagttttaagaagcctattactatttctgtaaaagtggagggcaagcatcagataataattgataatgccaatgcaataggctatttggctgctgttattgctaataatttaaaggagatagaggaacatccttggatgcaaatccaacaggtcagaatgaacacacccactgaagaaaaggaatccattcaaatatggttgttctataaaatgtttaatgatttcttcaatttaaaaccatataacaagttgtttaatgttagacaaaagaaaggaagtaccgtttcacttagtaagacattactaatatcaaaacttatctacttcaccaaactatctaagaacaagaatttttcagaggacgaatttactttaaaaggctacatcaagcaatataaagacaaaaagattgatactataaacagcatatacttctaataataaactgataaccaatacagtcctgcttcatctcattaaaagggtacatgaaagcaggattttttttctctcttttaatcttctcaaaagttctcacctttgcaacgtaatcaataacgataaggcgccaagttacagattacatgaattattaatactttaaactataaaaagatgaatatccaaattttacaacagagcatagctgagaaccaagtcttagtaaataacactattgatacagtatttgtaaccagattcttaaacggtatgctaagaattccaacagaaatccgtttacgattcaagacactcaacaatatgcctgccattacagttatattaacttacagagataagaaaggcagattgataaaagaggaacttacaaccattgcaaacggtgaacttatcaatgcggtcatttcagcaatgggcagtaacttgaaaccaatccatgcattccaaacggaaggtaacaacacaatagaagaaacctcgacaaattttgaactggaaatgtttgagaaattcatggaatcctcatatcacttaaagattgaagatgatttcataagctcaaacggtgacagatttcttcatgctgttttctctatcggattccattatgatatacatttctaccttaaaagggatgaacacattgaagaactattgaacaaggctcttactgcataatcgaatcaaattttggagggagggtaaaacctctctccttttatcaatacataatagcatgaacattatactacccccagcatacgataatgaatcagcccatcatcaagtaaaacaactaatggaacaaaagaaaaatctgtcaatccgagttgatgatactccttgtgcttggataagcaactcagatatgtcaaggttaaaatacatgctaaatacagcatcttggaactggattataaattatctggaaacaggaaatccagatgatttcaaagtctttccattacaggaagaatcattacccgatttccagactacattccttaaagcattagttgacaagaaacataaaatctacaggattccttttctaagagaaacccaaccatacataaaccttatagctgttttcaaattcgggaaaatctatttcagaatcagactgacagaccctatcgtaggatatctaaactccaacaatatatgaatcactacattatcagtaaaggacagaagctatccgatataatgccacaaatagaatcaaacattaatcttgccaaaaaatttcctggcattggagctacctatctggaaatccattctcccagaccttctatactgatagagcctaatgttcctgtcattcaaggtaaatgtgcaaaatcagacaaagactttaaactgttcggagtttacgaaggtgtttcagtcgataaaataaccgattacctgcaagagccatacaaataccataaacttatgactactccagaaagctttcccaaaatcaaacaggctgcaaataatgttggaatagacctttattcccatttcttttgcttgatggatgaatcccacctgttagtaaaagatgtggattatagagataacatagttctgccgataaatgattttttcctttttaaacagaaagctctggtttcggcaacaccgattgcattttcagaccctcgtttcaaagaacaaggtttcagaactgtcactattgatgctgactataactacaaacaggatattacattaattcataccaacaatacactgcaaagcatccaagattatctggagcaacataatgattccccaatatgtttctttattaatctggttgactatagccattcattaataaaagaattgggaatccagaacgaatcctccatattctgtgcacctaaaagtgtacagaagctaaagaacgaacttgaattcaacaatgcctatgatgaatggaaatctgacagaatgagaaagttcaatttcttcacaagcaggttttataatgcttttgacttggaagtggattataccccacatgttgtaatgcttactgatataaaggcatcaccatataccatacttgatattaatacggattgtgtacagattgcaggtcgtttccgtaacggattatctacacttacacatatttatacaacagacaataatctaccaataatgactacggaagaaattagaatacaccagtttgcacaggaacacgcatacaatacaatccgaacattatataacagtgcagcatccgaaacagaaaggaatgctttcggagaagccatgcgttcacttccattcaacaggatgctttatccagatggaaagaaaaactattttgccattgacaatgataccaatgacaagctggtaacaggcagttaccatgacagtgacagaatcatatctctatattatgcctgttacatgttccgcccatcctgtacaggatatatctatcagtttaaggactttagccaactattacttcaaggctctaaaatgacagtcaaagaaaaacgcaagaaaatggtagccatactatccgaactgaaagaaccgctatctgaatttgatttggactttataaacgaaatgagaaaagttgattccttattgatagaagcatacgaacttttaggcttggattcaatcatggaaatggattattcccaaaaacgcatgaacgaagctattattctaaaacggatgcagggcaatacaacagtcaaactgataaagaacagtttcaagactggctacaaatacaaatgctcacagatagtttctgaactgacccgaatctttgaaatgttgaatatccatcctcataaaagcatccgtggggaaaccattaatcattacttcgatacagttccatgcagaatcgggaaaaaacgggaacgaggttatttcctcagagcagaactattataattacaggtaggacaaaaacaaataaagttcttctttttataccccattacacttttgtcctacccttacagaattatctgaaataccgttaaacctatcttttataagtagtgaacttatgattagttccccacctataaagtaactatctttatacaacttcaaacagataattccactaccaagattccctatttacaaatcattcaatatttctaaaatgcaagaatttacttatgagcaaatcagagaaaaagcactaagacaaggagtaaaagataacagggttcatataggattatgggctaatattaataactatctaaaaataaggagaaagaaaaatggaaaggttactacctattatatctcattgcaaaaactggcttactgaaaagataagatttaaagtacagagattgattttgtctaatttattgggtgtgcttattccctttttaccgtgtgcttaatcaccccctctctacattcctactactacactcctattagagcatgcaatcctcttacgagcattgcaatggtaatttggatattggggatttataaaaaacaatgatatgtggatttacaacaagcatatatatgacaagctaagcgaactaaggaaaatcaacagattaagttcttctaaaatgagatttctattaaagaccaaccaaatcattcttattaaccatattgagcgattgccttatgacgaaactaccattcaaagaatacaccgtaataaataatactcttattcagaaacttggttgtgcagatgtttacagaacctatgtgttactattaatagcagataaaagcacactaacaactgatactaccatagaggagcttgcatcatttgttgatgaatcaaaattcaactataaaggtaacaggaaaaccaaatcattcaatgacaagttaagagatacaggagaagttaccatacaagaaaagaacagtggcaaaaaggacagaacttggactgattatatcttttctccagttacttatggaaattacagaagaatcagcagggagttttacgattcatataatgatacattggatttgaaacttagaggattcattcttaaactgttcagtgcagcagaaccacatagccataccattattttacccatgagaaaactggaaaaactaattcacatggggcatgataccattaataaatatatagaccagctaatagaactggacttattagacgaagttggtgattcaaccatattaaaagccaaaggtctcattttagaccaacccaaagataaatatgtggaagaagttaaagctcgctttgagcacatgatagcttataatgaaagcagagggaatccaatttcaagagaatgcatgatttataagaagtgcaaagagaaactatttgaaggaatccaaaacatgcacgcttttatgaaatcattggaaagtggattagttggcacgaagcaagatataaaagacaatgaagaacttcaagatattattttataaatcaaactcaaatcctgtttctatatataaagagttatatacgagataccataccactattttactccccctcatggtaactttaagaaaaaagaatactttaaaaactttctttggtggctgactaaaaaaagaatgcttattaataagaaaactggcacgatgcactattaccattgttaatggaataatttactaagctcctcacttcaaataaagtctctttagggaaaagcacaagaatagcctaagatgcaaacgaagaaattcatttgtgttttaggcttgttcttgtttaatcaattcaatcaataatcatttaattcaattacattatgggaaatttagtaattatgccagctatggcacagcgtaaagaatcattaaacatgggtgagtttgcagaagaagctattattatagaagaagttacaacacccaagagagtaaaccatttcattgaagccaacacacaggaagtaaccttacagcatctcaccaaagactgcatcatcccaagttttgcatcaatggaggaaaccataagtcaccaatcttttataggtgcagtagtggatgcagccaaggattattttcatggagagcagtttgatataccagagattagaatctcacaccctatcaatggtagaataccaagtgcattaggtaagaaagcttcagaactgacagacgaagagaaaactttgttctatcagagaatgtgtttctgttttgaaattccatctatcgtacatgatgaatacggtaatcgtttggctttatctattggtggagtgagagcatataacgagattaacttgtacagtaagaaatctgtggaaaggtttaaaattttcataggatttcgtaatcgtgtgtgctctaatttaatgcttactactgatggcttgcaggacaagatagaagtcttaaatgtacaggaactatatgcagctgcattgaatctcttccatgcttacaacccatccaaagacctgcacctgttaagaacgcttggacagatgtcaatcaccacaagcgaattttgtcagataataggcaggatgagattatatcaagctcttacacctaaccaacaaaaacgtttacctcgtctattgttgggggacagtcagattaatgcagcttgcagggcatttgtttctgatgcaaactttaaaagtacaggagacagcattactggttggcaattgctcaatttgcttaatggtagtgtgaagtcaagctacatagataacttcttagagaggaatcttaactgcacagagtttgtacagggcattcaacgtgccaaattaggagatagtgaatacgcttggtttttgggctaagtgaattattgattgagagagaaaagggcagctattagttagttgtcctttttttatttctaccaatacctaaaacttacaattatgaatatagattataaagtaggagaagtgaagctatcttataaacccaaattcaagaatcagcaaaaagtaacctgttcagaggatgcttataaatatatgctttccacatataagaaaggaactatatgctacaaggaatatttcaaagtcctgttcctaaatcaagccaaccagattttaggatatactcttatttcagagggaggaatcacagaaacctgtgctgatgtcagattaattatgcaagctgcattacttaccaattctgtagctttaattctggcacacaatcacccaagcggtaatctgaaaccaagcaggcaggatatggatattactaaacaggtaagggatgcagcacagtttatgcggataaaaatcttagaccatatcatcctttcagatacagaatactacagttttgcagatgaaggaatgctgtagcataaacaagggcactcaatattttagttgagtgtccttactttataatattcactttgataattagtgaatgtttccttataaatcaaggagttagtaaatccaactcaaaattaatatccacttttattcatttacttataaaacagaacattatgtcacttaaatattcaagcacaacagcagactatcttgtttggtcagatgcaatgaatcttattaggaaactggcaaaagatgataattataaaatatcacttcttatagctttaggttgtttcacaggattaagaatttctgatattctggctttaagatggaagcagataatagatacagacgaatttactgtaattgagaaaaagacaggtaaggtaagaaccataagactgaatccccagctacaggaacatatcagagaatgttacgaacatataaaaccagttggaatcaatgcacccatcttagtaagtcagaaaggtacagtcttttcagtccagagaataaatatcattcttaaagaagtgaagaagaaatacaagctaaagattaagaacttttcctgtcattcacttagaaagacttttggtagacaggtctataatatgaactgtgataattcagaacttgctttagtaaagctgatggaactgttcaatcatagttctgttgccattactaaaagatacttaggattaagacaggaagaaatcttgcagacttatgaatcattgagtttctaaataacaggtaggacaaataaagaacaaggttagctttatataccccaatcaaagtttgtcctacctaaattttaaactccagatatacctaaagtccgattatttgtgtttggcatttcagccttatagtaataggtcaaatccataagtttttagactttaaagccaacttaactcttataatccatactggagataactgtttgtaaatagccaaagatatgttgggataaagacgaataatgtttgatagcagaagatttactatttatccctacatcgtatagaattatttaaaacctttcgctaactttgcaacaattccagtgagttatagtgttagcaagctgaaaggacataattaacgaaaggtgttattgaaattatcttctacattcaaacttcgcaactttgaaaactagcatgaagatggtagcaatagcacccatacttgatatatacctaccttatgtttataaggtttctatatactgcttggtgtggggctattgttttattcatgctagaggtagtgcgaagacctgaatgtagaataaagcaatatagtgtcctcacaccttttttatttattgcttattcaaggggacaggtgagcgcataatatttattgcaatgaaagagctatttcaagtcttagatagagaggatagaatctccatccttaaactgctgtcattattaataaaagaatctaataagtccacctataacgataacagcgattggattttggcttttaatgaagctggatttagaactgatgacatcaacattaatgaaatattgtctaatattgatatggacgtttataatagtccactaaaagattggcaagttcaatcacttaactcaatatgttttctggaaaatattttaatctttagatatgttccagacgatgaagccaaggaaattatctatatggaacgagaagcaaaaacctatcgtaaaatagataaagatagaccatttcctctttgtcccttacctttaatgccagaagaagtacttagaattatgacaattcgagtattaaaactatttcgtaatgacacaaacatttggtttgatgtagagaacctacgcattactttaagtaaaggactggataactcatatttatatttcaatgaacaaactaatgaatttgatatttggtttgaagattcattcatgagatatgttggagggatagagtggaatactcctaataatccatataccacaatgtttgtcaatcaatggtttaagacaggaacaaaaatcgtacttgatgaactatttgagggattctctgcaaatggtttagacatcagatataatgcaaatgttgggttaggcttacatatcatcataaaattgaattaatggatatattttcagtttttgtcacaggattctttgttgggggacttattatatttcttatcataaatagtacaaaagattaaaacccaatctataatgaaatcaataatacatataataatgataatcttgactttatgctcttatggatgtaagagtgataaagacgagtttaaaataacagatgtacaatttaagaataatatttttaaaccattgtacatgaattatgattatagaactcctatttgcaacaaacaggacttagaaaaatatagactaaaaagattaggacaaaaaataagagttacatattacgataaatctatcagacttgagattcttgatgccagcaataacaaagagttcatccttgattataaagggaatgggaaatattctggtgatggaatagatgccattatcgatgaaaaaacatttaataatagcattacaattaacatcaatgcacaagttgaattagatgtagacctcactatctttaaaaaatatgagaaagctaaatctgaaccgtcccaaggttgggaaggattaaacgaaaattactggctgatgaccaataaaagcattataattacagcaaaaaaataaacacattttaaactaaatcatctacaatgaaaatattaaacttcttagctgcttttctgttgttcacactatgcactaatggatattgttacaataataacaaaacaatatacaaagaagaggctacaatacctcaagacgaaattaaaataatcagcacatttactgtaaccgccaaagtcgcaagaatttcaggtatctttcctaatcaatatcttaaatacacaaatcaagtgaccttaacaattgctatatacagcaatagtgtagcttctgttatagccgttggaaataagcaattaggaatcccattgccaataagagtagcagccttccaagatgattacactttcgaatgttcggataaacaaaatgatgtaatctattgctttaacacctctaagctacaataaatatgaaaagacagcatcattaataaaagaacagcatttgagactaaaaactcttatgctgtttttcttttatagagctactacattttaaggaaatatccagattataaaccccaagaaataaaatgtcgtaccaatcatggaagttaaaaaaggaataactatctttgttttgaactcataaacataagatttatggaatatataaatgaatttcacaaagaatggatagaacgcactcgccaatcaatagcatcttggagcaagcagcctatatcgctagaagaaaaaaggaaacagcaggaacgcttgaaccaacagagagctataagagagggcaaacaaaagagctgattgacttcgccaaatccaacaatttatggatttctctttctgaactaaatgttgaatttcttagtaaaggtggagaaaacgaagtctatacaggaaataaagataatatcgttattaaactgaataattttgaatacgcaggtgatgatttggagaatttcttcatccgcataaatgcacacaacaaattatttggtaacgtaccttatcagatgataggtttcgcctataatagccaacaagaattctgtgcagttcttatacaaccttacattttggctgaacgagaagctacagaagatgaaatagctacctatatgaaagcattaggctttgaaatggactattacgacgaatatcataattcagaatatgaagtgtttgatgtagttcctaacaatgtactttatggcattgacggtgatttatactttatcgacactcaaatcagaacacggtcttaatccaaatatggatttctcttacaaacggaattgcattgggaatttgaccataatgcagcccatttttataattagttcttttatttatttacacggagtttatctattgccactatagatttgatttatagttaattaagctggttacagggatgctcggtcctgcttcttacggtatgacagatactatgggtcgtatgcactcagatgcgcaatttgcgggctcgtcatcagttcctgctcacgtagaaatgatgggattcctgggtatcggtaacaacccgatggtaggttgtacagtagcttgcgcagttgacgttgctactgctttgaataagtaatctatacttaatcaagataataaatccctgtaactcaatgagttatggggatttttatttttttatccatgctgaaaagccattcatacatccacaaaaaagaggccgaatcccaatgcgtttcgacctcttcatctattctgccaaattaaaattcttattctgcagtcttttcaaccggtttttcaatgccctcactggtagcacgctcttccatacgcttgattcttaaatcgagatccggatgtgtggagaacaactgattcaatttactggaagatgaaccaccactctgttcctgcaaggatttcaatttctggaatgaaagcgccatggcccagggattcttccctgcttttttcagaaactcatatccgtaatcatctgctgcacattcctgcttctgagaatagcgggcattcaccagcgcctctgtcaagtcgcccaactgtgaatcggtcaatgtagcagcctttccaccctgagaagaaataccgtctttcaatgccgaagtaagcaatgccgtacggaaaccttttttagaatcccgatgagccacatgaccgatttcatgtcctatcacgcccaatagctcttcatcgctcataatgtccatcaaagaagaaaagacacgtacgctaccgtcagcacaggcaaacgcattgacatcggtcacataatacaccttaaagttcaaagggataccgtctgcgtctcctaatccttcagtcaacttcttcaggcgaatggtatattcattgtcatctgcgcaaacctgattgttggcatccatccaagtgatatactcttttacgtattcacccatctgctcatcggtcaacgtcacagcttgagtggctttcacagccccactaatcgctttcttcagattaaactgcgccatgaccggtacggacgatactgcacacatcaggcacacaattgctttcaaaaacactctgttcttcataaaactttcatttagattggttagtcatcatttatgttgtttttaatagttttcggaaaaaacacccaccataaatacacaatgctcctattacgacaagacctcccccaaacactccttccgaaacaggcagatgaacctctcttggacgttcaggatgataccatactgaaatctcatctcccttccttgtaaaaggccagtgactggttctggtcacagataagtccccgtatttttctgtggaataaatgacagtcatctcagtatcgtatctgagtttacgatggcggtaattcttcttggtttcgactctctgtacaattcccactgtatgatggcaattccgggcggccctgcataagggatacaattcggcgactcccgcagaaagtaaaatgaagcccaccacaagcatcacccagggaattattcggatacgtgtattcataagataagtttagtttatacaaagatatagaattacacgtatatccctattcccaaaaggaaaaaatgaaaacagaaaattaccacaaattcatttacggtaatattgtgccaatgaaaaagcgcgccggagcgctatgcgagtgcaaacgaacgcacataaagaacctgtaaaaaacaggactccggtggagaccataatatttcccagtcctacaagcggagacaccacaccgccaaaggcaaaccccaatgcccccagcaaggccgatgccatacccgcatttgcccgttcactatccatcgccaaggtattggatgcggtaaaggtgagtcctaacatggaaagtaacgccaaaagcagcacttcataaatccagaaactgcaaccggcacacaatgccacacacaaaaggaaagaagcgattaccattccgacacttcccctatataaagcttgttccggatgggcaaacctaacagccgaagtcgcagaaatgacaatggctatggcattagctccaaaacagatgctgaacatcaaaggcgaaaagccataatgctcctgcataataaaaggagaggaagcaatattggcaaacaacaccccctgggcaaaaccaaactgaaggatataacatacataccgacggttgtgaatgacggtaagaaaactcttatacacatctgcccaacgtgcattctggcgacgtacagccggcagggactccgcaaaatgcagacttccgagcaacaacaatatacctaatccgaacaatacccagaaaatgccgtgccagcctacactttcggccattcctcctccagccacaggagccgccaccggagccactccattgatagcgccaataatagccagcatctttgccagttccctgccggaatacttatcggctgcgatggaacgtgaaatcacaattcctccggcacccgctattccttgcaccactcgccagcccacaaactgcatgatggtccgtgaatagagacatcccaatgtagccaaaagaaacagacacatggccacaatcaaaggaagccggcgaccatacttgtcactcagcggaccaaagaacaattgcccgacagccaatcctatcatgctggctgtcaatcctaactgcacctgtgaggaagtggtatggaaatagtcagtcatggcaggcagggtaggcagatacatatcggttacaaacgggccaaatgcggtcaatatacctaagaatacgagaataaataattgagaattgcttcttgtcataatgtccttctttaaaacgctgcaaaattagacattatgacgaagttttcaccttccttttaccgcacaaaacttttcaaaatcggaactatcccctctttttatcgaagaaaaaccgtatttttgtttcataaaatcatcttcacatggatatttccttattatcatctctcaccgccatccattatgacgaaggcaatctggcttttctgaaagcctccctgctccatttcgactgtggcatccaactacaatgcaccagcggagaaggtattctctccaccggtgcacagcaatttcacctacacaaaatgtcagaacttattttctgggaaggaagtatcatgcaacttatagaggcatccgatgattttcatgtccgcttcctgctttatcccaagaagctctttctacaggcagccatttcactcgacaccacgtatttcaactacatgagagagtttccacaatacaaccacgaagaagagagctggaaaaacatcagcctatggatgaacatgggacagctgctttttacccagcctccttctgcattcagcgaacggctggaactgaatttcctgcaaggtatgctgatgtggattttcagttccatccccgacacgtacgtatcagtggccgaatcgtacacccggaagcaactcttgtttcacaagttcatgcacctgattcacgaacatgccgcacaaatgcatcaggtatcgttctatgccggacagctctgtatctctccgcgttacctgcacgaaattacggaaacctactccaacggaaagactccgaaagcacttatcgacgaacagctgactgccgaactgaaagtcctgctcaacaatccggctttatccattgcagaaatagcctctctctgtcagtttccggattcttcttacctgagccgttttttcaagaaaaataccggtatctctcccaaagagtaccgcacgcaaaaacagccctgaattacaggagtccgctttccatttcattacgaactgctgccatcataccttccacttgcgccagggcaaacatacgtccgtagaaagagtaaccgggattgtatccttctttttcatctcccagcatcgtacgtccatggtctactcgcatgggcagtccgggattttctttctcaaaaatacggattaactctagcagatgacctcttccttccagatgtgatgtctctctgaaatctccttcgggcaatatttccgtactgcgaagatggacaaagtgggttctccgggcaaaacggcgggccagttcacgggtatcattctggcttccggagctcaaggaaccggcgcagaaagtcagtccgttatgcggattgtccacggcattcaacagccagtcgatgtcttcttcactggtgacaatacgcggaaggccgagcacctggaaaggaggatcgtccggatgaatgcacagattgactccatactcatcgcacaccggcatcactgctttcaggaattcacacagattttctctcagcttctggcggtctattcctttatataatgcaagcagttcgcggaacttacggacggggtattgttctccctcctgaatgttaccgtcgataaacccttgcgtttttacaataatcgtatctatcagttcggccttttcctcaggagtaatacggcagtccagttcttccaccttctgcagttcttcaggagaataatcacgctccgctccttcacgctgcaaaatcttcaagtcgaaataggcaaaacgtatccggttaaaataaagcgaagaacttccgtcgggcaaggcataatgcaggtctgtacgtatccagtcgatgaccggcataaagttgtagcatacagtcttcactccgcacttccctaaattagccagactgattttataattctctatcaaggcatcacgctcagggccgccgtacttgatagcctcgcacaccggaaggctttctacaaccgaccatctcatgccgtacgattcaatatagtttttcaggtcattaattgcctctgtgctccaaacctccccgttgggtacctcgtgaagcgccgtcacaatgccttccactccaatctgccgaagcatggaaagcgtgatgcggtctttcttaccaaaccatctccaagtcttttccatcgttaccgttcccttaaattatactccactgaatgaactgaatcctccgtcgatgggcaaagtaactcccgtaatgaaactggccgcctcactgcacaggaactgtacggctccattcagttctgagatgtcaccaaaacgcctcatcggagtcttagctatgactttccggctacgttccgtcagcgaaccgtcaggatttatcagtacggcacgattctggttgccgataaagaaaccgggggcaatggcattcacgcgaatcttctcactgaacttcaaggccatttcctgagccatccagcgagtgaaattctctactgcactcttggccatggagtagcccggtacacgggtaatggcttcataagatgccatggaagacacattgataatactaccacttttctgtgcggccataacttccccgaacaccaggcaaggatataccgtaccgttcaggttcaagtctaccaccttgttcaagtcttccaccttcatatcgaacacgtgctgcgtttcggtcagcgtacctcccgggatatttcctcccgctgcattgaccagaatatctacccttccccactgggccaacactttttctttcacttcccgcaaactgtccatgtcgagcacgttacaggtaaaaccgcaaacttctcccccggtctttctaagtctttccaacgctttttccacccggtcggaatgtgctccaatcgctgcaactttggctccagccttcaacagaccttcagatatgttacttcccaataccccggaaccgcctgtaactacagccacttttccggatacatcaaacaaactgttcatattatgtcaatttttatctgtcccaaagttagaggagaaataaacatgaacatttgccaatttttgcaggttatttgcgtaactttgcagcatcttactttttccttttcctgacatgagaaagatactcaacgaacaactggatattacagatgcccacccgctgaaggcccggttctacgattacaagaacttcacttatccctggcatttccatagtgagtttgaagtgatttacatcgaaaagggatatggcctgggaatggcaggcgacggtatgaccgatttctccgaccagcaattgtttcttttaggttccaaccttcctcattacctggaaaacgcaccggaatacgacctgaaggaagaattaagagtgaacggggttatcatccaattcgaaaaggatttcatgcaatatgctttctcgcactacagccagtttcaaggtatcaatcgcctgctggaagaggcacaaagggggctgctgttttcactatccaattgcacggataatattccgcagataataaagcgcatcccgcaaaaagaaggggtgggacaaatagtggagtttctgcaactgctggatgcactgacgcatcttactccccaaaaagtcatctcctctccagcctatgacccagtcccagcacggtttaacggacgaaagattgaaaaggtcatggccttcctcaacaagcattacacccagccaatctgtctggaggatgtagcctcatacgcagccatgaacccaactgccttctgccgttttttcaaggaaaacaccggaaagacattcagacaacatatcacagacatgcgaattggctatgcctgcaaactattactaaacgggaaatggaatatttcagaaatcagtctggaatgcggctttgaatcagtcacacactttaaccggtgctttaaaaagcatacagggatgacaccgacttcttatcggaagaaaatccaatgaacgtttgaatgaaggctttttttcctaatttatagacacaaaaaaagttgaacaacactgtccaactttcctgagcctcttgtcggattcgaaccaacgaccccgagattacaaatcacgtgctctggccaactgagctaaagaggcgataatcatgtctttttttgagcctcttgtcggattcgaaccaacgaccccgagattacaaatcacgtgctctggccaactgagctaaagaggcgggtgggtaagcttaccatatcgcgccgctacaaccaactacctttgctgcgatcaagccctggaggattcgaagggagctggccgtatgggacttacccgtatttcaacatgttctcgacagacatcttatcgatgtttctcgattgcgggtgcaaaggtaggcattttttttgaatacgcaataccttcatgaaaaaaaatataccaaaatggtaaagaatatgatttttcagtctttttatataccacagctcactgaaaaagactacttttgtaaccattatcaaacgtaactatcatgacaacagaaagaccgataaccttacaggaatacgccatgcggtttggaacttacatgggattgttctggattttcaaatttatcttcctccccataggcttttccatcccgttgcttcagctcctgtttatcctgatgaccctctttgtaccggtgttaggctacatttatgcacgccgctaccgcaaccagtatcatgaaggcaatttttctttcactcaggctttcagtttctgctttctgatgtatctttttgcttctatcctgacagcgctggcacactacgtgtatttccgctttattgatcagggttatttgttgaatacgtatctggaccaactggaaactataaaggattccgtaaccggcgacatgaagatttccgtagaacaacttatcggcagtctgaatgtcatttcttctctcagttctttgcaactgacctttcagctgctttcgcagaatttcttctatggaatcctgttagccattcccaccggtctggtagtcatgaaaaagaaaaactaatcgctttagcaatataaatatggatatatctgtagtcgtacctctatataatgaagaggagtccttacccgaactgtatgcttggattgaacgcgtaatgcatgagcatcattttacctacgaagttatctttgtaaatgatggtagtacagaccactcctggcaggtcatcgaagagcttagccggaagtcaaaagaagtgaaaggcatcaagttccgccgtaattatggaaaatcacctgccttattctgcggattcaagaaagcagagggagatgtaatcatcaccatggatgctgatttacaggacagtccggatgagattccggaactttaccgcatgattacagaagacggctatgacttggtttccggatggaaacagaagcgctatgacccgctgtcgaaaacaatcccgaccaaactattcaatgctactgcacgtgcggtttcgggaatacataatctgcacgacttcaactgcggactgaaagcctatcgccgggacgtagtgaaaaacattgaggtgtacggcgaaatgcaccgctacattccctacctggctaaaaatgccggtttcaaccgtatcggagaaaagattgtacatcatcaggcacgcaaatatggaaagaccaagttcggactgaaccgtttcgtcaacggatatctggatttgcttaccttgtggttcttgtctaccttcggcgtgaaaccgatgcacatcttcggcttcttaggttccatcatgttcatcctgggatttatcgctgtcgttgtagtaggcgctaccaagctctatgacatgtattgcggcaatccttatcgcctggtaactgaaagtccctatttctacctggcacttaccaccatgatattagggacccagcttttcctggccggatttatcggagaactgattgcacgcaattctcctgaaagaaacaactatcaaatcgagaaagaaattgaataatgaagaaactaccgattgtattaggtatcctcttggtggcagtcgtttcctttttcccagcttgtgaagtggaaaactgtccgcccaatgcactggcgtatgcccagtttgcatttgttgaccaatatggacggtctgtgcagtacaccgatacactgacggtcatcgggcagttggagaccgctgatacgacaatttacgacacgctgattaataagtcaaccaacacaagtacgctcagcctaccgctcagctacggagaacaaacccggtttatccttcagtatgccaaccgccagcgagacgtccttacaatcacccaccgcaatattccttactttatcaacctggattgcggtaccatgatgttttatgaagtcaccggtgcggaaactactacccgtatgctcgattcgcttgtcattaccaatccgaacatagataattatgagaaagagaatttcaagatatatttcactatttctgatactaacgagtagctgtcttttgctttctcccttgcaggcacagaaaccgggcgtacataaagcaactcccgcagagattaaaaaggaagacaagaagaaagctgagccgacagagtctgtcccgttctatcagggcacgagcataggagtggaaattgccggactgggaagttacctgttaggcagcgacattctgaatactgaaattgccgtacaagccaacttgaaaaatcgctttcttcccgtcattgaagtgggatacggaaaggcagatgccataaatgacggaaacaacctgcactacaagacttccgctccttacttccgtatcggaatggattataatgtgttttacaaaaagacacatctcccgggttatttgtatgtgggtcttcgctacggcatgagttctttcagctatgatgtagacggccccagcatgaccgaccccaactatggtggagaagtctcctatccgtttgcttattccgatatgaagagcagagccagctggctagaaggagtgctcggacttaaagtgaaaatatacaaaggtttctgcatgggctggagcgtgcgatataaaatgagaatgaacgtggaaggtcatgacaattccattccatggtatgtgcccggattcgggaaaaatgccgggagcagctttaacttgacgtataatctcatttacaacttacccttctgattcacatgaatttaatcgaaaccatcttattgtccgtcagtctggctatcgactgtttcaccgtatccgtaaccagcggaattattttgcaccgcattcaatggggcacgtttttacgaatggcttttttcttcggactctttcaagcactaatgcccttcttgggatggttaggtgccagccgtttccagcatctgattgaagcctacgaccattggattgcctttgccctattggcatttttaggtatccgcatgatacgtgcgcagtttaaagaagaagagactgcttccttcaaccctaccagcctgaaagtgacactggcattggctgtagccaccagtattgatgcattggccatcggtatctcgtttgcctttgccggattcaaacaactggaaagtctttggatgcctctgaccagtattggaattgcctctttcgtactctcactggcaggaagcctcatcggcgtattcttcggcaagcgttttcacctgcgggtggaaatcttcgggggactggtgctgattggcatcggtatcaaaatattagtagaacatttattcttgcaataaaatcatgaacaaaaacaacttaaaatggcagttgccgtttcttgtattgctcatcgtaggaacggtactgattctgagaaaacaatctccttaccagaccgaccagggactggtattcggtacggtatataagattacctaccagtcatctgagaacctgaaagcggaaattgagaaagaactgcaaaaggtggacaattccttgtcgccgttcaacaagcagtcggtcatcacgcatatcaaccacaatacagacatgcgtgccgacagcctgtttgcgtatgtgttcaatctggccaagactatctccaacgagaccggaaaagcctatgatgtcaccgtagccccactggtcaacgcatggggattcgggttcaaacattcccagtttcccgattcactgaccatcgacagcctgcgccagttcgtgagtatcgacaagatacagctgaatgcagagggagaagtcgtcaaggccgacccgcgcatgatgctcgacttcagctcgattgccaagggtttcggcgtggattgtgtcgcccggctgttcgaccgcaaaggcatcaggaactacatgattgacatcggcggggaactggtgctgaaaggacaaaacagtaaaatggagccttggcgtatcggaatcaacaaacccatcgacgattccctgtccgtcaaccaggaactacagaccgtattagaaattaccaatgccggtatggctacttcgggcaactaccgcaatttctattacaaagacggaaagaagtatgcacataccatcgaccctcgcacgggatacccggtacagcacaatattctttcatctaccgtcatcgccaaggactgtgccacagccgatgcctacgccactgccttcatggtactgggactggattcagccaaggccatctgtagtgcccatcctgagctggatgcctatttcatctactcggacaaagacgggaaattgcagacttactccactgagggtatgaagaaatacatgcgaaactaaaaaaggccttgtccaagacaggatataaaaaatgccggaacgtaaaaaatacgctccggtattttttatcttatcaagatactacaccagccttcttcaggcaaaaatacccgtaacaatcttcttttcccagtacttcttaggaagtactgcagtactgccgtgaaagtaccagagtactgattagaaagtactggagtactgccaaggaagtactgacacatcccagtcgttcaagaaaagaccttgtaattatcctaatacatttcctaaatagaggaagaacataccaatcagcactaaaatcaaatcaaccaccttgctcttcaggttcttctcgcggaatatcatggcaccaaacaggaaggaaaccaccacgcttccccgtcgcaccatagacacgatggaaatcatggctccgtccataccaagcgcatagaaatacacgaaatcagccgccgacaagaatacggaaatcaggataatgcaccagtcccagtgaaacggtgtactgcttttccgcttgggccaccacaagaacatcagcactcctcccatcaggaaaagctggtacacattgtaccacgcctgtaccaccatgttgttgaagcgtcccatcaggtatttatcgtacaaaccactgacagcacctaacacagccgccagcaccacaaaccaaatccatttgtcgtgcttgaaatctattccttctttctttcccgaacggctcagcatgaaaaacgaaatgatagccatcagcacaccaatccactggtacacattcaagcgttcaccaaatatcagcaaggcacctaccagcgtcatgaccggacgggtagcattgatggggccgacaatggtcaagggcaggtgtttcataccaaaataaccgaacgtccacgaagaaagcacgataaacgatttcaggataatgaacttatgcacctcccaacctgctgaaggcacgtaaaaaagcgtatcctgcaacgcctccggatgaaagtacgaaactaaaataaacggtaaaaaaatcagactcgaaaacagcgtgttcagtcccagtaccggaagaaccgcattgtttgccaatgattttttcttgaagacatcataaaagcccagcaacgccgctgagcaaaaagccagtaataaccacatgttttcttgatttttgtaaaccgccgcaaaggtacgacaaaaatcccaaactcattgcacaattcaaaaactctctctaactttgaatgaaatgaacgaacaggtaatacaaaaactaaaaatcctgactgaatccgccaaatacgacgtgtcgtgcgcttccagcggtacttcccgtaaaaacacacggggaggagtcggtaatacagtaggaggatggggcatctgtcacagcttttcagaagacggacgctgcatttccctgctcaagattatgctgaccaactactgcatctacgattgtgcctactgcatcaaccgggtaagcaacgacattccacgggccactctttccgttacggaactggtggagctgaccatggagttctaccgaagaaattatatagaaggactatttctcagttcgggagtggtacgcaaccccgactacaccatggaacgcctggtacgggtggccaaagacctgcgactggtgcaccgtttcaatggttacatccacctgaaaagtatccccggtgccagtgaagaactggtacgggaagccggactatatgccgaccgtctcagtgtcaatctggagattccgacagaaaagaatttaaaactgctggcaccggagaaagatcaccagagtgtgtatcttccgatgaaatacattcaacaaggcatacagacctatcaggaagagcgcaagcactatcgtcacactccccgctttgctcctggcggacaaagtacccagatgattgtaggagccacccccgaaacagacaaggatatcttgcaggtatcttcttcgctgtatgaagaacctaccatgaaacgagtgtattattcaggctatatttcggtaaatacgtatgacaagcgacttcctaccttgaagcaaccgcctctggtacgagaaaaccgtctttaccaggccgactggctgctgcgtttctatcagttcaaggtagatgagatagtggacgaccagagtcctaatctggacttggagattgatccgaaactggcctgggcccttcgccatccggagttcttccccgtcaatatacagaccgccgattatgaagccatcctgcgtgtgccgggcatcggagtaaaatcggcccgcctgattgtggcttcccgccgtttctcccgtatcggattttacgaactgaagaagatgggagccgtcatgaagaaagccaaatacttcatcacctgcaatgagctgcccgaaaagaccattcatgagctaggtgcctacggagtacggaaacttctactccctactccccgcaagaagatagacgaacgtcagctgagtttcgactttggagatacagaagaagctgcccccacaaacgagtgaaggcagcttccttacttttatgcattctacattttcagcggatagaaacttccattacaggctgttcctttatggtatccaatggtaccgctctgtacttgacacgctgaaaatcaatcttatttaaatcaatgctacgtatagcagaattatacatggtacgataataaatcatccgatgccgcatatccgtggccgaagtccactgtgtagcacttgggatattgacaggcacttttccttccgcaaactcaattcccaatggaatatcaaagttgttcaaaatctgaaatccttgaagtacggtctgacgggcattatcctgcacaggagctgtagcctgataaaaggcagcccgcacaaaacgggagggaggagtcacatcaccgggaatacccaagaatccgcttccagccccgaaagaacgaagagccacattccctaacgactgaggttgggcactgcccggatacagattgacgtaattattcaggttggtcagttgccattcaaatcccggagagttagtcagtactcccaagttgttttcaaagaaatgcaattcaccgtctacgatttccaataccacctgacgtcctgacacatcggcaaaacgccagtgtacagtcgatgcacgcgggtcaatggccactacatgtacctgcttcaggctttccatcacttcatccaccgtcttgcagttgcctaatacccaggaaaccaactgcaaatcggcaatggaagacgatttatactctgctttatacgcttcatactgtccgtaattcgggaaatagaacagaccggcagagagaccttcttcgttcaaaccttctgccacaaactccttttgttctaccgcaaggcccacatatccatattttgccgtaaatttcatgccatcctgtccgccgggcacatacgactgaaccgtatagccacgtggcaccaccacatagcaactgttcaagtcacttccaccccattcaatggtacgggcaagaatgcgtgtgctgtcttttgctgtcaaggtgatacctgtgcaagcctgagcaggctgtgactggaagacggccactgtggccatcagtcccaagagcatagatttgtaattcatcatttaatctgtttttattatataacaaaaaactattccttttgtttcagtttatcgtttttactacttttgctccctgaaatcctctatacacaaagatacgaaattctcataaaccatgacagtttttcaatacgattccacttttgaaggtctgcttaccgccctgttcgatgcctattatcgccggacttttcccgacctgctgcttacagagaaggaaccgcttccgctttttcatgaggaggtacatcaggtggtaacagatgcggaaaagacagaacgggtttggaaactgttatcacgtaaactttcccgaagagcacttgcctcccttacctattgctggctttcggaaacaccggaagcagccatgctcctttttcgctacatgcggaaagtaatcgatgcaccggcctctatcgaacaaaatttcgcagacccagatgtgttaggagtgtatcagctcagcaaaaaagtagcagacgagcgaatgagagtacttcagttcatgcgctttcaaaaaacagccgaccaggtatatttcggtatcatggaacctctttataacgtctatccactgaccatctatcattttcgcgaccggtttgccgaccagccatggataatctacgatgcacgccgtcgctacggctactattacgacctgaaagaggttaacgaaattacatttgaagactctcgtgctgccttcctgcgacatggcaagttggaagatgagctgctggataaaaatgaaaagcttttccaggagggctggaaaagctattttcacagtgtatgtattcaatcccgactgaatcccgtaaaacacaaaaaggatatgccggtccgtttctggaaatatcttacagagaaagactaacccagcgggaataattcatccggatagcctatatcgaccaaaaagagtgcatgtcccggtacggatgtacctgcactgcagcggttcttctcttctatcaccttccggaaaccttccaccgaaagtttgccgcgtcccacttctaccagcgtaccaacaatggcccgaaccatattccgcaagaaacggtctgcctgaatggtaaatacccattccgtttcgcttacctgctcccagtgggcgtgcataatcttgcagttattggttttcacatccgtatgcaatttactgaagctcgtaaaatccgtgtaatcgaacaaggtctgtgctgcctcattcatctttgcaaaatccaaaggctggaacaaacgccagcaatatgcccggttaaacggattcttctgtgtggtaacgtagtatttgtacgtacgataagtcgcatcaaaacgggcatgcgcatcctgattcactctccgcacacggtacaccgatatatccggcggcagcaaacggttcagtttatccgtcaccgtatcttcatccagcatccattccacatcaaaatgtgccaccatcaggcgggcatgtactccagcatccgtacgtccggcccccaccacttcaatggcctcatcccgcaagaaagtatgcagcgctttcatcagcgtttcctgcacactgcttccgttcggctgtatctgccagccatgatagttagtaccgtcgtaagccaaataaatgaaatatctgaacataacttcttgaattatcgggcagtaatatggaaacaaccttgtttcaattcgtatttcacataacagcggtctgccttacgaaggtcacgcaatacttccgacagcaccagcttcaatgtatccgaacttacatcctgcataggacgaccatcggggtcttctaccttctcaaaacgcttccagctcacatcaaacgtagttccataaaaatggcaggagttcagcgaagcatttccgttggttctccgcagacgctttacgtcatccttcgtacgagtcacggacgttacaatgattttattggggttcagtcctttgttttccagtgaatccaagaaattaaccccgatggtatccagcaacgcactggcctgaggtatcaggtagggaattgaatgcgtcaaagagtccagaccataccgttcacaagcggcaatttcaatcaaccggtccttcatttcttccgcctcttcacgggtactgataggacggatacctattttcttggctgtagccagttgcacatcattcaaatctccaaacgaacgtttatagctgataactcccctgatattgcgcggattgttcattttcattgacatgtccttttccttacatccagccagacagatgccagcaaataaagccaccgccagacatgacttgatcaataatttcatttcttttccatttttaattccatgcaaagatagcataaaaagcaagaagcacaaaaccaccgaataaaggtcaggacaatacacattattacttttggttatcacgcataaaaaaatgtaaataggacattccatggaaatcttctatctttgcgcccgaaataaaatcaaaatcactaaaaacaaactgatatgttcaagaaaggaaacagagccaataccctccatggtattttattgattgcattattttcttttgcagccttctacattgccgaaatccccttcgtgaaaagtctttctttcagtccactgattgtgggtatcattttgggaatgctttatgccaacagcctgcgcaacaaactgcctgagacatgggttccaggtatcaagttctgcaccaagcaggtgctgcgtgccggtatcgtactctacggattccgtctgacactgacacaagtagccgccgtaggactccctgcagtggttatcgataccatcatcgtagccggtactattttcctgggcatctggctgggcaaactgatgaaaatggacaaagatacttctctcatgacagctaccggtagcgccatctgtggagcagcagccgtattgggtgcagaaccggtggtaaaatgtgaaggacataaaacggccattgccgtatctacggtagtcattttcggaaccatttccatgttcctctatccgattatgtaccgtgccggtatgctggatgcactgggagatacgggagtagccatctatacaggaagtaccctgcatgaagttgctcacgtagcaggagccggaaatgccatggacccgaccgaatcattaggaattgccggaacagctaccatcaccaagatgattcgcgtcatgatgctggcaccggtactggtcatcatgagctttgcattggcaggacggaaaaaagcaaatcctgaaggtaaagccgaaaagagcaaaatcactattccctggtttgcatttggattcatcggtatcatctgtctgaactccttgctgcaataccttacaggagccgagaccgtaaaagatattccactgaacggtgccattgagtacatcgataccttcatgctgacaatggccatgacagcactgggtacagataccagtctggagaaattcaaacaagctggtgccaaaccgttcttgctagcaggactgctttacatctggctggtaggcggaggatacctgctgacacaatatatcactccaatgtttgaataaaagattatcttcaaaaacaataagggcaggcgtaaacaaatacacctgccccttattgtttttacatgttccgatactgcttgggcgacatgcccgtataacgtttgaagtatttcccaaagaaggaaatatccgaaaaattcaacgaataggctatttcctgtaccgtcatatccgtagaacgaagcttagcctgggcatcgcgtatgataaacgaagaaagaatgtcggtcaaggtctttccggtaactttcttcaccgttgtactcagatgctgtggcgaaagatgcagcttctcggcataaaaagacacattgcgttccgttttataatattgcacaataatacgaaccagttcctttacaatttcctgatttcgattgtatctcggtgaatcttcttcctctcctcttttcttgtatacactgcctaaagaaagaagcagctgcgtataaatcaaactgatttgcattccgctcatttcttcttttatcttctgccggcgaatcaagagacggatactatcccggaacagttcatatacgtctttcttcatctcaattaccggtcgctcaaagatataaggagtatactccacggtataagaaaacaacttggctccttctatcagttttttggaaaaaccgacaaaaataaaccggcagtccttactctgctcctgaatctgaaaaaatactcccgggaatataatggccaaagacccttctttcaagtcataacatgtcaaatggattttcacccggcaactgcctctaagacagagcagaaaagcacatcccggaaaaggtgccgaagtctggaacaagcggtaaaaaccacccgtcatgtctatacccgccaccatatcctggccttccggtaacaaatcaagtctatcaaatcgcttcattccttaatttcttctataggtgtcacatcttgtatgttcttgttctttttgcggaaacgcaacaaacggaccatatccatcaatgcatatacaatggaagaaattcccaacacaataaagggtatctcagccgtggcaaacggattgaacaggactgtgattcccgccgccaaaatcaatacgggcactatatataccccaaatggaaccggcatgaatgaacgtgcagcaatcaggttagccaactgactgataccgcccaacaccaacagaatgcctaacacatacatcagcactccgacaaagaaagaaggcatgataatcagccatacaccgaaaagtgtactgcctaacgcaactatagggaaaaccggacgaggagcatccgccttactcttgttcaacagggccagataagaaaacaatccgaccagtccgggaataaggaacaacaccccgatagtaattaccaaataactcactgctacatctggccatgtgaccaataatataccgataactaatgcacagagcgaactgactaatgcataattcaaagatttcatacttcgtccatttttaaattcactatccaaaggtaatgaaaaactatcaataaacaaatcattcgcccaaaaggataaaaagctatcacttatccggcataactgtgcattcctccgagtacatagtttacgccgaaataggtcatcagtatggcagagaacgaaacgattaaaaaccaatgaaaaaagtacggatttctgaaacgagggatactttgcacatgaaaagccattccataaagcatgaaagtaatcagagcccagacttctttcgggtcccaggcccaatagcttccccaggacacgttggcccataccgcaccgataaaaattccgattcccaagcacaacactgccggataaagcaagacccgacaaaataaagtcagccgttgccgctgccacgtatgccgccgaatacccagtgccaggatactacacagacacatcaaagcaaacaaggcatacgacaccataatcaatgatacatgcagactcaaccagggtgacagcaataccggcatcaacggggttatctgcggattcatctcgctcagataagctaccagcaaggtaaaaccggaaagcaataaaccggctggaagcaaaaacgagaagcgccgctgccatatacaagtacacaataacagaaatcccgctaaaaaaagcatcgtttcgtgtccgtttcccaaaggaatccgtcctccaatataccaacgaagcaaataagaagtccaatgaaacagacaggccatccatacagcccacacccatatccatcgccacctactcctccagtttcttgccttatcgccttcttgcatcacacaggaatagatccaccagcccaaagctagcaaacctaaagaaagattagccataaacaaaattttagtgaacggtaccgcatgatagaaaatctctgcacgtattcttaacggagataacggagtgacacttccatcctccggcaaaggacggataaaagtacctttctgaagcatcagtaccataccggccttctcatccagttccagcacttctttttccaacttttttgcctgacggttctccaaccagcctttctcatgcgtatttcgcacttcgtcctgtagtctctgcaacaacctctccaatcgataggtctttccatcgaacaagtctaccagtgcggcatactccgatttcaatcccaattcctgcctcaaccgttcacttttcactcgaaacatcggttcgtgctgccattcttcgggataaagtaaccaactggccaccacctgttccggtgtcaaaccatgataagaaggttttccactcaacttgataacaaagtcacgggccagggtatggaagggcgccacacggtcgtggtatatcacctgacgcatcttcagcttttccgcatcctgacgagccaggacactgaccggacgagcttgagctatcaactggaaagcgcatattcctagccataccagtcccgtttttctccatagcggatgacgtaacaaacggaaaaatgtctccttccggctacctaacaaccacaaggaagagaaagccagacacaaatacccggcataggtcacagcaattccccaagggtcatagtttacactcaaccagcttccagacaaatccggttcgtatgatgactgataaaaacgataaccctctacagaaagaatgtgattcattgaaattacctcttctttccattttccattcactttataactcacgtaactcttgtaatcagaaggggcttccgttcccggataataaaccaccctgaagctgtccagagaaaggctgaaaggcaacatcctcgtttgctgatcggaagtccggataaaactcttcacttcttgcccctgcaccagatgtacataccctttttcacctgtcaggtaggtaagcatggcccctcccagtatcactaaaagagagccatgccaccacaagaccgggagacgcttccacagccggcatttgccacatgcccgcacaagcccgaaagccagcgcaccccacaagccacaaaaccaacaagcatgatatatatgtgtctggacaaaagttgttccgtatgcatgctctaaaaaagtagctatggccaatactcccatcagcaccacataaagaactacccagacgtttttccacagacgttctttcatacaaactaaaaatcaggatacggtgtatgcttcatcatttttgtgcccatgcactccatctctatcagccaacccggacgacagacaggagccaatagaatcacttttggcatttccgggaaacgctggtcgaacatctcccgcaccacggcataatctgccgcatcgcgcaggtaaaccaacatctgtccgatgtcatcgaacgacatttctgcttccttcaacaaggtctccacgttttcccacatgcgttcggtctgtttccggatatcacccggatacaccacttcccccctgtgattgatactggccgtaccggatatgaaaacctgacgtcggtcgccataatccacatacgtaccacgctcaaaacttactccatactcatacgtaggattcagatgagtcggtgcatataaataatgaatctgctcctgacggatacccaatacggcatacgtatccatctgtaccagcacctgcttatcggcatgacgcccgccgataccggtactggctatataatgtgtttgtggtgtcaacccctgcgtcacaaacacttcgttacgggcttttaccactccggcataattcacatctacattctgtacaaaaaaccaggtacgaatgcagttctcggccagatgccctccttgtgcaatcagttgcaggatataatcattcagcagcaaacgggtctggtattccgagttggccgcccggttagaagccgaaccaccccacagatggcggtaagccccatgtgacacttcaaacaatccgctttccagcgcacgacattgcacaccggattgcagatatacccataaagctatttttgttccgttcagcgggggctgttccactatcgaacaggcacagaccgagctttccggcacctgtaccgccagccagtcgacctgattggcggcatcgcttaaaaaataacgcttgaacacagcaacagctcccttcaactcattctccaacaattgataatacgtatcgagtaaagtatccaattgttcctgatacgtcaaagaaggacgagtaacgtgaatcatcacatggtattcagcgactccttcagccggttcaaaacgtgaaatttctactaatgtattttcttgtgacttgtggtttcgtagttgtttgtggctcatattcatactatattaatattcaaggtttggcacctccatttatccaatcatctatcaagttcaataataccggctcagccgaaagaatatcctgatggtcatggtgcacgtgaccgttttcatgcagtacctgatacagaaagctgttttccgcatctgccagtttcaccctcatgacttccggattcactacagacgggacatttaccagctgttcatagctttttcctgctgtcaggaataaatgtcctgccgctgaagtgcttcctccatggcaactggcacagcgggagtcaaacacctgctgctgcacagcctggaacatgccgacttgctgttcacccacgtccatacgaatcgtgtcttctgccgtttccgagcaatcgaccctggcaaaggtcactacccgctcccgaatgcggttaatcacgcacaattcgatttgagtgacttcatctgtcactcccgacatcaccacctgcaccgtaccatcttctcctgcctgcgaaggcatcacattggcagaagtcagtgcatattcactcttcgcatcaaaaccggccacggctaccgtatatccggaaggccaggtatccatacccgttacctttccggtgaacttcaccgtacgtccgccctctgccgtagcaggcaccgcttcatagatacgtccttcatcgcaggaaaccaagcataggattcccagccccaagagtatccatccatacacctttcttttcatcacaccctcctctttagaacgtgtactgaagcatcaccgtggcattatgggtcgctattcccaagtcatcattatcgcggtcaagttgtgtatcgtgcccccagcgccctacaaactgatacatagcttgcagtttcagattgcagcctttaaagaagtagtttactcccacagctggcatattcatgaacccgtttgtatccattccgttgcggttaaagaaatcataacgtgccgtagcttgcagacgggaagtcacgaaatagcctccctgcacgtatcctcccagatagtgatacccctggtcaattttctgccgtttggtaaagcccacgtgcatgtaatacatttccgctcccagatagagttttcttttcaacatggcaaactccagtccggcacggtaatcgttcgtactttcgttctcactctccacattcaatgaagtggatactcccagcatcagcttgtcttcattcagccggttaggatttccctgcgtagaaggcatcactcctttgggcatgtaggtaaaacgtccggcataaagcaaggaaggaatgtgccagtcatcactgaacgtctttcctgccgtattcaccgaaatacctgtaccgttgaatagtcccacttcataaccaaacttgtccgccagcagaccgtgtacttccactcccaagtcgaatcccgttccgatattgggagtcacggcattcaacgaatagggcagaatcaccggagcggtcagcgacagcggcaaggaaggcatcaaggtttctcccaacgtagtcaagtaagcatgcgaaaaaggagtcttaaacttacccacgcggatagaaaactgttttttcagttccacatcaaaccaagcctgttgcaacaaggctgcgcccgtagccgctgcattcagtgataagttgaacgacacttttccaaacgcttttcctgtaaagcccaacacggcataaggaatagcaaaaccggaattggccacattgtcctgattataggccttgtccagcccttcatcgtcataccagttgaaattggcacttgtctgtactaacagataaggcttgaacacaaaatcgcctttcttggaagcgatggtaaatccctctcttccagccagcgacacgataccattttccgtatcttcttcatgttgtgccagtgctgccaatggcattaccgcagacaggcacaaggcagtcagtatttttttcataagttatcagtttctatacttaatgattaaagtgaatttaaaaacgcaatcaaggcatcacggtcttccttgctcatgcgcttaaacaagtttttcgaagcttctgcctctcccccgtgccacatgatagcctctacaaggttacgggcgcgtccgtcgtgcaggaaataggtatgtccgttcaccacttcctgcaagccgatgccccataatggagtggtacgccattcattaccccgggccaaaccactcacgtaattgtcgttcaaacccacacccataatttccgaccccatatcatgcagcagaaagtctgaatacggatggatggtctgattgcccaaccacggcagttccgtaccgttcagcagggtggctcctcttacttttgtgtgcagcgtagtcacatggcaaagatggcatttcgcctcatagaatttctgttctcctttctgtacctgcggatcattcacattccggcgggccggcacacccagacagtgcatatacaagtccacatcctccatgtcctcggtcgatacgtccaactggtcgtacgaaagtcccatcatactgccctggtccatctgtatctgtccctcacatatctcctcgggataacggctgttggtcacccccatatcactggagaatcctaactccaccgtcaaatcggcatgctgtgccttgttgcccgaaagtcccaaacgagttactccacgctcactgatataattacaccgtccgctaatgccgtattcggggtaattacttttggcagccaatgcttcaatttctttctggtcgagcgccatcatctgccccattcccacatgacgtaacggtatacggacagaacagaacaaatcttccggacggatactgtcggcataccactccgtaatggtataggttggcttgcaaagctcataagtttctccatcgggaaattcgaatgtctgataatcatacttcacagacaatttaccctccggcttcaccccataaatagcctggtcatgaagcacacgcccatagttctggaagaacgctccgttctttcgggtgatatataccaacatggaagaaaaaccgtaatttcccgaaccgccttcactccacaaggtaggcttggtacgtcctgcattccggtgacaacttccacaggaataaccggcatacacgggacccaatccgccatcctggttactactggtacgcacatcgtcatacaatccatctccgtcgttgaaacggctgctgtaaatacccgacagccacgacgcttcaaagtcgtaagctttcgaagaagtcagaaaattggtagctgtaccggctgacagtgcaaagccttccggcacctccacgtactgttggtcagttccttctttctcacagctccatagaagacagggaaaaagcccgtataacaaaagttttactattctcatttattcttctcattttcggaaacatacagaggaagcaaaggagggcttccccttctttactcccctgcctgtcattcatcaaaaatttgtcttcatgcttaatctaccgtacgtgcttgtccgtctttgaacaacaggaattccagggtatggaaaccacgtacattctgtgcggcagaaatggcttcactgtcttctgagtagtcgccactccattccatctggctgtaatctcctgaattcaggatattcacgatggcagcctggtcaagcggccagctgtccatattcgggtcaagcccctgatcggctaccgggccaaacaagaaagcctcacttttttcccatggctcacgggcagtaatccaggcatcacaagcatccttgaaagcctggttggttgggttggctgccagcgcattcactttatcatacaaagtagccactctgtctttcaagtctgaataagtgggtaataccactacatccacgtagttctttaccaccggactcagtactgcttccgataatgcatcacaagccggttttacctcatctttcagcaagacactcagttcactgcaggcctcctgagccgccagactctgttcgctgttgatatggttacggaacggttgcgggatggctaaaatcttatcgtaagcattcttgatagccgacaaagtattatctgccagttcctgctgcccgttgctcaccaataccgcgtacaaggattgtgcggccacctgagttttatcaatagcggctccactaatcaaagcctcactacgcacaccacagaaagcattacagatagatacgatgttattggaatagtcttcgcgcgaatgccagctataccaggattccacggcatagagggcttctgtcaccttccctgcctggtatttggaatacgggtcaccgatttttgtttctcccacctcattggcaatatctacacaaccgtctatcacttgctgcacgcaagaacctgcactgttgaacggtgccccatgatttttaaaggtcacggcataactttcacctcctttgtaactggtagcccagtagccgtacaagtcggaagcatctttacgaagcaaggtaaccactgccttcatgtagttgttccagctcgtcgcgttttccgacgtatagtcaatgttggccgcatcagtcggttctgtcggtgtgtcttcgttactgcacgctgtcatcgaaaaggtcagccccattgccaaggctgccgcataaaagaaattctttttcatatacataatagttttaggaattaatgattcatttcttgaaaaaccagccgatgtaggccaagccaatggaaaactcattttcactggtatacggtccggtaccgaacatttttcctgtaccaatctgacgggtagtatagtctgccttcactaccagattaggcaaagcaaaccaattcaacccggccacccacatgctgaccttgttgcgcaagtccatggtctgccctgcttctcctttttcttgcggattatagtattcatagcgaacaaacggataaatcacaggaactttgggattgtgattgaaaatggaacgcaggttcacacccacttctccggcatagctgaccgcatttttagctaccggaaccacgcggctataagaagcgttgttcgacaaacgtacattcttgctgctgataaatttggagttcgtcaggttaccatagaccacattggcccgtgcggtcacatagtcattcttgtactgcaagtcgcctgaataaatccgtagcgatgctttctgtccctcgtagaaattgggcttgtcggaattacctgccgtattggcacaataataaaaagaacctcccacacgcagccccggcactccacggtaatctacacgaagcacataacccggagagttgaaattatcttcctcaaacaaaccctgcttgccgctggctacccaggtattccggtcgaatccgttggcattcagtccggccaccaccagcacctgatagtcgaaagtggcatatccttttcccaacgtaccgaaaaactcaatacccgtttcatgccaggtagatggcaggatggtggtttcaccctccggtcgcactgtgccgaagaaattaatcggctcatgatgtgcattggtcagtcccaccggcacaatcatgtgtcccgcccgcacattgaaagccggatgaataaggcgggtgatatgaaactgctccaaggccacttctcctcctttttccatttccgtttcatattcgccgttttccgagttctccagctccatggcagacccggttcctccagcttcaaattcgatttctgcactcagaatccatttcggagtaaacttataatccattgccagcacaaagcgcggaatagaaattgtgttccgatgatcacgggtgtttccatttggatttccgtaataacggttgatgccataatccttaaaactagccacagcttctccatagcctcccacacggaaacgggtatattcatcattgtccgtacgctgtttacgtgctgctacatttccatgcacttcagccacctgcaccgaatcaacttcactggccgaaacagctcctacggcacagcaaagagcggttaaaaataaactaactttttttttcatttctctgcgatttttgaacaccgcaaaggtagactacacaaaaaaggctatcaatacctaaaaattacgaatttaacgaacaaaaaaatacccaattataggtagaaggaagtttctttatagttcaagaggcacatcgcataagtcactgatttactatcacatataaaaatcaggaataattcagcctgctgattcacctcatctaacacctgaaagatacctaaaaaagagtagtcattctataccaatgagacaccgaagcttacttataaaacaaggtaaaatcaaatgaagaaaaagagaaatctcagtacacttcagcacgtatttgcacttcaagccaaaacgcctttgcgttcaatcccaaatgcacttacgtttaaagtcaaacgcacttgcgtttcaagtaaaacgtacttacgtttaaaagcaaacgcacttgcgtttttacgcctactccattaagcataaaaaagagggatacatcacccgatgcatccctccttctatcttataaacacaatttttaaatcaggaatcccaacaagataccggcggccactgccgaaccgattacaccggctacgttcggccccatggcatgcatcagcaagtagttggtcggatcatattccgcaccgacaatttgcgagatacgggcagagtcgggcacggcagatacacctgcattaccgataagcgggttgattttg

SEQ ID NO: 3801 - DNA, 24807 bp, Unknown
  gut microbiota DNA sequence
taagacagacattctgcctttgaatactttcgatttttacgcatgttactaaataaattgtgtcaacttatttagtacactacattttatttcaaacgcaagtgcgttttccgaaggcacaaaaatgagctcacttttgaatgaatataaaggatttttactacttttggacacccttagaaatattaatcaaatcaaaatgtaatattattcatgaaagagacacaagaaaaaccgacgggactgcccgaaaacgcattccgtccgctcaaaccgggagagaaatacgaacccctcatgtctcccggaaaaacgtatcctgaagttaacttctggtcagtgacatggggactcgtcatggccgttatattctcggctgccgctgcctatctgggactgaaagtgggccaggtgttcgaagcagccattccaattgccatcatcgctgtgggtatttccagcgccaccaaacgcaaaggcgcactgggtgaaaacgtcatgattcagtccatcggtgcctgctcaggcgttatcgtggcgggtgccatctttaccctgccggccctctacatcctgcaggaaaaatatccggaaatgacggtcaacttcatgcagatgttcatcagctccttgctgggtggtgtgctgggcatcctgttcctgattcccttccgtaaatatttcgtaaaagacaagcacggcgaatatcctttcccggaagctacggccagtacccaggtgctcgtgtcgggtgaaaagggaggcgaccaggccaaaccgctgctcatggccggactggtgggcggtctttatgacttcatcgtgggaaccttcggctggtggaacgagaacttcacaagccgcatctgcggatggggagagaccattgccgacaagttcaaactggtattcaagattaacacgggagctgccgtactgggactcggttacatcgtcggactgaaatatgcggccatcatctgtgccggctcactggccgtatggtggattatcgtaccgggcatttccttgttctggggcgaccaagtgctgaatgcctggaatccggacatcacgacagccgtaagagatatgtcacccgaacttatcttcaaggaatatgccaagagcatcggtatcggaggtatcgccatggccggcatcatcggtatcgtgcgttcatggggcatcatcaagagtgcagtcagcctggctgccagtgaaatgaagggcaaaaaggccgaagagaacgtggaacgtactcagaaggatttgtccatgaaaatcattgctttcggttcgctgtttaccctgctgctcgtggtactcttcttctatttcgacgtaatgcaaggcaacattctgcataccgtagtagccattctgctggtagcaggaatctccttcctgtttaccaccgtagcagccaatgccatcgccattgtaggaacgaacccggtatcaggtatgacattgatgaccttgattctggcctctgtcatcatggtggcagtaggactgaaaggtgctacgggtatggtagcttcactggtaatgggtggcgtggtctgcaccgcattgtccatggccggcggtttcattaccgacctgaaaatcggttactggctgggtagcacacccaagaagcaggaaagctggaaattcctcggcacactggtttccgcagctaccgtaggcggtgtgattatggtgctgaacgattcttacggattcaccagcggacaactggctgctccgcaagccaacgccatggcggctgtcatcgatccgttgatgaacggtgtaggtgctccgtggctgctctacggcatcggtgccgcactggcattggtactgactttctgcaaggtacctgccctggcttttgcgctgggtatgtttatcccattggaactgaaccttccgttgctggtgggtggagccatcaactggtacgtgacctcacgcagcaaggacgaagctgtcaacaacgcacgtggtgagaaaggtacgctgctggcatccggattcattgccggaggtgccctgatgggggtagtgagtgctatcatgcgctactgcaacatcaatcttatccacgaagaatggctggctaacccgatgagcgaactggtgtcactagtagcttatctgctgctgattacttacctggtaaaagccagcatgaaactgaaaaaataacctttaattcatcacacacatgaaaacactgctactaatgggtctgttgcttatgtcgggcacactcttcgcacaacagccaattgaaattaaggtatggcccaacggtgcccctaatgacaacggcatcacagaagaaaaaaacggagataccgattctccaagttatacaaaagaaaccattctctacgtctatccggctaaaaaagggaacggaatggccatcgtagcctgtccgggaggaggatactcacatctggccatggcccacgaagggaaaagcatggccgactggttcaacagtcagggcattacgtatgccgtgctccgctaccgcatgcccaacggacacaatgaagtgcctctgagcgattcacagcaggctctgcgcatcatgcgccagcacgctcaggaatggaatgtaaaaaaactgggcatcatgggttcttcagccggaggacatctggccagcaccacagccactcatttcaccgatgcggaaacccgtccggacttccagattctgttctatccggtcatcaccatggatcctgcttacactcacatgggttctcacgacaacctgttgggaaagaatccctcaaaggaactggaacagaaatattccaatgaattgcaggttactccacaaacaccccctgccttcattctgcacagcagcgatgatacagccgtaccagtggccaacagcgtgaactattacacagccctcgtcaagaacaaggtacctgccagcctgcacacttatccggtgggaggacacggctggggataccgcgacagcttcccctacaaacgccaatggacgggcgaactggagaaatggctgcgcgagatcaacaaataatttgcgcaactctttgtagaacaaaagaaaagttgtacctttgcacccgctaatacgggttattagcataattcaaatcatttacattaaaaaactaaattaaaaaatggcaactaaaatcagattgcaaagaaacggacgcaaaggatatgcgttctattcaattgttattgcagatgcaagagcaccacgtgatggtagatttactgaaaaaattggtacttacaatccgaacaccaatcctgccacagtagatttgaattttgaacgtgcattacactgggtaatggtaggtgcacagcctactgacacagtacgcaacatcttgtctcgcgaaggtgtttacatgaagaaacacttgctgggcggtgtagctaaaggcgcattcgatgaagcacaagctgaagctaaattcaacgcttggaaagaaaacaaacagtcaggtctggctgctttgaaggctaaggaagaagaagctaagaaagctgaagctaaagcacgtctggaagctgaaaagaaagtaaacgaagaaatcgctaagaaggtagctgaaaagaaagctgctgaagctgctgctaaggctgaagctgaagctgctgcaaacgcagaagaagctcctgctactgaagaagctcctgctgaagcttaattcttctttcagaaaaagacaaacaaaagactgtccttgcaaaaggatggtctttttttgtgcagaaatgtcgtatctttgcatctcacctaactaacacctgccttttatgcataccaaatataccaacagagaaatatggaaagtggcctaccctatcctgatcagcctgattatggaacagcttatcggcatgaccgatacggccttcatggggcgtgtgggcgaagtggagctgggcgcctcggccattgcaggagtgtactatctggccatcttcatgctgggtttcggcttcagcatcggctcgcagattctgattgcccgccgtaacggggagggcaacttccggatgattggccccatcttctatcagggaatttatttcctgctggtcatggcactggtcatgttcaccctttcccggctgttctctccctggatattgtcgcacgtggtagcctctccccgcgtctgcgaggcagcggtgagctacatcaactggcgggtgttcggcttcttcttctcgttcgtggccatcatgttccgggcgttctttgtgggaaccacacagaccaagacccttacgctaaactccatcgtcatggtgatgtcgaacgtagtattcaattatattctggtgttcgggaaactgggatttccggcactgggcattgccggagccgccatcggctcttcactggcggaactggtatcgatgctctttttcatcatctacaccacacggcggatagactgtgccagatacgggctgaaccagctggtcagtttccggtggacggagctgaaacgcatcatgaacgtgtcgctgtggactatgatacagaacgcgatttccatcagcacctggttcctctttttcatcttcatcgagcacctgggcgaacgttcactggccatcaccaacattgtacgtaacgtatcaagtatcccgttcatgaccatcacagcctttgcctccacctgcagttccctggtcagcaacctgattggcagcggagaagcccgctatgtcatgcccaccatccggcagcacgtacagctctgcacctgcattgtctggcccgttattctgctgatagcctgtctgcctacgtatgtgctccacatctataccgacatgcccgatctggtagaagctgccgtcccaaccctctgggtactctgctccagctacctcttccaatgtgccggattcattttcttccagtccgtatccggcacgggtgacacccgctctgccttcctgctggagatagtagccctgacctgctacctgatcttcatcgtcacggtcatccttcttttgaaaatggatgtagccgtatgctggtttgccgaacacgtatatgccggagccatcggcctgctgagctatctctatctgaaaaagggaagctggcaaaggaaacaaatttaaggatataaaaaaggcaggagagcggttcactttcctgcctttttctatgtttatatcttatgtcttccttagaactcactggtaaaatggaacttgatgtgcttgaagtccatctgtgccatctgaagcacataaccgctatcggccaggaacacatcgcgtccgtcacggtctttcgccatatactgatacttacgtttcttgaaagcttccagttcagccggatcatcgctttcaatccagcaggctttatacaagctcaacggttcccagcgacacttcgcattgtattcgttctccaaacgatactgaataacctcaaactgcaactggcctaccgtaccgataatcttgcgtccgttgaactggttgacaaacagctgtgccacaccttcgtccatcagctggtcgatacccttattcaactgcttggtcttcatcggatcggcattctcgatgtacttgaacatttccggagagaagctcggcaatcccttgaagtgcagcagttcaccttcagtcagcgtatcaccaatcttgaacgtaccgttatccggcaaaccgataatatcgccagcccaagcctcatctactgtagtcttgcgctgtgccatgaactgcgtgggtgaagaaaagcgcatggtcttgttatgacgcacgtgcagatacggcgtgttacgagtaaacttaccagaacataccttacagaaggctacacacgaacggtggttcgggtcgatgttggccgtaatcttgaacacaaagccggtaaacttaggttcttcaggctgcacctcgcgttcttctgcctgtaccggacgcggacttggcgcaatttccacaaaacaatcgagcaattcctgcacaccgaagttgttcaaagccgaaccaaagaacaccggagccaattctcctttcaggtaatcatctacgttgaattccggatatactccgtcaatcagttccagctcactgcgcaacttttcagccagcggtgtaccgatatggttgtccaaatcctctgtatggatgtctacttccaccttctccgtcaccacctgcttggaaggctggaaaaggttcagtttctgctcgtagatgttatacacacccttgaaacgaggaccactctcaatcggccacgtcagcgggcgcacgttgataaccagttcttcctccagttcatccagcaaatcgaacgggtccttagcctcacggtccatcttgttgacgaagataatcaccggcgtgttacgcatacggcagacttccatcagcttacgggtctgtgtttccacacccttcgctccgtccaccacgatgattacactgtccactgccgtcaaggtacgatacgtatcttcggcaaaatcctggtgacccggtgtatcgaggatattaatcttatagtcatggtagtcaaactccatcacggaggtagtgaccgagataccacgctgcttttcgatgtccatccagtcggacgtggcggttttctttatcttgtttgatttcacggctccggccacctgaatctgtccaccgaaaagcaacagcttttccgtcaacgaggtcttaccggcatccggatgcgcgataatcgcaaatgttcgtcttcttgctatttcctgatttgccatatttattgttttaatttttcaatacattctgccagactgtccatccagtaaggcacttccacgccgtaggttttcttcagcttggtcttgtcgagcacagaatagtgcggacgacaggctttcgtaggatagtcctctgtgtgaagcggagacacatggcaagtggtgatacctgccagacgatggatagccttggtaaaatcataccaggagcagactccttcgttgctgaaatgataaatacccggcacgatacccttctccagagccacaaaaatggcctgagccaaatcgcgtgcataggtcggtgtaccaatctggtcgaaaataactcccagcgtttctttctcctgtcccaagcgaatcatggtctttacgaaattgttgccaaacgtagaatacagccatgccgtacgaatcaccatcgtattaggacactgcttcagcgcttcctgctcaccagccagtttggtagagccatatacggaattcggacacggtatatcttcttccttataagggatatgggctgtaccgtcgaacacatagtccgtagacacctgcaccagccagccgttacgactttgtgccgccttggccagatagcccggagccacatgattcagtttgtcgcagagttccacgttgtcctctgccttatcgactgctgtataagccgcacagttcacaattacatcaatctgatgagtcgaaacgaaatccattactgcctgctcgtcgcagatgtccagttctgccacgtcagtaaagaaatactcaaaattcttgtgttcttctgccagcagacgcatttcattacccaactgtccgttggctcccgtcactaatatctttttcattttctgtgatgttttaatccagttccaaatcaccttccttatccttaatataatatccggccagcatcgccagcaaatcactgatggccttcactgccttcatggtttcttcactgatttccttcttctgcagcttcagcatcagcaccccatacatggcatcgaagcaagtttccagttcaggcacgtccttgtcgccacccttggcacgcagttccacaataaaaggaagcaccttgtaatacgccgcactgtaatacgggaatttaggcgaacgcaacaaacgcaggtgcaggtcggtcagccagacgatgatgttcttgttaatctgcacgtgtcccttttccagcactccctcctgctgcatcatgttaatcaagtcttcataccagcgggccagttccttcttctgctcgtcggtagccggataaggctcgatgatattcttgcggatgcgttccatgtcgcagccgttggcacgaatcaagtcttccacctgccacatatacagcaggtattcggcgatattcttttttttaagttgttgagaaatatacatatcctatcaagaaaaagatttgccggcaatggccagaacgattcccaccaccgccgctatcatgaccacgacaccaataatgcggttgagcacccagatgccgcgcaaattaaatcgtgaacgtactttattgacaaaataagtaatgctgaaccaccagcccaatgctcccaaaataatggccagataacccactaactggaaaccgatgggactgcccggcatgacaaacgaaaaacgggcaaacagaccgatgaacaggaaaataatcaagggattggacagggtaacaaaaaatgccgttacgaaattgtgcagatacgttccgcgcgtacctgaagacggacgaagtgacttcaccggattactgcggaaggtatagataccaaaagccagcaacatgatgctgcccaccacctgaagaaaaatatgatgcttcaggatgagttcgtccatgaaactcattccgtatcccgtaatcaacgcatagcaaatatcacttaatgccgccccgactcctgtcacgaaaccaaaccagcgccctttgttcaacgtacgctgaatacagagcacaccgaccggtcccaaaggagcagacacgacaatgccgataatcaatcccttcagcaacaaatcaagtatagtaacctgttcaatccaattcatactgcaaagatgctacttttttacgaaagtacctacatttttatacgattatcattaagagcatgtctgaaaaaacaacaatttaagaaaccctaaagagataacaggaagacatttctacattttttacgtctcccggcacaaaaacgtatgtttccctgtcgggaaacgtagggttccgccatgagaaacatacgtttccagtcagggaaacataaaacaggcaagcccgctctttcctcaataaagagaggtttgcgaatttctatcacacaaagagtacagccagaatgcccagccctaccgccacaatggtagaaatcagtcctggcatcatgaaagaatggttcagcacgtattttccgatacgggtggtacctgtggtatcaaaattgatggctgccaccaccgtcggatagttcgggatgaaaaaatacccgttgactgccggaaagagggcaatcagcatatagggtgaaatacccagcgccatacccaaagggagcaaggcacggatggttgccgcctgactgaacagcaggatggacatgacaaaaagcgcaataccgaaaagccacggcatatcggtcaccagaccgaatatattttccttgatgacggcaatgttgcccgagataaaggtatcgcccatccacgcaataccgaaaatagccactactgcctgcatacccgcattaaagaccgaacttttggcggccttcatcccactggtgccggtcagcaacagaatcagtgcagctaccgacagcatgagcacttcaatgatgtgcgccatctgcatcaccactaccccctcagaggtttggaatgacggacgaagactatcgatggagccaaacagcacgatgccgaccgtggcacctaaaaacagcagtacggaggtcagcgccttgccaggattagccacttcagctgtacaataattggcacccgacagttcgcccgacttcaagcgtgcctgatatacaggatcatctttcagctccttgcctacccgcatggaataaatcgcaccggccagtacacccaccaaggtgcagggaatggaaatcttcaaaatatcaaacaaggtaatgtcatatccggccaacatactcagcagggctaccgtagccgcagaaataggactggcagtaatagcctgctgggaagcaatgacagcaatccccatcggacgttccggacgaatgcccgtttcacgagccacttcggcaatgaccggaagtacggaataggccacatgccccgttccggcaaagaaggtaaaaaggtaagtcaccagcggactcaacagcgtgatgcgctgaggatggcgacgcaagattttctccgcccatttcaccatcaaatccagccctccggcagcctgcatgcaaccggcagctgcaatcactgccacaatcatcagcatcacatcaatagggggagtggtgggttcaagaccaaagacaaaagtaagtacggccagtcccaagcccccaaagactcccagaccgatgccgcctacacgcgctccgacaataattgccagtaacacaaacagtaattgtaaccacataaacaaaaagagttttttaatttaaggcgcaaagataggcatattctgtgataacttttatttttcttcgtaattccgaggattttctctacctttgtaccacttttaaagcgcattgaatattcattataacatacaagtgctatgattctatttttcagaacacccacaaacagtgtgattgccacggaatgcaatcaggaactgaatgctgaagacgtcaagaaactatgctggctgtacagcgatgccactgtggaaaacgaagacaacctgaaaggatggttcatcggcccacgccgtgaaatgattactccatggagtacaaatgcggttgaaatcacccagaacatgggtctcaacggtatccgtcgtatcgaggaatacttcccggtgaaagatgaaaacgccgaccacgacccgatgttgcaacgtatgtaccacggactggatcaggaaattttcacggtagacatcaaaccgcagcctatcatatacatcgaaaacctggaagaatacaacgaaaaggaaggtctggcgctgtcacgcgaagaaatggactacctgatgaaggtggaaaaggacctgggccgcaaactgactgactcggaagtattcggtttcgcacagattaactctgaacactgccgccacaaaattttcggtggtacattcatcatcgacggacaggaaatggagtcttctctgttccagatgatcaagaaaactacacaggaaaatcctaacaaaattatctcggcttacaaagacaacgtagcctttgccgaaggtccggtggtagaacaattcgctccggccgatcactctacttctgattacttcattattaaagatattaagaccgttatctcactgaaagcggaaactcacaacttcccgactaccgtagaaccgttcaacggtgcgtctaccggtacaggtggtgaaatccgcgaccgtatggggggtggtaaaggttcatggccgattgccggaactgccgtgtacatgacttcttatccgcgtacggacgaaggacgtgactgggaaaacattctgccggtgcgcaaatggttgtaccagactccggaacagattctgatcaaggcatcaaacggtgcttctgactttggtaacaagttcggacagccgctgatttgtggttctgttctgactttcgaacacgaagaaaacaacgaaaaatatgcctacgacaaggttatcatgctggcaggtggtgtgggttacggcacacagcgcgactgcttgaagggtagccccgaagcaggaaacaaggtcgtagttatgggtggtgacaactaccgcatcggtctgggtggtggttccgtttcttctgtagaaacaggacgttactcttctggtatcgagctgaacgctatccagcgtgccaatgcagaaatgcagaaacgtgcttacaacgtggtacgtgcattgtgcgaagaagacgaaaacccaattgtatctatccacgaccacggttctgccggacacgtaaactgtctgtctgagctggtggaagactgcggtggtctgattcacatggacaagttgcctatcggcgatgaaacactttctgccaaggaaatcatcgccaacgaatcacaggaacgtatgggcttgctgattgacgaaaaagccatcgaacatgtacacaagattgcagaacgcgaacgtgcaccgatgtacgtggtaggtgaaactaccggcgaccatcgttttgccttcgaacaggctgacggcgtacgtccgttcgacctggccgtagaccagatgttcggctcttctccgaaaacttatatggtggacaagactgtagaacgtcactatgaaaacgtttcttacgatgtcaccaaactgaatgaatatttgcgccgcgtactgcagctggaagctgtagcctgcaaggattggttgaccaacaaagtagaccgctccgtaacaggtaagattgcccgccagcagtgtcagggtgaattgcagttgccgttgagcgattgtggtgtggttgccctcgactaccgtggtgaaaaaggtatcgctactgcactgggacatgctccgcaggctgccttggctaatccggaagcaggttctgttctagccgtatccgaagcactgactaacctggtatgggctccgctggcagaaggaatggacagcatttcattatcagccaactggatgtggccttgtcgtgcacaggaaggtgaagacgcccgtctgtacaaagcagtgaaagcattgtcagacttctgctgcgaactgcaaattaacgtgccaaccggtaaggactctctgtcaatgacacagaaatatccgaacggcgaaaaaattatcagcccgggaaccgttatcgtttctgccggcggtgaagtttccgacatcaagaaagtggtttctccggtcatggtcaacaaaccgaaatctaccttctatcatattgacttcagcttcgaccagctccgtctgggtggttctgctttcgcacagtcactcaacaaggtgggcgatgacgtgccgactgtacagaatccggaatacttccgcgatgcattcctggctgttcaggaactggtgaacaaaggcttgattctggccggacacgatatttctgccggtggtttgattactacccttttggaaatgtgctttgccaatacagaaggcggtatggaaatcaacctcgacaagattaagtgcgatgacatcgtgaagattctgttcgccgaaaatccgggtgtagttatccaggtagccgacaagcacaaggcagaagtcaagaagattctggaagatgcaggtgtaggttacgtgaagattggtgtgccgaccgaagaacgtcacatcctggcaactctgcacgatgcaacttaccagttcggtatcgactacttgcgtgatgtatggtattctacttcttacctgctcgaccgcaagcagagcatgaacggctgtgccaagaaacgtttcgaaaactacaagcagcaaccgctggaatttgtattcgacaagtcattcaccggtaaactgtcgcagttcggtctcgatccgaaccgtcgcacaccaagcggcatcaaagcagccatcatccgtgaaaagggaactaacggtgaacgtgaaatggcttacatgctgtatctggcaggcttcgacgtgaaagacgtaacaatgaccgacctgattagcggacgtgaaacactggaagacatcaacatggtagtttactgcggtggattctctaactccgacgtactgggttctgccaaaggatgggccggaagcttcctgttcaacccaaaagcaaaagctgccctcgacaacttctacgctcgtgaagacacattgtcactgggtgtctgcaacggctgccagctgatgatggaactgggactgattactccggaagacaagaagaaaggcaagatgctgcataacgactcgcataagtttgaatccaacttcctgggtgtaaccgtaccgatgaaccgcagcgtgatgttcggttcactgagcggctctaaactgggtatttgggtagctcacggagaaggtaagttctcattgccttatccagaagaccactacaacgtagtgctgaaatattcatacgatgaatatccaggcaacccgaacggttctgactacagcgtagccggtatcgccagccaggacggacgtcatctggccatgatgcctcatctggaacgtgcttgcttcccatgggaaaacgcatactatccgcttgaccgcaaagaagaagaccagatcactccgtggatggaagccttcgttaatgctcgtaagtgggtggaagccaaccgtaaaaaataatccagtacgaccggaacacgatacaaagtggaggtgcacctcaagcgcacctccactttttttatcttttcttccgcacaaagtccgggatttccttccctacatctgaatggattcctttattcattccataaaaaaacggtacacaaatctgactgttcagatttatgcaccgcctgtattcgaagtccccttacacggattttcgtatcatattcccgcttcgttcgactcttattgaaaaagttccttcaatttctcagccaaagcctcacctcgcaaattttcaccaaccatcacaccgtctgcattaatcagatacattgtaggtacaaatttcaccttatagagtgcagcgactcctgtttcatctaggaagttcggccagggaagtccctcttctttcaaagctttctcccagtcagccttcttttgatcgatagagatacttacaatctcaaaacctttttcactatattgtgcatacagcttcttcaggttcggaatctctttccgacacgggttacaccaggaagcccaaaaatcaatcaatacatatttttttccttgtcgcaatgtggaaagggctacttcctttcctgatttatctttaaccttgaaatcgggtaccaccgtaccttctttacctgccggataaagttcttcttttaccttctgcccgtagtacgactccttggcagcagaagacaatgcttcataccaaggtttcatatcttcactcaaatagctggtaaacgaaatcatcatcaatggcccccagaatgaatccttgtttgccatgactacctgatgatacagtgaatctacagtaccaaaaaagactttatcagcttcagccctggcttttccatccgcactctgccgaagctccttaattttcgcctgatcctttgatttataagcagccatcatcaagctgtcaaaagcagcaaatttacgggcattaagtgcatacaatgaatccaggtaggtacgcgcagaaagtaatgagtcgtagcgcgcactcagcggagaaccctttaccgacaaagaagacagattataggaaactcccccgtcagattccttcttggccaccagctttcccgtaacctccatctgggcattttccaacataagattacgtgaaccatacgcatctttcaccaataaatgaaaagctctcggctcttccatttttcctgtaaacacaaattgcccgttaactaccgtcgtatcggcaaaaggctgttcactgtcatggcttaccggtaccaactgcacatgcgtgccgtcgggcaagccttcaatattacctttcaacacatagccatctactttcggctgactgccgcatgacagcatcatcaaacctaaaatggctaaaccagagattttcttcattttcataataatgtttatttagatacattttgttctatcgatccgtttccaggattattaagagctcctgccgggaaaggcatggtccataaatgagacgtcggactcaaactatattccttcccctcataagttttgattaaagtactagcatacgtaccttccagattaaaacgacgggcgtctgcaaaaggaacaatagagaatatcaactcattatctttggtacgacgaatcagagaaagagcctcctccagtgtagcagctgtagccggctgatacttatcaggacgaatacgggttatccgcacggaattcagagtattcatagattcagcataatcattgttctgagctaaccgagcctggcattccgctttaataagatacgcttcacaagttgtcaaaccgccatgattgaagaagccagactccaaagccttgtaatatgtatcattattgtctaccttcaatttccagcgtgaaaggaaacgagcatctccttcttcaaaacgttcagctctttctaccggtatgttgtattcataactatcaaagtttgactgtactccataacgcaaataataattttccacgtaatcatattgcataggggtaacaattttgtcataattgtccggatcatcaattgccgcctgatgttcctcataaaatgcattccagtcaaaaagctgattattctgttccaatgccaggttcgcatagcgcaaagcctcgtcataattctgcatctgcaagtacacacgagccaacaaagcataagcagctcccaaattcggatgaatagccgtcatggattgtgctggaattcccatctcaatggcttctttcgtatcctgtatgataaaatcatacatttcctgaatagaaacctgcgtataaggagcatcaatatccgcactggcaataagaggtacactacgcttctctgctgccgtagccttgtcatacgtatcggcataataattaaccagcacatcgtaacaaagtgcacgtatcacttttgcatacgccatcacttcctttcgctctgcatctgtagcttctgtagctgtaggtgcatttgcgataatcagattacaactggaaatagctccataaagtacataataagtcccttcatccgcattattcagcataatacggtcagccgattcatcccacatataattggcctggctcaagctcggagtattcaccttcgcatttgtcagatatacatcattcaacaaatacaaggcattttctacaggcgttctgctgatggtatactgatcacgcaataaagcttcaaaatccgccaaagtcgtaggtatcttattacctttcggtgcaatattcaggtaatcattacatgagctgcataaaaagcatgccaatgtaatacagaaatatataattctattcataagtttcatattacaaaaatcgaggttaaaaattcagataaacgccacacagataattaggtttcgtatatccaccaagcaaatacttggcattactgctcttggctaccataaatacattttccatacccagcatgatacgtgcattcttcaaatatagtttatgacacacactggcaggtatacggtatgtcaatgacaaatttcttagacgccagttagtagcatcaatcacgttaatggacgaattggcatacatgctttggtagttatagttgtacaattcactctcagatgaaatatagcgcggcacatctgtgtaagcctcatcgcccggttcacgccaacgattctcaatgtctttactcactactcccataccagaagagataaaagctacattggtattacgcatcttatgtcctccttcaaacaagaactgagcagccagttcccagttcttccaacgcaaattcgtattaatagaaccattgtaaaccggtacggtagttcccaaataaaccaaatcttcaatctcaggaggagtcatatcggtgtatagatttcctttggcatcgtacacctgaggagttcccgtttcactcagtccggcccactggtatccgtaaatcgcattgtacggatttcccacacgaggataagccgtcggataatcaattaccaaatacgacacaggagcttctacattaatataagttaccttattcttattgtagcccagcacaccgctgatattccaattccagtcgttattccgaattacatctcctgacaaggtcaattcaaatccctgattcgtcattttcccattgtttatagagtaggtgctatatccccatccttctgtaggaactccgttcgtgttagccagcaagtctgtacctcgtttgttataatattcaatagaaccattcaatcgatttcccaacaaggcaaaatccactcccacattcaatgtagtggtcttttcccaacgcaagttcggatttggacgacttgaaatagttccctggatacctcctacctgattattgttgctgtagtaagcaatcatataaggagcagagttcttagcaatattacctccaataccatagcttgcacgcagtttcagcatatttacccacgatacatggaaaaacttttcccgatccacattccatccagctcctactgaccaaataggacgtttctgatatttggaacctgtagaaaacagattggttttatcccagcgaatactaccgcttaccatatattttccatcgtatgtataagctgcgttactatacacagacacatagcggttaatcagttcactgatataagcaaaattctgctgtccgaatgatgcatatccccattgtccacggaaattactcaacgctcccgcatcaatcaagctatacgtaagcaactgagggtcataattataaagcgtacgatcattatattccagcttattttcccgtgtttcagtacctaaaatcatagttacatcatgtacatccgcaaatgttttattgaaatccaactgctgacggaaattatatgcatgtgtcgtattggaagaagtgaaaaagatatttccatacggcaaggcaaaagtggatgtcccatcattattggaagtagagaatgtattcactttattacgtacttcgtaagagtccttgcttttcagttgttcagtcttatattccgcatattcatactgaaaagaagctgtatacttcagccagtcggtaaatttgaatgtcaaacgagcaaatgttcggttactgaaatcacggttcttagtctggttcatctttatttcatccaaaggagtaatatccagattgtacaatccgttgttatgcagcaaattcaaattgtacaagctataacgctcctcttctgtattggtgtaatacgtaccgtcaccatttaccagcccgttgtacggcatataagtatatcctggtgagaaaaggttaaatgactgcgtagtacctttcccatagttcaaatatgtacctacatccaaggtaagccaggaagtcatcttcgtagaattctgcaaattgatgccaatggttctattctctgaatacttatcctccagctgattgttacgataagaaacagacgcattaaaagtgttcttttcggtacctttaccaatattcagattatattgctgtgaaaaaggattacgcttaccgtatttttctatatcccgataataccgataaccttgtgaagccaaattcgtcagattactctccatctgatcacgagagatgtgtcccgcataataattcaagatattccgtatgccaagtgaagaataagacatattatccagcaccgtctgggcatagctttgtacattatccccactcaaatgcggattctgtcgggcccattcacgctccagctctaccatagtagaagacccggccagatatttgtctgcatacgtgtcgtacggctgtactgtaagagtggccgagaaagaaacattcagttcatctttcttagcccgtttggtagtaatcaccactactccattcgctgcacgtgctccataaatagaagtagctgcagcatcctttaagacagtgatgctttctatatcttccatattcaaatcgggcacactctcaatccagtttccataaccgtcgttcgtagtcttttccacaggaaatccgtcaatcacatacaacggagtagtcaatccattcatggacgtaactccacgaatcttgccatcactgtatcctgccacacgtccttcgagcatagaacccatatcgctcaaacgctgtgtttccaatttcttggcatctacttttgaaaatgcccctgtggcacgctcttttgaaatagtctgataacctgtcactactacctcgtcaagcagttctgtagaaggttgaagagcaatgtaataatcattagttgccgtcagcttaatgcgttgagatgtatatcccaaataagaagcctcaatttccttcgtgccatacggaagtgtcaaagtgaaatgcccttgtatatccgtaatgaccgctgcaattgatcctttagggtcatcattcacctgtttgacatgagctgcaggaagtggttccttgttttcatctactacaatgccatgaatggtacggtttctctgagcataagctggagagacagacaagaccaacatagcacacagtagcaaaaattccattttgagccgaatgtcgtgcaatacgtttttttccatacttacatcttttttagaggttatagacttatgtcctcagacatttttacgattctctcattgcaaaaatgtaaaaaaaagatataactttaacaataaagacgtatccaagttcgacaattgttacattaggacaacattttgttataaaaaggcagtatcatgcattcttatgcatagacattaccttgttacggtattgcttgggaggaactcctaccgtgttctggaatattttgtaaaacgtactcattgaattaaacccgacttctgccgctacagccttaaggggaagatctgtttccggatcactcaataagcgaatagcttcattaattcgataattattgatatattgagtaaaattctgttgagtttgttcattgatgacttgtgacaaataagtccggttagtacctaataaatcagccacccgttccttcgtcaaaaaattctctttatacaccgcatcttcctgcataagcttttccagacgctgaaacaatgaattcttcttctcatttgtcagtgaagaagcagcgtatttttcactcattggagacgatgcagaaacactctcctgttgtgctcgcagtgaagtaatgacttctcttaactgctgttcttttcgaatagcttcctgatgctgacaaacgatacgggtatacaactgattttgccgtttataacgataccacaaagcaaacactaccagcaaaataatgaccaaagtacccattaaagcctgctccttcttttccttttgcagcaaagccagcttaccctttttaatctcatttgcctgatgctccgtatcatatttaatacgaagttcactcaagactttttctttatcagtattaaaaatactatcagtttcctgctgaagcttacgttgccaggtcaatgcctccacatattgacccatattctcataacaagccgataaagtggttatcactttattacgatgaatttcacaattttcctccttagtaaacgataaagcctgaaagagcaaatctatagcttccttgtttctcccttcttccgccagggctttggcatattcattcaacaacaataccttataggaggtctgattaatatcatttaaagacaatccctttttataatattctacggcctgctcccgattgccttttgcaaactcaatcatcccataaatagcatatacatttccttgattataatattcattctgcttcattataaattcagcttcttgtatataaggtaaagccttatcatattcatgaagcaaataatacatataagaagcatttaacgctcctataaaaataaggtaagcagaatttaattgatgccctaactcataaatctgtaaagaataagtaagtccagtagggtcatctttcaaataatagatactggaaatattaccaagcaaaatagcttccagttcttgatactgacatcgatgcgtagcttctatcccttcaaaaaaataatgtaatgctgaatagtaatccctatgaatattgctggcataaagtcccattccattatatatagaacataaagcagaatcattcttctcactttcggccaatagtttagcttgcccaagatgatttattgcagtactatctcccaacataatatatgcctgccccaatccaatatgtgcataaagaataccaaacttataatcttgcttttcatatcctatcttaaacagtctttccccatattctatggctttatgataatcggccttatgcaaataaagaaaacataattctttcaaggctctcatatcttcaggattgcgcttcaatatctgttcctgctgctgaatggcaggaagaatcgtttcttgtgcaggaatccgaacttgtattccaataatcaaaaaaataattagtatgtattttagtttcaaattcatccagttattctctctcctaatataacacttttatcacacaaagacatatttcagttcattttgacaccctacaaataattataaaatctttttgcagtatttatctctctgttttattccatgcaaacttacagaaaatctttctttttatacccatatcagcagaaaaaatcaaggcaaataccccaatgactcttttacacttccctcttgagttggatataaaaacatttaaggaacagaaacaaacgactttaccataaagatttttattgcaaaaagaggaagtattctttcatcccctttatttatgtcaaaaaagaatgcatttatgttggattttgtaaatataaaccgtacttttgcttgcgtagctaaaaagaacattcaaaaaacttataaaataagataaccatgaaagaaatagactggtcgaatctgtctttcggatacatgcggacagattacaatgtacgttgctactatcgcgacggaaaatggggagaactcgaactctgttcagaagaaacattgaacattcacatggctgccacttgtctgcactacggacaggaggctttcgaaggactgaaagcttatcgcggaaaagatggtaaaatccgtatcttccgtcctgaagctaatgcagaacgtctgcaaagcacttgccggggtatcctgatgccagaacttccgactgaaaaattctgtgaagctgtgaagaaggtagtaaaggccaacgaacgcttcattcctccatacgaaagtggtgcttctctttacatccgtccgctgctgattggtacaggtgcacaagtaggtgtacatcctgccagcgaatacatgtttgtagtattcgttactccggtaggcccgtacttcaaaggtggatttgccactaacccatacgtaattatccgccagtacgaccgtgcagcaccacttggaaccggtacgtttaaagtaggtggtaactacgctgccagcctccgcgccaataaaatggcacacgatgcagggtatgctagtgaattctatctggatgcaaaagaaaagaaatacatcgacgaatgtggtgcagccaacttctttggtatcaagaacaacacctacgttactccgctgtctacctctatcctgccctctatcaccaaccgcagcctgatgcagctggctgaagacatgggaatgaaagtagaacgccgtccgattccggaagaagaactgacgaccttcgaagaagcaggagcttgcggtacagcagccgtaatcagccctatcggccgaattgatgacctggaaaaccagaaatcatacgttattgcaaaagacggcaaaccaggccctatcagcgaaaaactatacaacaagctgcgtggtatccagtacggtgacgaagctgatccatacggatgggtaactgtattagactaataattatcctttttaccataaaaaagtccgaagcaaaacacgtttcggactttttttataatatacaacttctgacatagactatctcttctcaaacgaacggaaaaagcgtaataactctccattcgcccgattatcgatttccgtctctcgcatctcttcaaataaattcagggtagaagaacattccccacaaatatcaatacctatgacccgctcttgccgaaacacaacggccaacaactgctccagttctgataaagtcagtgaaccttgatcccagttggttatcgcagaagaagggtccagcacatccttgtcgatagaaatatagacaggttcactcacatgctcagaggcaaacgctttccagcctgcttcctgatccaaagaagattcactataaaaatgaatacggtcgccatattcctttgggacttcctgcagcaaacggtctgaagcaccggctataattaccttcttacaattcgcattcgtatcaagcacatcttttacccagcttccacacgacaagatatgctcaaacaaaggaggctgcatgtcaggatgatgatcaaacaccagtaaagcaaatggagtagccagcttgtcagtccagaatttcgtcacataatgatagtttcctgaatctataaaatgaattccctgcggagaataatctgctatcatgcgctgcaaggcagaagcaccttcttcatcacaataacattcagttccattcaaatgctggcagtccagccacacaaactgacaattccgggcaaaagactcataattgtagactcctgtaaaattcatcacaaccaccggcctcgaattccggctaaatactgcttgagattgatgattcatatactttcctcccattcttcaaaatacgccttaaaaacgaggaaaagagactgagggtcaacgtaataatctgaggggtaaatccgataaatttatatctttgccggaaagaaaatcagcaaaagttatggaaacca

SEQ ID NO: 3802 - DNA, 518 bp, Unknown
  gut microbiota DNA sequence
tttgtgaggttgtaaatatgattgtcgcaaccgtgaaaagcattggttgatgcaccatatcggtaatagtttccccaacctgttatcacaggattgagcattcgtatcagcgattcctgcttacacattttatgtcctttaacgatgtcactgatttttgctctaaagcgtttctgtgcatctttggacggagatgtgtacagccttttgccgaacttccttacattgaaacctaagaaatcaaatccatcgtatatgttcgtaatggtagttttctcttcggataaggtaagacccctttctttgagaaattctatcaccattggtttgacctcgttttccaataattccttatctcgacctgtgattataaagtcatccgcatacctgataagattcactttgtagtggaatgtcttatagttgatgaaacgtcttttgaatctttcagccaagagtggttgaagtccgtcaagtgccatatttgcaagtgtcggtgatatgatacctccttgtgg

SEQ ID NO: 3803 - DNA, 48826 bp, Unknown
  gut microbiota DNA sequence
actttgccaacaacactgaatactaactggggactgaacggatatcaccggaaatgctgaacgggtatccgccggaatatgcaaattaacgtgcaacttaaaaaactaaatatgaagataataaattggacattactttttcttgtaatgtttttttgttgcttagatagcgtgaaagcaaatccattacagcaagatactataagggatgtaacttatcaactttatccgttgggtgttgcatgccgtaacaatgatatggcaaccataaaacggctgcttgcaggagaagatgaacctatggcaatgggtaacgatttttatgagtttgatatattttatacggcaatttactttgacaaagaagatgtgctgaaatatgctcttgccagatataaggatattaataatagattatatagtgacgaatacgggctgacgctcttgacatacgcctgtaaattgtctaacgtgaggttagcccgtatattgctggagcatggcattagcgtaaatggttaccagagtccatacgatacatataaagtatatccgattatggaagccattgccaataataacatagaactggtgaaattgcttttagaatatcacgcagatcttaatataaaagacagtaacggcaacacccctcttgctttagcaaaggaaacaggtgcaaaagaagtagaagatttgcttttgcaatggatgaagcaacatactttcggacaaagctataaggaaactattcaagaggagattgatgcaataaacgaaatgcctttgtggattgcataccttgttcctttggatagtttagggaaagtgatagaggatgaatatatggagtttaatcaaatccattcatacaaaatcttagatgatggtcaaatcaagaatgccaatatattgttcacgatgtattttgatagcgataacaaaataagaaaagtatttaagcgatgggctgacgggggagcattgcatagtattgcatattataattctaatgggcgattggtatatggaatatataataaaggcgatgaaactcacggaaagttgtatgctgacgcttcgggttttcacatagagcattttcctgaagagaatgaatgtaacgattgttttgaagcatacttattcctgtctacgaaaagcatagaagctcaatataatataatattacagagctcctcaaatgctaaaaggacgacttttataccacaaattggagatagtgccatactatgtagttcttacatttattctttacctgatggagaaaaaactaccaaaggtgaggatggcatagcagtccaatttggaatgcctgttgtcataagtgaattaacaaatggctggtgcagaataaattccatttttaatgctcctattggttatatatctattcaagacattgaaatcattaagtaaatatatagtaagcaactaacaaggccgagataacaacttaacactattgattaccaggctataactgattacaacataattataaattcaaaatatagatatatgattatatgtgcgatatgtgattaaatcaaattaatcatgtatctttgggagaaagatggattataatatataaatatgaaaacaaatagggacgaaatattggagagtgcttttcagttgtttatggcaatgaattatgagcgtgtaagtctgcaaatgataactaaaaaggtagggcttactaaaacaggtatatttaattattaccctaccaaacttgatttgtttatagccgtagctgataagttcctttttaaggtgcaggaccctaaaaacaaatatgagatacatgatggcactttcagggattttattcagaagtatgttcagggtgtgaagaatgcgatggctaagattgtcaatttaggcaatttaagtaaagatattatgccaggtaaatctcctaatgccggatatttgcatcttttgcagcaagtaagattgtattatccggatggggcaggcaagctacaggaaatgattgaaaatgataaggagcattggcgtgtggctatacatgctgctgttaagaatggggaattgagaaaagatatagatgtggagaatgtgatactgctttatcatcatgttttcatgggtatgtcttatgagatgtctttgtttaacggacttgataccgatttgctctattcaagttttatgtgtttgtatgatgcgttgaagcaatgacataaaataatccttttcaattaaaaaaagcaaaatattaccggttggtcatattttgcttttttattttttatatttgcaaaaatgaccaatcggtaatattatggaaaaggaaaaatttgagagcataaacaaaacgttcaattacactccaaacagtgtttttacgaatcagtggtccagtctggcatttggcataggtatggttgtcgttccattgatatatcctttcggacttcgtatcaggcgtgttcatatattgtcgcctacagtattgtcaacaattcttgtaataggagggatattgcttctgtggtttactttgcagagtatgcggaaggccaaagcgttgattgcacaaggaggaacaatcaaggtagaaggtaacagagtgacatatccatccattgaaaaaggcaaggtggaatatcgttcattcctcatttcagatatagaatatattaaagatgatgaagatgagaatcagtgtaaggtcagtcttcctgataagtatgtgatttttgaaatcaaatattttgactcatacgatgagtttgaagaatttcgtgcgattttaggataaaataaccaatttaaaaacttaatattatgattagacaatttttcaaggtaacactggtagtttcaatggttgcatcggtacttgttggctgtaatggaagtgaacctttaggaatgggctcagaagagagtatttcgaaaataaaggagctcgtaaaaaccaatgtcgatatgaatgaaaacaaaatctatgaattacaatgggaggaagataacggtgagcataagttgggaaatatgctttcaagtatcactgttggctacattgataaagaaaataatgattataaacttattatagagttaaaagacggagaatttgttgcaggtgaaccggataagaatgaaaaatggaaatattcgtatgaaaagtcaacggcactgaatcttgacgatataaatgccggtttgctgaaaaaaatggtcaaagagggatatgacttgtttatgacacaggaagatagtacccaatatgatcttaaatcagtcgggaagtataggttctacatttatccggtaaaagtcggtcgtgagcatttgcttgctgagaatgaatctttcaaaaaagaatataccactatggtttcttacttcgacttgaattttatcaagaaagatgaggcacctgaagtacgtggaaaacatatatggaccaattactataccgcttcatttaagattgatgaaaacggagagataggatttttttgatagacaagaaggctaattataaatcaaagtattatggaaaacggaaaaacgtatggaaaacagactccggaagaaatagcaagagccgcacaggaagcggctatcaagtcagccatggaacaggcgcaattaatgttaggaaacataccaggtatgaacatgcaggacatgcaggcacagattatggctcagatgcaggctgctgttccgaatcttgtcgatatacaaacccaacaggctacgatggggacattaggagatgtggatgcggatacagtatgtaatactggtatgaaaaacatgaatgatgctgcggatataacacaatctttgatgaacctggatttcaacgctgatgatttctttgatgataatgatagctgggagattaaaagaagtaaggatggtaccttaaacagtgaacagcttcgtttgttggctcttggggcaccgatactggtctataatgatgaatatacagataccataggacaccaggagtatgtggattcattgaaggaacagataagaagctggtgggaggtaactgacagagagtctgcctttgaaattgttgactggctgcttcgtgaaggacatcatgctgaagcggatagggttcttgctgccatgagaaacgggcaggaaaccgaaggtattgatgaagataaggtagaagatgtgtcgttgataacggactacatgttggaaaacagtatctgtgatatgaattctgtacctcatacagccattgcctgggatttggtacgtattgtcaacctcgggcgttgggctttccagtgtggttatattacagaagaagatatgtggaacatcatgtgtgtagcggatgaaacagcttctgcaaatttctcttcgtgggaagaatatggcatgagtttcgttttgggtcgtggtgtatggcacggtgatacagacgattgtcagactgcatacgagattgttgcggaattgctgaagaatgaagattcaccttggttacagctttcatggagtgattgattatttaaaagagcggaaaaaatgagttacgaattttatataatgtcgggtattgccgtttttgtaggctgtacgtggctgtaccggaaaggtaaaggggcatacatgatggtacggaaaatcagaagtgcgtttaaggttgtaaatattaatccggcatcctctcttgccgatgagcaatataagaagcttgctgtcggtgcgttgtatgcttcacagcaaggagtataccagaattctataaagaccggtatagactatgaacttccacagatacttggtgaatggtggggaatcaaaaacagtcaggatgccagggaaaaaatggattatttgctggaaaaaggattcagatattatttcccttatgtgtggcaggcttttcttctttccgaccccaagcaacaggatgaggtgtttcagcaatatatggagtcgcaggaagattatgataaggctgtatctcagcttcagaatctggaagagacttatgatgaattgcttgaaaataaagtgatatcctcaaaagaagacctgaaacgttatggcgttgtaggatgggatgctggtagggtatgcttccttgcacgtgcctgttgcgagatgtgttatatcacagaagaagaggcttggcagtatattgacagagcgtacgacctggcacatcgggagctcgcttcatggcatgacttggcaatgagctatatcatagggcgctcaatgtggggaggaaagaaatcctataattcagtaatgaaggataacgccgataaattactttccgatgagaaaagtccgtgggtaagacttcaatggtaacaattgtgatatagcaataaaggctattcttatggcacgatttgtcaatgaccagcaaacaactgacaaggaagtgaaacgattgttttctgccggagtactgcttctgcttggcaaagcgtattcggacgcttattcatgctttgaccgtatccatgaggagcacttcgaagcaatgtacaacaaggcattatgttgctttatggtaaaatggtatgacgaatgttacagattgctttgtgaggcggaacgactcctgcatggaatggatattgcatacgaaacgcagttgcccgaagcttttctccgctacgattatgatgaagatttccctttttatcccattccgcaaggtattccagtgttcggggcatacaaacaattgcttcggttgaaagcggaaacggctttccggctgcatttatatagtgaagtgaaagctatttccgctcgtctgggaggaaagtacaaatgcatagaaaaattgatagacttaaaaaatggcaacaatgacttgtgaagaaatattcagtctgcatgcacccgataccgaaaattcagatttgtacgatgcttaccggaatgtaccgcttgatagtcgggatgaaatgcataagaacaatactcctttgcacacagcctgctattttgcagacattacagctgtaggtatcttgttggaaagaggtgtggatacgaatgcgagaaacgatgacggtgatacaccgctgtgtgtcatggcgaagcggaactcctgtccgaatgataccctgtatgccgatatttccggactattgctttacgaaggggcgaaggtaacgcgctcgggtaaaaatacaaccgctttgatagaagcagtacgcaatcgtcattttttgatggccgatgtccttctgatgtcgggaaaccgtattgattctaccgactggaatggtgacaatgtgctgcacgctatttgcgactccgcaggatacattgcaaacaatattaagtccagaaaaaaacggatagctgactttgctgaaagatggtactcggacaaggacaagcaggaaacttatgaagaactggaaagccttctggtattggacaagcagtgttgccatactacaaggattattttggaaagcgggcagatagattcggaggaaaagaacaattgcgggaaaacaccctttctcatagcggcagaaagaggcgcccggaaaatcggggcattgttgtcaggacaagaccccgaaacagacgagcttgcggccattgccggtggattagacctgtttcaggcattgtggtatagggacgaagaggctttggatgctctgctacgttccggtgcggatactcaagttgtgtgcgaggataatgatatgactgatttcaagggaaaatccccgttgggatgcgctttgacatgggagaatttttcagcagcagagttattgctgagaagaggagctgatccgaattttagggattcggaggaacgtacagcctttgcagtatggatgagtaacagagggcatggctgtgagtataaggagccatgcctgcattttctccaatgcctgacagtgtgtgggtgggatttggaaagtccggccgacaaggaaggaaacactgccttatccgtggcttgtcgcggggcaaaatatgacacgggaatatgggctgttcgttatctcgtagaaaacggggcagatgtgaatgcacacaacatgcagggacagacccctgcgatgaatctttatggaggacgttactgggatggaaacataccgcgtttttcaggtttcgcaaggtcatatccatacgacgggcgagcttgtacggaacaagatgcggagacgcttgaggtgctgcttgaagctggggcagacatcaatgtcaaggacaaatggggtaatactttgttgcattatatagcgggaagctcgatgagaggttcaaaggaggcgaccgaattggtcatggagttcggtactccagatgtgagtgctgtgaataatgaaggcttgacggctttggacatcgcagcgaaaaaaaatgacgaaactcttgtaaaatttttattgaaatatagttgagatttgtatggataacaatatgactttcctgaatgcctgccgtaacggtcagaaaggcattgtacagatattccttaaaaaaggtggtattgatgtggacaaacgggatgtagagggtaatactccgttatatcatgcttgtctgaaaggattcagagacattgtgaatcttctgctcgatagcgatgcggatgtttccatcgctaacaactgttcggaaacacccttacatgcagttgcaaggaacgggaataaagagataattggaaagctgatacaatatggagcggatctggatgctacggataatgagggacgaactccattgattcgtctccttgataacaagcgtaccgatgcggccttgtttctgatagaacaaggggcagacacagaaatcactgataattctggtcataaggcgatagattacgctactgcccacgggctgaaagaagttgtgatacgcctgatagtggatggaacaagcgatatccaaggtaatacacctctccatcaggcggttttcaatggtcaatcggaaatagtctgtttgttgctctctacatctcccgacatgatagatgtaacgaatgatgctggggaaactcctttgctcatcgcctgcatgaaaggaaacctgaccatcgttaatctgttgattgatgctggggcagaagtaaataaagcccttttaaatggaaatacccccttgcactttgcagctgggtttggaaataaatttataggcaatagcctgatagcggcacaagcactggttaatgttaaaaacaagaatggggaaacgccgcttattcttgcttccagggaaggcaacaatgagtttgttgcactgcttgtggcacatggagcagacgtaaaccttgtggataattttcagcagacagcattgtattatgcaggtgaacgaggctataatgagattgtggagacattattgatggcaggagctgaaggatagcacggataacacaacataaagctccgttccctgcaaatcattatgaatcattttccttattataaaaaatgaacatggaatttataaaacgactagccaataatctgtttggcaaacgtaaaacgtatgatgcgaaagaactgggtatcttttattctaaagtttggaattgctggaaaaatgaaagctattattggttcacgtccatgaaattttcagtatatcgggaagaaacttttttgtgtataaatggagattcagatgctccatttcagccacagatattctgcctgagagaggtactcaacaactgggaagaaatacgcagtcagataagcagaattatacctaaacatgttcgttatataaaaaataaggaagtttttatttattggaaagagtgcttttacccggagtctgtcgatgtgtttggagctggaactaatggagtgaagattactttttccacatatgacttaaatcatagtttcagttttgtatggagagatggacatgtccgtgatttcgttttggaaaacgaggaaaaggaaaatattccatatccggaggcatacacgtattatttatttgattatttgtattatataggcgaaatatgggaaaaaagcaattctcggatgtgtggcagtatattacttttttggtattacacattcatttttgttattcctgtatattttcttctgctacatatacaagaaataggtagagctgataatttcccattgtattatataggatttaatttcctttttccatttctattttcatgggttcgatacaggaagaaaagaaaatcagctctgatgaaacattatcgttatcctaagaaaataaagattatcagtgctattttctttttgttggttccaattgtaatatgtggtttagagatatggatttatggtaaacaaggatggattaatattgtatattgagaagctgtaaaactgtttggtttaaattattataatcatttatagggataatgaacgtgagggattattcaacagatgagctcttgatgatggccaataatgtaactgaagagtattctgaagaggaagtcagactggcaaagaaagagttatataagcgaggaataaatgacgagttaatagccgacattgtgaaggaggaagaagaggcttttatgaaaaggttggatgctgctgcacgtgcggagcaggcccggatagataaacgaaacgaaaagaacaggaatataagttatcaatggtgggaattactgattttatttgtatttgcaccattttatttgtgcaggagatgttatttacctcataattttttcccgaagttgagacagttgagagaagaaaaatatgacctgaaatttaaacaacggcttattgcattaattgctggagatatagtatgggtccttgcttattggattgaacgtgtaatcatgggaaactagattacataatttctctggctatccacgcgcaggcttcagcatcggccagtgcgttatgatggttttccagacggtatccgcaggctgcggccacggtgtgcaattggtggttggggagctccggaaatactctgcgtgccacgcatagagtgtcataaaactcatagtcgggatagtccatctgatagacgcggaagacggctttcaggcagctttcatcgaaaggacggttgtgtgccacgagcggcagtccctctattaacggctcaatctgtgcccaaacggcaggaaataccggtgcgtcttcggtatcttcacgggtgagtccgtgtacctgtgagcaccagtatgtgtaataattcggttccggattgatgagggaataaaaggtatcggctatctcgccgttgcgcaccacgaccacgcctaccgagcatacggatgagcgctggttgttggcggtttcaaaatctattgcggcaaagtctctcatgtctttacttgctctatatacgttatcgcttggtcacggtaatcatgaacgtgacggctaccatggcaatggaaatgccgacaatgatgttggtggtcagcggttcgccaaacatcagtgtgccgacaatgatggcggtgatgggttcgaatacgccgagtacagaagccttggtggctccgatgttacgggaggcaatggcgagggtggccgtagaaacgatggttggcagcagggcaagtcccacaaggttaagccagtctgcttcggtagtgattccagccgtaattgcagtgtcggaactgaggatttttccgataaagacaatcgctcctaccatgagggcatagaaggtgagcagggagttggatatgccggcaatggccttgctccggttgatgatgacgatgaagagtgcatacaccagtgccgaggcgatggagagcagcacaccgatggggttgatggtttgtgaaccgtcactctgtgtcatgatgagcacacctccgaaggtggcggcaatggcaagccataccggccatgagggaacgactttcaggaacaccatgataatggccacgaggacggggtaaaggaataccagcgtagtagccagtccggaagcgatgtattcgtatgcatcgaaaagaaagatgctgctggaggtgtaaagtagtccgaggacgaacaatacgccgatttgctttcctgaaacccggaaactctgtttgcggagcagcaggaacaggcctaagagcagcactgcgaaagcgtagcggaagaaaagtatggactcagtggcggcaccgttcttcatcagcggaaccgcaaataagggatttaatccgtaagtaataccggtgataattcctgccggatagccgataatggcatttttgcttagttttttcatgtgcgggtagatgtaattgtgtaatcggggtgcaaaattaattattaaatgacaaacctgcgcttgtgacggaggagattcttcccgtgtgcctactttctgtaaatatatcttgccagtccgtagatgtatctccggaatcccggacggtacttaagcagacggtcgaaccatttcagatggtggctggcaatacgtacggcccatcctacataatacatggcaaacagcgtacctactccgatgatatgccattgccattttccgaagaagatgtagcagaagacgatgccgagaagcaccagtgaaacgtctaccacaatcttgactttcggaaattctatgcccgtcaccttgctgatggcgacgggaaagccttctccaggcatggtcacgctgccgcatcttacctccagtgcaatgcctgctgccaggatggtgcatccggccagttgggccatggctttctcccatatagcttcgggttgcagccatgaaagaaggtagaggttcaggtcgattaacatgccgaatacaaaacccacgagcaactggaacagttggaccgggtcaaactgccggcggagtactcccacttgtcccactaccagcagggcattcatgatgaaggtgtattgcccgatggtcagtgacggtgtcagtccgccggttcccgcatcatgaaatacatagggcaatacactgatgacgcttgctcccagcatgctctttacgcaggcggcaattcccagtgtcatgatgtacaaggcaatgaagagcagtaagtgttgccaggcaaaagatatgattttttctttttttgtcatttttgattgtacttcgtgcgatgttgtttttcgtgtggattattatctcagaaacggatcaatcgtactgagcagctcagccttctgcatcacgccgctggttctccagagtacttccccgttgcggaacagcatgagggtagggacggactgaatctggtatttctgagacaatacgctgtgtgtgtccacatcaatcttgatgatacggatgcggtcgcccagcacgtctttcacctgtttcagaatcgggtgcatcattttacaaggttgacaccaggtggcgaagaagtccaccaatataagctgattgcctgttactacgtcataaaaagtttccattgctttcgtttttaagtggttctatataaacaaggctacctcccgaaagaaatagcccggtgtgtgttcaatacgtttaaaatgcggtgcaaatgtacgaaaagccgattaatgatgaacatgaaatagtaaagaaaaatctgtatctttgcacgactttttttaaggtaagaagaaacaatggatgcaatcgttacacagatgattatcctgtttattctggtaatcatcggctattatctgagtaagaagaaaatgatggatgcggatttcgaccgcaaactttcgggactggttatcaacgtgacgtgtcccagtctgatactttcgtcggtgatgggcgacacgcttcccgacaagacgctgattctgcctttgctcgtggtaggttttgctacctacgtggtgcttatcgggttagcctttctgcttccgcgctatttgcccgtcaaactgtccgaccgcggtatttacagtttcatgttggcattcggcaatgtgggtttcatcggctatcccattgtggcttccatttttggagccagtgcggtgttctatgccagcattcttaatttccccagcacgttgttgatttttgtgttcggtaccctgtttatttcaggcggtcagggaaagatgcgttttgactggcgtactctctactgtccggccatgattgcgtcgtacctctccattctgattgtcgtgaccggatgggtacctccccgtgtcatcagtaccccgtttgtcctgttgggaaatgtcaccgtgcctgctgcgctgctcatcatcggctcgtccattgcccgtgtacccattcgccggatgtttggcaatacggccatctacctgatgtcggtcttgcgtctgatgctggttccactccttattttgtatctctcacgcctttgccgggtggaagaaaccattgccaatatcaatgtggtgctggcggccatgcccgtagcttcgtacggcaccctgttctgtatccagtatcagaaaggggagatcatcatggcagaaggaaccttcctcactaccttgctttccgtactgagcattccgttgctgacgatgttcctgtagacttatttcagcagggctgcatacgtcttttcggattcatgcggcagtatcttctggaactgggtgagcatccgttcgcgtgattcctgcggactgcggtcgggatggcaggccttccgtccaaagagacgttcgggcgtggtgagcagtgaccagccccagccatattcccttccgtggcggtcgagggggtagataaaatcctccgtcacaatgtagccacccatttccagtcgggtgagataggcatcgaagcggctccgcatccttggtccggtaaatccgcatgccgcacgcagttcccgtgtaatcaggctgccttcgcatcttagtatgtcgaggatggtttcttcaatgcttcccgcctccggataaggaaacagactccgccggtaattgcagaagtcgggccaccactcgcgactgatgaatgcggctttgtccttgaagaacttgccgtatgcgcaaccgctttcttgcaggatggcacctttccattcccaaagcggccattcccatccgccgtcgggcaaacgggtatactggcagtcttcgtccgtgacttcttcggccgaccatccggcgatgcccatgcttagcaagggaaggaaacccgtttcattgatgtagtcaataagttcgggacaggagtgtaggagttcttgtttcatggttacggtgatttttccttgtaagataatgaacaaaactgatatatttgcgtattattgtatgaagcaaaacagaatctatgacacctcctccaattgaacaatccacctgggaagctcgcagggcgtatgtgatcgatgcctggaagtgcctgcacgattgcgagtcgtgcggcaagtgccgcatcctaaaaggtaaggatgcggaaactttgtatgccgactacattgaaggcaagcgtagctatatggacgtgacgctggagctccggaacaagagttattaaatttttctggaggtagtgatgtcgcatgaatcactttgtcaggcgtagtttttttctgaaatcttatcagcaatggaaccccatctcgtaagcttcattcagcttgctgtgtccgttgatggcgcgtgagtcagctactccgccgcagaaaagcgtaccggccaggcggctcttcgggaagcagtcaatccagcccgtgagacccgcttcggcacgttgaggaacctccggctcttcttcggctgccacggtcagcatatagacgtcgcggaactggtaatccagggtgtacattgcattcatacggtcgatgagtactttcatctgtccgctcatctcgaaataataaatcggggtagcccatacgatgacatctgcatgcagtactttctgcatgatagcgtctacatcgtcattaatcacacacttgcccaatttctggcaagctaaacatccgcgacagaaacgtatatcttttccgatgagtgagatttttttctacttcgtggcctgcctggagggcaccttctatgaatttgtcggccagcatgtcgctgttggaaccagcacgcagactggttgaaatcacaattacttttttcatgttatcttgtttgggttgattttttctgataaactttcttcaaagttatggatttctgtgcagctttcctcgtgtgtggagtgaaaattatgcgtatagaatatctcttgaaaattattaaaggcaaatagtggaggtgttacggtttatttgtaatattgccacactaaaagaaatacttgaataacaaataataccggtatgaaaaatcagcacattccgtattcttcagcgataaacgatatgattttcgacatcaagaaaaaaggtgtggtaagttttcctaaaaaagggcttgcagagaatgccactgatttcttcaatcagataatcaagtggcagtttcagcataaagcaaccattcaggctatacacaaggcactacttgagtatgtgaaacgtccggatgccgtgtttgctatccgtctttatgcagatgcgccaggaaagcaatatttcttgctgcgcaggggattcctgtctgaatatcaggatgggttgaaaacctttttctgtgacaatacatttgccatgccttttactgctttgaaactttatgataagtgttatactgcatccgatttagtggagcatctcaatcagaaaaatgtagtgtgcggctttaaaatagacaaagaagaacgaaaacttgcttattataagtgcaataactatagccatattaacttgaatgattcggggtggtatttggcgcatattcttcctgtgggttataattttgccgggaaacaacggttaactaaggtatttcctaatcctaaaagagcggagtaggaattggacccggcacacatccggcgtgtcgaccgttcatttacggagaatgaatacgctgtacttgtagcgcattttcttcgcttggtacaccctcttaattcttttgtgatacctaagcaagactatgtggcttatgatgggaaaaacctgggtgaagagcaagagcttatcaatatagtgcaggattatgtgaaagcgggatttcctaaggaatatgccgagctgcagacactgatgcagattcctgagcaggaaaaagtgacggacacggtaggcaagattcactgggcggtatcggaatatcaaatcaagaaatggaggaagacaatttttaaagacaagccaaagataactttaaagaagcgcagtaagaaagtgaaagatcaatatgatgaggataaagcgtatgcattggataacaggctgagttctgttggcaaggccacttttataaagctttatcctttggtcaagcaaaatctggatattaccgtagaagaggtagagaaggtgtatcctgagtataagaaaggtaaagcagagaatgcaaaaaggacctgtttgtcgtctacacgcagtatcatccgaaacggttatgaggcagaggcgctggaaattatcgtaaattcatcacgcatggacgatgcggtgattctagaagcgaagaaatatctggaagaattgtaccagaaagattgatttgcggggaactctttaatgtgatttcctgaatgcctgaaatatgagggacttttcgtatcttcgcaaacaaaacaatcaatgaagtatgggaaaaagaatgattaatttttcggcagccttgttgggagttgccacgatggcttccagcctgtgctcgtgcagcagccagcagaaggaatcgccgatgaaagcaaaggtagaggagtatgcatctgttgaacttaagtctgatcttgtgaacaacttgagcgacaaggaaaaagagttggtgagaatatttttccaggtggggaaaattaccgacgaccttttttggaagcagacattcggtgataaaagcaagctcgataccattaccgacagctatgcgaaagagtttgccatgattcactatggcgcatggaaccgtctggacaataacaagcctttcctggctggttatggcgaaaaaccggatgtatgcaactattacccgctggatattaccgaagccgagtttaatgcctttgaagatgaaaacaaggactcatggtacacggttatccgccgcaacgaagacggttctccaaagagcgtatggtatcatgaagcctatgccccggaaatagaacgtatctgtgctttgctggagaaagcggtggcactggcagaggacccgggcctgaaaacctaccttgaaaagcgtatcgaagcattcaagactgatgattatctggccagtgacctggcatggatggacatgaaggacagcaagattgacttcgtgacaggacctattgaaacttacgatgataagttccgtgaaaccaaggcttcgtacgagtcgtttatcctgctgaaggatgaagcccgcagcaaggaactggccaagttcgtagccatgcttccggcccttcagaaagagttgccctgtccgccggaatataaaacctttgtgccgggtacctcgtccgacctgaatgtgtatgatgcagtgtactatgccggcgactgtaacgcgggaagcaagaccattgccatcaacctgccgaacgacgagcgggtacatgcgctgaaaggtacacgccgtctgcaattgcgtaactccatgaaggctaagttcgacaagattctgttgcctatcggacagcttgtcgttacgcccgaacagcagaaatacctcaactttgatgcgtttttctggaacgtgactttccatgaagtggcacacggactgggtgtgaagcagactatccgtaccaatgaaagcgtagatgcagtgatgggcacagagaagacttcctgggaagaagccaaggctgacattctgggcctgttcatggtgaccaagctgattgagatgggcgaaatcacgaacattacaactgaagatgcgatggctacttacattgcaggcattctgcgttcagtccgttttggagcagcttcttcacacggaaaagccaatatgatgtgcttcaactacatggagaaagcaggggcattttcacgcgatgaaaaaggtcagtatgtgattgattttgcaaaggccaaggaagccatgaacggttgggccacgttgattcttcagacacagggcgacggcaatgtggaatttgcgaagaaatacagagaaaagaacggtggaatcactccggcacttcaggccgaccttgaccggattaacggagcaggcattcctcgtgacattacctttgtgcagggagaagaagtgctgttaggaaaagcacagtaacatcagttactgaaacataaagagcctgcggttcagatgcgtctttgaaccgcaggcttttttatgccgtcattctcatgccgcatgtgcaggcattgattccttattctttatctgcctgtcttctgaaaatctgtgccgcaatgctgcccgagaagttgtgccataccgagaacatggctccaggtacggccgccatgggaaacaaggcaaaatgagtggcggcaagtgaagtggccagacctgaattttgcatgcccacctcgatggcgatggccgaccgtttggacggctcgcttccgacaagagaggagagaccatagcccagggccagtccgagtacattgtgcagaatcactgctacggccactatcaggctgcaagctaggatgctggctgcgttgtgcgctacgataatgccgatgatgaacgcaatggacaaggtggaaatcatcggtagcagcggtactatccgtcgggtggtgcgctggaagtaatgattggcggctactcccagtacgatgggtactattaccacctgtacgatacttaaaaacatgcctgccacgtctacttccaccgattctccggcaagcagccatacgagtgcaggtgttacgatgggagctagcagtgtagagactccggtcatggccacgctcagggctacatcgcctttggccaggtagcagataacattgctggctgtacctcccggacaacatcccacgagaatcactcctaaggcgagttcttctggcagcgacaataatttgcagagcagccacgccagcgagggcatgataagaaactgtgccagttcgccgacgaggatgtctttcggatgttgcaagactggtcggaagtcggacggacgaagcgtcagtcccatgccgaacatcaccacgcccagcatcggtgtgatggccgatgtatctatccagttgaatgaggagggaaggaagagagccacggccgtcactagcaccaccacaagggtgatgtgggctgcaatccatgcagaaatttggatgagtttatttttcattgtcattttttcaaaattgtctgcaaagctacaaaatttcgtgcgaatcttggcgggaatgtggacaaagtactcctcctgactcgtggaatatgattcagcttctgctgtatatgcaaagccagctctgtctgccttttcctagaatctgtaacatgggtatatagtccgaggatttgtatactatccgtcattcagcccttttctatttttgtatcggttaattgataagtaacagatatgattggaggagaaaattatatggaagttatcagaaattcagaattcgggggcgaacgccctttgtttgagtcgcataatctgcgtttggaaaacgtaataatccgtgccggagaatcggccatcaaggagtgcagcaacattgaggcagtagattgccgttttgaggggaattaccctttctggcaagttcacggttttaagattgagcgttgctatttcgatgtgggaggacgctcggcgttatggtattccgaccatctgcagatgagggataccgtgattgacgctcccaaaatgttccgcgagatgagtgaggttgacattgaaaacgtcacgatgaacgatgctgatgaggtattctggcgttgcaacggtatccgtattaaaaaccttaagttgcatggaggaacttatcccttcatgttcagcaatgacatttatgtggacggactggagagtgacagcaagtatgttttccagtatgtgaagaatgtggagattcacaatgccaagattaccaccaaggatgctttctgggaagtggagaatgtgactatctacgattcagagcttaacggcgaataccttggctggcactccagaaacctccgtctggtgaactgccacatcacgggcgagcagccgctttgctatgcacacgaccttatactggaaaactgtacgtttgggccagactgcgaccgtgcctttgagtacagcacgctgaatgccgatatccgtggtgccataaccaacattaagaatcctacatcgggacgtatcgtagccgacgagtacggctccataaccattgacgagaacatcaaggctcctgccgactgcgaaatccggcttagagatgaacgtacctgctttaccgactaaaatgtgaggaccatgaaatacgactttgatacaattatttcccgccggggaaccaattcctacaagtgggacagtctgccggcggataaagatatacttcccctttgggtagccgacatggatttccgtacggcgccggcaattactgaagcactaaccagacgtgtagcgcacggcatattcgggtatgtgcgtgtccccgatgaatactatacggcagtaacccgctggtttggaaggcgccatcactggactttccgtaaagagtggatgatatacacttccggagtagttccggccgtatctgctgtcatcaaggctttgacccaacctggagacggtgtagttgtgcagactcctgtgtacaactgctttttttcatccatccgtaacaacgggtgccgcgttgtcaccaatcctctgatatacgaagatggtacctaccatatcaactttgacgacctggaacgtaaagtgaaagaaccgggcgtaaagttgctgcttttgtgcaacccgcataatcctgcaggacgtgtatggacccgtgaggaactgtgccggataggagagatttgtctgcagaataatgtgaccgttctatcggacgagatacattgtgagcttgttttctccggatatacctatataccgtatgcatctgtcagtgaggagcatttgtggaattccgtgacctgcgtatcacccagtaaatcctttaatattgcaggattgcagatagccagcattatagcccgcgatgagaccgtgcgccagcggatagaccgtgccatcaacattaacgaggtgtgcgatgtcaatcctttcggggttgaggctgccatcgccgcttataatgaaggtgaggactggcttcttgagttgttggactatctgaagggcaactatgactatctgtgtgcattcttccgtacccacctgcctgaaataccggtgacaaagctggaaggaacctatctggtgtggacagactgcagggcactgcatttgccgtctgataccttgcagacccgtctgctggaaactaccggactctggctcaacagcggtaccatgtacggagccgaaggagaaggattcctgcgctggaacattgcctgtccgcgttcggtattacaggatgccctgtcgcgtttcaagggctttgtcgatgccttaacaacagaagaatgacccgatgaaacgtaacttacctgaaacggacacaaatggagccttaccggagcaatccaaggagcatccggctgcaaaaaagaaaacagatgtgttgcttgaccttatccgtgacggccgtccgatgaccttgcgacagcagctgcgcctgaccgtagaactcagcgttccggccattatagcacagctgtcttccatcatcatgcagtatatcgatgcagccatggtgggacgtatcggtgcagaggcatctgcttccatcggactggtatcgaccactacatggcttttctggggactctgtacggctgccgctaccggattctctgtacaggtggcccacaaagtcggagcaggcgacctgaagggagcacgtatgattctgctgcagtcacttgccggcacactggtcttcagtctgctgctggccatattgggcgcgagcatcagctcctcactgccggcatggctgggaggcgatgtttccatccgtcgggatgcttccatttatttcttcatattttctattttcctgcctgtcctgcaaatgatttttctggcaggcggtatgctgcgctgtagtggaaatatgcgtatccccagtctgctgggcgtcatcatgtgcgtactggatgtggtatttaacttctttctgattttcccgacacgcggatgtagcatagcaggcatgcaattcactattccgggagccggacttggcgtgagcggtgctgccttgggtacggctgctgcagagaccatcgttgccggtgtgttactatggtatctgttgacacgttcagagaaactgagctaccgcagtagggaaggcagctttcggctgaaagccgatacgttcaggaaagcactccgtatcggtttcccgatgggaatagaacatgtggtcatttgcggggcacagattctgacgacagtcatcgtagcgccactcggagtctttgccattgcagccaattcttttgccattacggccgaaagtctttgctatatgcctggctacggaattgccgatgcggccaccactcttgtcggccagagtatcggagccggacggaagaagctgacccgcagctttgcccatattaccgtactgatgggaatggccatcatgggcgtaatgggtattcttatgtatctgttcgcccctcagattattgggatgatgactccggtcgaagaaatccgtctgctgggggtaatggctttacgcatcgaagcttttgctgagcccatgtttgctgcctctattgttgcatacggtgtctttgtcggagcagccgatacactggttccatgtctgatgaacttattcagcatctgggctgtacgtctgactctggctgcctggctcgccccgacactgggactgcaaggcgtatggattgccatgtgcgtagaactgtgttttcgtggacttatcttccttgtacgtctgaaacgtggacgatggctgaaatgcgataagacgtaattgatgagaattaccgaaccggcaacccaggtaaacgacaaggctgtggcatcagttctcagaagcctttatatcaaaaaaaaaccgatcatcggaatatggtaaagtcgtatccggtggtcggtttcatttcttgtctttttgtttgcctgttattctcgttcaaaatgggcaaatgtgaactatatctttccattcttttgattgcttcttttcttgtacccattcagtagctttatcccatattcgtggtgttacgaatacaaatgtggcagatgctttgtcatattttaatggatcctttgtccgtttattataatcttcattcgctttttgaaggggatttgcgttaaccccacattcccaaagtgaaattccaggagaaatattaaagattgcatcagccgattctactacgccatcccaacctgttaaatgaactgcgtctccattgggaaatctaatattacttgtgttggttgaggttgctcttatcaatcgtaatattaattctggtaacaatccttgtgcagaccttgtatctgcccattgtttgatagttgtagatgtaatccatttcatatttagtcgtcttttattgtgtttggttaaatcttattttttattatattccaccctttctgccgcagccatgggataatcactctcataaaggtgatacactttcggctcatttacaggcatttcattgtcagtccattgctcacactggcggataacagtttcgagtgcatttgctgcttcttcaggtgggtaatgatacttcttcagcagacgcttgatcattttgcgcatgccggcacgggctgattcctttttctgccagtcaatggtacggttctttcggagaatttccgtcagttccttggtcatggtcaccagttcctcattggtatatacatcatgtacggcctgaggctgggtcagagcatcgtagaaagacttttcttcacgtgtcagtcccaggtcattcccggcagcttcggaggatgaaatttcttttgccaatttcaaaagttcttgtattacctcttcattcgtaagcagccctttcaggtagttcgataaggaacgattcagcaggtcagagaacttttcagcctgcacgatgttggttttctgatacaaggtcactcgttctgccaataaccttttcagcagttcaacggctatgttcttttccttcattttggatatatcgtcaagaaatgccgcatcaaacagagagaattcagcctttacatcagagaaaagattaatcactccttcactcttgatgctatgtttgagtaactctccaattcttgcgttaatttcgcgcttggatacctttccttttcccgtcattcgtgagagtagggtacgtactgcctcaaagaatgccgcttcatatcgctgtgattcgtctaacaagcttcggcacagtgtgagggagttatgcagaagcagtgcttctttcaggaatatctggtgctgttcctgcttggctggtgacatgatgaagttcaccccgccttttatgatttgagcacattccaggtcggatgccgtttggaaattgctgtaatcgtagccgtggaacaaatcgcggcacacctctaatttttccctgaatttaagtaaggccgtttccttaatatccggattcccaaagttcttgcggtcccgacgagtatagtcgtgcatggcttctttcaaagctttagctatgccgatgtagtctaccaccagtccgcccgctttcccgttgaacacccggtttacacgggcaatggcctgcatcaaattatgtccgctcatgggtttaaacacgtacattgtagccaatgatggcacgtcaaaaccggttagccacatatccactacaatggcaattttcatcgggtcctcattgtctttgaaacgcttggcgagttccttcttatactgtttgttgccgataatatcatgccactcttcagggtccttgttgctgccggtcattaccaccttcaccttttccgtccagttaggacgcagttcaagcagtttgtggtaaatgctcattgcgatagggcgtgaataggccacaatcatggctttacccgtcagctcatattgtctgttttcttcgtaatgcttcagaatgtccctgcacagcgaatcgattgtttccggagcacccaaaatctcttccaggtgcgacatttcctttttgctcttctcaatctgttcatccgtagcaccttcctcggcaagtaaatcatattccgcgtcaatggctctcaatgtggcttcgtccaggttcagattgattacgcgcgattcataatataccggacaagtggcaccatcagacaccgcctgagtcatgtcgtacacatcgatatagttaccgaaaacctcaaccgtatccctgtcttttgtagatataggcgtacctgtaaaaccaatgtacgatgcattcggcaggcagtcatgaataatccttgcagtacctatgacacgcttggcaatgtcttcccctttctcattcttagtcatgcggattttctcttcaaatccgtattgtccgcggtgtgcttcgtcggtcatcaccacaatgtttttcctgagcgacaaaggctcggccgattcttcaaatttctgcatggtggtgaatacaattccgtttgcttcacgcccggccagcagagccttcaggtcttcgcggcttttggcctgtacgggcacctggcgcaagaaatccttacacttggcaaactgagtatagagctggtcgtccaaatcgttgcggtctgtaattaccacgatggtaggctgggagagttcactttgcaacaagtgagcgtagaacaccatggaaagcgattttccgctgccttgcgtatgccagaacacgccaatcttaccgtcattctgtacagcaattttcgtacgctcaatagctttctttactgcaaaatactgatgatacccggcaagaatttttgcggctcctgcttcgtctttcgagaagcagacaaaattcttgataatatctaaaaggcgctctttctggaagatgccttcgaaaaaagtatcataatcggcaaagtccgtactttcatagtcaccatccttggtcttccactccatgtaacggtcttctttgcttgtcagcgttccggcctttgagcatgccatgtcactcatcacacagaacacattatagatgaagagcgacgggatttctttcatgtaattgcgtagctgtaaataggcttccgatgcatccgtttcttcgcgtgaaggagacttcagttccataaccacaaggggaagtccgtttatgaagatgatgatgtctgcccgcttttcggagtactccacaaaagtccattggttcaccacctggaagtcgttacactcagtgtgtgcgaagtctatcagatagacaatatcattccgttgctctttaccgtcaaaaaaggaaacttctatgccatgttgcagatagtccataaacagctcgtttttctgtgtcagacttccagtgtcaatatctttcagcttggatacagcttcatttattgctgtttgtggctttcctctgttcacattgctcaggctttccataagctgttcttcatagaacggcacatagtaatcacgctctatgtcaggaccataaagatgcgtatagcccatctgttcgaagagagctgtcacggctttttcgtaattgtcttctgtgaatgacatggctttatatattgtcttttctacctattatacttttcgctaataaataaaccctggtaccaacactttgaggccacctatctgtaggggttgtatctaatttttcagccctttctatggctatatcaacatgcgacaaaagagccatggcatcataatctgattcgcgataatgtccggtcaaatctttcagtcgtttctttagccatgtattttgggtgttgacttttctattcatttttagagctgccatttcttcctcattatatgtagcaatattctctatatgcaatagtagccacagttcaaaacatgggttgctgacacaaaaacgtaaattgtcgttttgagtacagtattgtgctacagctgatagcattttgtctttccatttatccttatctaccacaatccataactggtcgtcatcttcaatgttgtactccgacataaatttacgaatctgttcgtaaacattctccggacttgattcgttggagtcgcgatgcagaacttccacatgaacatcagaggcacacaatgataccttcatagactcgaagtaaatgttctcggtattcctgccttcggctgcaataaccactaaccttgcagactttacgccttcacgccttttaaaatcttttcgttttctcatggttgtttaccattttagactgctgacaggcgcaaagaaaggtattgcaccatatctgccttgtaaataacctttacgaatatcttctctgggcttgtattcggcaagcgaagtgaggtgagatgctccttcatgtcctttttccacaaaccatacttcgtcagcacgaatcaaatccaaatccagtaagtttgattcatgtgttgagaatattaattgtgtgtcacgctcattggaaagatgtttgaaataatattccaatagtttctttgacaacataggatgcatacttctgtctatctcatcaaccagataaaccgattcgttcaaacgcaggtcaatcagcatgggaatgaaatccaacaaacggatagagccatccgattcttcactcatttcgaacggaatttcatcattgttctctgttctatgtatcgcattctgcttgtatataacggttattccatccgagtctgtttcaaagaaataaatggtagaatccgttggcgatgctattacaaagttcttattaggttctgcttccgataaaagttcacttatcagttcctttggcaaatccacatcctctttactgacctttatacgacgaatatctacaatccctgtattgaaatactccagtaaagattttgtagccacagcaaagtccttgtctttttccgcacggatagatataccttcataacgtgaatccgggaaaataattttcagactttctttcatccagccatatacgtcgtttatcagaggcaatccttttccgttgcgctttatatattcagacagaaaactatctgttatcggtgtactttggctgataaatttcagcagctgtaaagtctctgtatcaccgttaaccgttccgaatgtaaattcattcccttctgctgtaacttttcgtgtgaaaatctctctgtccgcacggcttgtaatttcataaagccattcttccactattccccttatggtaaattctgctccatacgcaaaaaactttttcccgaccttaaattcaagttctacctttgatggcctgttgttggttgctgtcagtttaaatggctctacatactttttaggaataccagacaaagcaattttctgtatcatggaaacagatttaatgatgttgcttttacctgaagcgttggctccataaatgatacctgccttcaatacagaaatgtcatcacgtttttctgccctgcttacttgttctgaatgtagtgtactcttgccggctacaaaactgatttcagtttcttccatgaaagaatacagattttctatagttactcttagtatcatggatctgacgaattatatcaatttttatatgcaaatatagaaatttaattcgtttaaaatagcgtccttgtcaaattatttcaaaaaacttgtaatatatgacgtggttatactgctcgattgaatgtgaaaagtcgaagaatattttatatttactatgaattaaaatcctttattaatagtttttcaaaacattccacaaaagaaatgtagtaatgtatttgttcattcatataatttcgtttttatttcactgagctttagttcacctgacataagtttggggagaagggtgtcacgaagctgagcaaggttcttattctcatctttattcttttctattgactgaaaaataggaatcactatgttattgaatttttttagtatttcttttgccggaattccaattgatattttttttaaattaggaacagtcagttgctgttgagttgttccagtagcactgaagttttgtcttaatgcccataggtataaatattcagccgatagttcttcttttttcggaatgactgaaattaatcgaactataggaacataaggttttgttcgtaaacatatatacccaattgtacctcttgcagatatagttatacttgaactatttattttagcaaaatctgtgtagccatataaaccttcgttttcgattccattagaatatattggtgtatagtatttttctgttaattctttcgagtaaatagatggtttatctcctcctgctgttatagatgttatatttcccagttcatgataattaagttcaatatttgtcccatctacaaaccaagacttgaataatgcttgtgcctgttgctctaaattttcatttatgcggcagtttagttcaattttttcatcgagagattgtaggatatttgagattttcttttgtattattaaattaggagccttaatactaatattttgtatattttttatgggtaattttaactgaactgcaccaacaatgcctttgctcatctctgattgtccatatgttgaaatcaagaaatagtaaagatattctttctcaatattggatacattaactactttaacacagttttctgtaagatttgcgttgtttaatgtatttcctactatgccaattaaacctattgttcctacaattgacatgataatatctcctgtatttactatatattttgagataaacttttgagtttcatcgtcaacatatgcataagatgagtttaactctaaagttttttcatgccccaagtcctgaactcttatatatgggtgattgttaggagccttaattaggtttactcctttaggcagtcgtttgcctccttttatagttgcaatatcacccaatctatattctttccattcttccatttattcatcttattaaatcatgaaaaatcatactatctattcttttttgttcttccttgacaaacgcacataactcatcttcaaatatttttttctgttcatttaaataagaagaaatagtatagcagaaaatattcattaagtttattgccttgttcaagtcattgtttttctcattaattataaaatgaatatctttttcatacttaggtgcaatttcttttgacatattagccatagttagaattattcttcttaattcatccgggaaaattatgtaatttgttttgtacaaattgagaatagataaatctctaacccattcaccatatttctgacgcatattacttaatatcatcaatacttttttcgcagattcatttctatcatacttgattaattgaacactaagcctattattgttggatatatcatttgctgccatttcatctataaaatgtctgtcgtcttctgtgaaaatcccttttgttaatttcactgaataatcagcaacaacaatgggctgtatagagtcattgattatcataatgttgtcaaccagttcgtctaatcttttttgctcaatttcacgttgaaccaacaaggtttgaaacttttggttgtctttattttgcttcaccgatatataaatagttcggtaggctataatcatggctataacagtagctattgaactgatagcagtccaatcaatcgtacataaatccaagttcataggctagctattaaatcttaaacccaatactccccaactgctttctaatctcttcctccaattggtgcgacttctcaaacatttcagacaattctgaagtgagtcgctccattttttccaggaacggttcgccgtcgtcttccgcttcggctatgcccacataacgtcccggggtaagtatgtagtcctgcttggctacttcatcaagggtagctgctgcacaatatcctttttcatcttccaatactcctgcctgaaaatcattgtacgttttagcgatacgctgaatgtcttcttccgtcagttcacgcagcttgcgggtcaccattgttcccatctggcgggcatcgatgaacagaatttttcccgtttgcttcttggcgcggttgaggaaccagagggatacggggataccggtggtatagaataattgagaaggcattgccacaatacattctaccaaatctgccttgatgatattctcacggattgtgccttcaccgcctgattgcgaagaaagggcaccattggccagcaccatgccgatgcgtccgtggggggagaggtgatgaatcatgtgctgaatccatgcaaagttggcattgcctgaagggggaataccgtatttccagcgtacatcatcctgcaacttatcggctccccagtcgctcaaattgaaaggcggattggccaagatgtaatcggctttaagggtagggtgctggtcatcgaagaaggtatcggctgcaaacttgcctaaatcggcttctataccgcgaatggctaagttcatttgtgccattttccatgtggtagggttgctgtcttgtccgaatacagagatgttgtttatgtttccttggtgttcattgataaacttggcagactgtacgaacataccgccagaaccgcagcaggggtcgtatacgcggccgctatagggctgcaacacttctaccagcgtgcggacaatacaggcaggggtgtagaactctccggccagtttgccttcagcctcggcaaactttgaaagacaatattcgtatgtacggcccaaaatatcttttgaatcgccgtgttctttcatctgaatgttggtgaaaaggtctaccacatcgcccagtcgtcttttatccaactcggggcgggcaaagtttttgggcagaatgcctttcaggcgtggattctctttttcaatcaggcgcatggcattgtctatggctgtacctacttcgggggtatgtgcggcttctgctactacagcccagcgtgcttcctgcggtacaaagaaaatgttttcggaagtgtattcatctttgtcttcttcaaagccgtcgccttcttctacaagctcattgtatttggcctcgaaacggtcagaaatgtatttcaggaaaataagtcccagaactacggatttatattctgaagcatcgaggtttcctcgtagtaaatcggctgctttccatatttctttttcaaagccaatatctgctgtattatttttctttgccataaggttgtattatttttttcggtgataaaatttttcatgtctgcgctcaatgtgcaggtaaaccatacaaaggtaaaaatattatgccacattgaagaagataggataaaagattttatgtgccatagacgcagatgtgattgcgcctatacccaaatacctcgacacgtagctgtcaaggtctcgacacgaacgtgacgagacatcagcacgaacgtgtcaagacctcgtcacgtacgtgtcgaggtaaatttaactctattttaaagaatatacaggagtttgttttttgaaaagtgatttgattatatcaactcttctttctaaatgataaaaggctactggaaatcagtagcctttatatctatattcgcttgaaaacagacaattacttacccacacaaaagtgcttaaaaatattccccagcacctcatccgtctcaattgtgccgcccacgatttcccccaagtgataaagacattcgcgaaggtcttgtgaaaccaggtcaccggagagttgcatggtcagcccgtcttgtacgcggtggatagcttccagcgcacggctcagtgcttcatagtggcggatgttgctcaccactacatcgttctgcgacaggtcaggcagggcggcaaagtccaccaactgcttctgaagctgagaaagtccctctttctgcttagccgaaagggaaagcacacaagcatcctccggcaagtcggggagagccgctttcaggcgagcgagttgtttatctgctgaagaatcagccgatgaaagcaagtccgctttgttgagcacaatcaccaggtgcttacctttgcagcgaggaagaatcttgtcggccaactgacggtattgctcttcggcacaagtggcatcaataacccaaagcacgatgtcggcctgatccagcttctggaagcttcgttcgatgcctaagctttcgatggtgtcggttgtttcgcggataccggcggtatcgatgaagcggaaggtgatacctcccaagttcatggtatcttcaattacatcgcgagtggtaccgtggatgtcactcacgatggcacgttcttcgttcaggagggcattcagcagggtggacttaccggcatttgtttcgccgacgatagccacgggcactccgtttttcagggcattgcccacgctgaacgtatctaccaagtgatggataacctgctcaatctgacgggcgatgtcttccagttccgaacggtcggcaaactccagttcctcgtggtcgctgaagtcgagttctagttccatgagggaggtgaggtggagcagcttgtcacgcaggacagccagttcacggctgaatccgccacgcatctggttcatggccatgcggtgggtagcggcggaagtggatgcaatgaggtcggccacggcttcggcctggctcaggtccatcttgccattcaagaaggcacgctgggtatattcacccggtcctgcggcacggcatccttggcggataaggagctgcatcacttgctggaggatatagctcgatccgtggcaggaaatttccgtggaatcctgaccagtgtaagagtggggggcacggaaaaggctgaccagcacttcgtcgatgatttctccttcgggcgtgaggatatagccgaaggtgagagtataaggtgcgcgtccggctaatggtttgccggaaacgggcttaaagacgcggtcggtgagggtgatggcttccggccccgacacgcggatggtgccgatggctccaccctgagcggtggcaatggcacagatggtatcttcagtttgtaatatgttcacgtgtgtatgtctttttaaaatccttgcaaagatacggttttcgagttacatccggaagcgtagccgacagatttatgcgggctggtagagggttttcaccagcaggtcgactactttttcgaggtattcacggtccgtttcatcgaatgtagccagctggtcgctgtcgatgtcgagcacgccccgcacttctcctgcgactatcatcggcacgacgatttcggaacgggagagggaactgcaggcaatgtggccggggaacttatctacgtcgggcacgagttgggtacgggcttcagcccaggcggtgccgcatacgccgcgtcctttcttgatgcggtagcaggccacgctgccctgaaacgggccaaggtggagttcgccttcgtgtacgaggtagaagcctacccaaaagaatccgaaggcttctttcagggcggcactggtgttggccagtacgctgatttcgtttttctcgccttcaatcagaggggcgaactgttcgaggaactgagcgtatcgctgacgcttgtcggtaagggtggatttaaaacttgcttccatatgagtgagttttcagacataaaaacaggttctctcccgaagaagagaacctgttgattcataataagtttgttatattctttcaagtacgactttaatcagatcgtcaatcttgttcttgtatccggtgttggcttccttggctactcggttcgcaatgaccatgcacacggtggtagctttatggccttgcagacgtgccagtccggccagtgcggaactttccatctcgaagttggtgatgcggcgaccctgatattcgaagctctcgattttctcgttctggtgcgggtcggccagtggaatacggagctggcgtccttgcggaccgaagaaaccgccacaggctactgtcacaccacgtaccatgtctgtaccggcgatacggtctaccagttcttcgttagcatgaatcacatagggagccggtgcacagagattgcccgtccaacctaagtggttgagcagggcacgttccatgggcaggtcgcacaccgcgttacgtccttcgtagaagttcagaagcccgtcaaatcccacggagatagcggaacagatgtaggtgcctacaggcgtataaggttgcaaaccgccgcaggtaccgatacgcacaatttccaactgacggaaggtttcgttttcttcacgggtctggaaattgatgttggccagtgcgtcgagttcattcattacgatgtctacgttgtcgcatccgataccggtagaggttaccgtgatgcgtttgccctgataggtaccggtcacggtacggaactcacggctttctacttcgcattctttggtgtcgaaatgagaggctacgagagctacacgtccggggtcgcctaccaggatgactttatctgccaggtgttctggtttcacgtggaggtggaacaccgaaccatcttcattgatgatcagttctgaaggaggaaaatactttttcatacgcatttgtttttagttagcaagttaagtgttttgtttctgtctttttatttgccgataggttcatgtccggccgggtgtgaatcagggcgggcaatgctgctccgcatgtcggtgtcggcctgaatattcttcatccggtaatagtccatgataccgaggttgccggtgcggaaggcttctgccatggctttaggcacttctgcttctgcctgaatcacgttagcacgagcttcttcagctttggctttcatttcctgttccagggcaacagccatagcacgacgttcctcagcctttgcctgagcgatgtttttgtcggcgttggcctggtctatctgcaaggaagctccgatgttacggcctatatcgatgtcggcaatatcaatggaaagaatttcgaaggcagtaccggcatccagtcccttacgcaacacaagtttggagatggagtcggggttttcgagtaccgatttgtggttttcggaggaaccgatggaggagacaataccttcgcctacacgggccagtacggtgtcttcaccggcaccacccactaattggcggatgttggcgcgtacggttacacgagccttggctatcaactggataccgtctttggctacagcggtcacaggaggggtgtcaattactttcgggttaaccgacatctgtacagcttcgaacacgtcgcgtccggccaggtcgattccggtggccatctggaaagacaggtcgatgttggcttttgatgccgataccagcgcatgtaccaccttttccacgtgtccgccggccatatagtgagcttccaactcgtcgcgcgtaatggtgctcagtccggccttgtgggcttcaatcatggcaggcacgatgacgtaaggcggcacgttacggatacgcatcaggaacaattggatgagcgaaatctttacacccgacaccttggccgaaagccagagaaagaaaggcacgtagtgaaagaatatgaccagaaagatgatgacacctccggccagtataaacggaagataagcgggattaatcatataacttagatttaaaagtgaatacaaaaagggagaaggggattaggcctgcttcacgtaaacagtagtttcgttgatacggacaatttctaccggcgttttttcatcgatgaatccgtcggccgattgtacctcgatgatgtgtccgttgaagtcggcattacctatcagggtcaggcgggtaacacttatgcctttgtcacctggtttcaggtccattccttcaaaaggtgaggggcggtagtcgagcgttttcttcagcgacaggcggtctacggtcttagagcgcatgaaccaccacgtcacgccgatgatgcccaacagggaaactcctaaggtaatgaatccagcctccgaaccgagcgatgtaaaagcggaatagatggcatacagaacgcataccgccgacccgattcccgctatgctgatgccgggaatcaggaagacctctatggcaaaaagtatcaatccgcctacgatgagtgcaatgataatcagtgtttccatggttatgtgaatatattaaggattcttgagcttgcggatttccgtgttccggatgtcgagggtcagacgatctatctcctcgcgcaattccttcacccgtttttcctggtccagtatgccgggagtcagctggccttttgtgctctgattaccagaagcgtacttggcccgtactctgtcaagtgcatcaatcatcgtatccaaatccttttccttctgctggagcaactgaaatttcttccgtgcatcggccgaacggaaatcgccaagggtgtgatagatggcgttatcgtccaccacgaaacggaaatcaccttttttttgagtttcattgcctccgtacatcacctgtgccaattgctgtttagcgatacgtaccttatcggcatcgttccacgtatggcggataccgttcaacatagctacattggtcagcaaagctgggtcggtcgtatcatagtcgtacacccgtttggaattgttgggggcaaacacgtacacgcagacttttccttccggctgatagcggtcggaagcaaaccagcctaagtcgttgaagtcgtcgatggcatacatgtaatcgttgaaaggagagttgaacgggaatcccatgttatcgggtttcaggtagcttccatcctctgcatcatagcgggtgatgaaaatatcgtatccgcctaagctggcttcacctttggctgcaaaatacaaggtaataccatcggagttcatgaacggatagttcaggtcagtatccaggtcttccagtcctttgaccttttcaggaacactccagtcgccacctaatgtagcactggtgtacagcacttcctggttggttcccggcaaacggtgggagaggattttcttatccttcataccgttagtaaattccgtacagtcgttttctcctgtcagaccgatttttccggattcttcgtgaattttataagcttcaaggaaattcgctttatcaactacaaaactatcaataacagctacattctctacacctcttatcatgcgggagcccatgcggtaatgctccatcaagccttccacttcagaaacgtcacgtttctttctttccagccagtagatatgttcatccagattctcaatggcttcgtcgaaacggtagaggtcggcatacgctttactcaggtaaagataaccgttgattactttacgttcggcactcttttccagataaggaagtgattcctgcagttcgccggtctcgtaacagcatgcgccgtaccaaaaattgtaattggcattcgaaggggactgtttcaccaggcgcttgaacacgggtttggccttatcgaattctttattgttgaaccatttctgggcctggcttaagctttgggcagaagttcctcctgcgcaacaaagagccagcagaggaagcaaatatctttttttcatcgtttctgtgtctaaaagtttctcaaatgtaggaatattcttggaattatgccattttctgttccgctattttttattcagtcagaacttttgtgtgtttatttttgcgaatgtagtaaataatgtgctattgtcaaagcgtacgatccggctgacttgataaaaatctgtaacgaggacctgcggttcgggcgttttttcgtaaattcgtcgccgttttaacaacatacgatatgggaaaaatgacggaagaagaccgcctgatgcgccgcatcaaccagcggtttatgaaaggagtgatgaattacaagctgatagaggagggcgaccgtattctggtgggcctttcgggaggaaaggattcgctggccttgttggagttgctggcccagcgttcgcgcatctacaagcctaagttttcggtggtggcggcgcacgtggtgatgaagaacattgcatacgaatccgaccagacttacctgctcgaatatgccgaaagtttgggagtgccctacgtgtgttatgaaacggaattcgatccgtcgaccgatacacggaagtcgccatgctttctctgctcatggaatcgtcgtaaggctcttttcactgtggccaaagagcagggatgcaacaaaatcgctttgggacatcacatggacgacatattggaaaccctgctgatgaacatgacctttcagggagcattcagcaccatgccgccgcgcctggtgatgcgcaagtttgacatgaccattatccgccccatgtgtctggtacacgaagccgacctaaaggagatggccgctctccgtggtttccgcaagcaggtgaagaactgcccgtacgagaaagattctcaccgttcggatatgaaagaggtgctggcacgcctggaagccatgaatccggaggctcgctatagcttgtggggaagcatgaacaacatccagcacgatatgcttccggtagaggaagacgattcactcaaataaatgtcagtcggtagagtgaagaatcacctgtttgccggacatggtgacttttccttcggcaatcagttctgacaaggcacgggctagtgacggacgtgccactcctaaaataaaggctacttcctgctggttgtggatgcctccgtgcattttcaggtagttcagcaggcgtgacttcaagctctgcaaggcaaactcgttcagttttcggctcaggaacagactccgatcggatatcgtggcaataaaattccgcatcacagccggctgggcatgcatgaactcctcaaaacgtgtccggtccatgacaagtacctcacaaagttccgtggcttccacattcaccggaaagcgattctctgaagcatagataaaagccggtgctaaaatatcgggtgccttaatccagtcgatagtgagttgcttgccctcggcattctccatttgtgtcctcacgtgtccctttatcagaataaacaaggaacggcacacgtcaccctggcgggcaatgaattctccttccttatatgtgcgcagactgtttggggcttcacggagtaactgataaagtgcctccgggtcacagccttcaaacaggctcattcggttcaaaatttcggtatgcatctttcttttaacttttctttgggttgtgtgtcacataggtgacagaaatcccctgcaggattcctcatctttgcgcaaacttaatgaaaaatcaataataacccaagaaagaatatggaaggaaatatgttttgttaccagtgtcaggaagcggctaaaggcactggatgtgtgttgagaggagtatgcggaaagaaagataccactgcacgctacatggatttgttgctctttgtggtacgtggcgtatcggtggctgccgataccttgcgcacgaagggatacgaagtggaagccggtacgaatgagtttgtcaccgacgcacttttctctacaattaccaatgccaattttgacgatgaaagtatcctggctcgtgtgagaaagggactggaactgcgcgatcgtttgaaggtacgtgccgtggaagcaggtatcgtcctaccggaagcggatgaactgacatggaacggtaaggaggaagaatacctgtccaagtcagcttccgtaggagtgttgagagaaccgaacgaggaccttcgctcattgaaagaactgctgatgtacggactgaaaggaatggcagcttaccacgaacatgccatgcgtctgggatttgccgacgaggccattcatgcctttatgcaatcggctttggcgcgtatcaccacacagacaatgggagcggatgagctagtggctctggtacttgaggccgggcagcacggagtacaggtaatggccttgctggaccgtgccaacaccacccgctacggacatccggaactgacaaaggtaaacatcggagtagggaagaatccgggtatcctgatcagcggacacgacttgcacgacctggaggagcttttgcgtcagactgaaggtacgggagtagacgtgtacacgcatagtgaaatgctcccggggcattattatccggctttcaagaaatacaagcattttgtagggaactatggaaatgcctggtggaagcagcgcgaagaatttacggcattcaacggcccgatcgtatttactaccaactgtatcgtgccgccactggaaaatgcgacttataaggaacggatgtttacggccaattcgacggggtatcccggatgcaagcatattgccacggatgccgacggccacaaggatttttcagaggtcatcgcactggccaaacaatgccagccgcctgtagagctggagcagggagagattatcggcggatttgctcataatcaggtaatgcaattggctgacaaggtagtagaagctgtaaagagcggtgccattcgcaagtttgtggtcatggccggatgtgacggacgcatgaagagccgcgactactatgccgactttgctcaggcacttccgaaagatacggtcatccttacggccggttgcgcgaagtaccgttacaacaagcttccgttaggcgatattcaaggaattccccgtgtgcttgatgccggacaatgtaacgacagctactcactggccgtcattgccctgaagctgaaggaagtcttccagttgaacgacatcaacgaactccccatcatgtacaacattgcctggtacgaacaaaaggcggtcatcgtcctgctggccctcttgagcctgggcgtgaagcatatccacctgggtcctacgcttccggccttcctttcgcccaacgtagccaaagtgctggtagaacagttcggcatcggaggcattactacccccgaagcggacatgaaactgttcggtataggatgacggcttaatacgatttctcgttagccaggttccaggcattgaggaaagaagccttggtaatttccaccaccttctcccagttcagcttgtcggcatggtcagaaggctggtggtaatccggatgtccgtcagtgtgataccagatgatgggaatgtcgtgtacagcaaacgaagcattgtcgcttcctcccaccggacggtcccacgggcggtaatccggttgcagtttcaacccataacgggcaatgtcatccttgagccactgacccagtgccggatgtgcttccgtatagaagtacaccacgtgctcaggttgttccggccgattgttccggccaatcatatcgaaattcagataacctttgatatcctttacaaaatcgcagtgctgcatgaaatacttagagcctaaaagtcctttctcttctccatcccaaaatgcgatgatgacgttgcgcaggggctttttgccactggtctgaaaagcacgggcaatctgcatcacggccgatacacccgacgcattgtcgtcggctccgttgtagattttgtcacctgccagtgtttcatcaatacccagatgatcgaaatgcgcgcctaccactacgtactcattggtccgttctcccggaatcatacctaacacattagccatgcggagcgagcggtgcgtaccctgcttcaactgggcaatggaatcagggtgtacctgccaacggcctttctgctgccgttccttggcacaggcttcaaaaggctggtaatatgaatcatcatacagaggagcgatgccagcttcttgaagacaggaaaccaggtagcgggctgccacgcgcgagccaatcatgccggcttcacgtccttgcagcgcatcatcggccagaaagcctacaatggcctcggcagaagggcgattgatactcttcagacctttttctacggcggtctgtgcctgaaggaaagatgtactgcatgagcctatcgcccacatcagtaggagagaagtgactgtctttttcataatgagagcaaaaataggcagaacttctgaatttcacaaacgctttcgaacaatcttattatttatctagaaatacccggcgtgttgtttcaataatgaaatccttcttagttatttaagtcactgcttaataagaaacgctttattggaatgatttcgtcaaggatccttccgtttaccgatgacaattttacaagcatcgtaaaactgccatctgtttcttttacaattgattgatattctatatatacatcattgaagtagagtggcttgttttcattattgtataatgaatggtcggaatcggaataaagcagtcgggtgttattaataagaaaatgaagattgcttatattgtttttgaacgtattccttattaattcatccagatttgcgtttcttttgagtctttcttgaataaaatcggagtattctcctccggtgattatcaattcattcttcaaattattcaaatccctgaatccactgattaccatatcaaattgggcaagttcctgatggttggagcttagcagtttggcagtataattaataccttgactaaaagccgaagctgattggtattgaaccagaaagcctgtccgtgcaattaacaatttgctgaacaaatatcctccatcacctatttcttccaaataatgcaatataccactttgataatacttccttgcttctgactggttgacagtaacaaaagtcttataatattcgttacaatcaaaaggtatatacagttccgggctaatatcattcttatattttaccttgaggcataatttcttatcccgataatcatatcttatatcagtgagcaaagtgttttgcatgtcatcctgggtatatgcatatggtattccgtcgttatttgaagaactgatagttataaagtccttgagttgaagcgcaaactcatcggaattattttcccgatagaatgtgtcaaagtttgattcataaatatttttgtcatgagcgatttgtatacttgctctttttgtcatgttgtagtcagtcggcttgttaacaggttcttctttcttctccagggcgaacccggcaaaatcaagtgtttcctcaaaatctttctggccatttacattacctgtaaccaacaaggtaaaagtgcctgactgggtatcctgctgctggactataattttatcgataaaaatcgatttcccattgatgtgtttttctccgttaaactgttccaaatcggccagcacaactgtcacagtttgatttgtatcgaagataaaaatacttttgagttcttcctttgtgatagtatggcttgccgtctgagcgtcttcactgttcccgctctcattttcgctctcattccttttatcatcactctcatttttttcatcttcattcttattcctttcatctggagtttctattttaaatcctttaaaattcagtatctcttgaaatggtgtgtaatttaccgtacctgtcacagttaagctgaatcgaccttgtgatgcatcaatgttatctggtatgcagttgctgacaactatggttttccggtttacatgatactgtttttctgtgctaaaagaattgagtaactgtaaattctcatatacatctttttgtgtgtcaaaactaaatagcgaatataattcatctggggtaaccgtggtgaattcatcttctatgtttctgtgacatgcaatcaaaataacggttaaaacgcaaaaataggaaatttgttttgagattttcatactgatattaattcatataaaagtgattattctctgaagtgaggtaaataaatcgaacaagagtttcaatcttaaataatctacaatttagagttgtaaattgtttaaatcacatcactcgtttttatatgctttaacatcttgccttgaaatctattatcagagatctgaaaatgaaaagtcatcggccttttgaggaaataagtagccgttgacgatggacgcttacatcttctgcctatacatccttagcctgacggaaagaattgtggaaagtgctttcaggtattgcatatttacgcagccaaatcaccatttccgaaatgacgatttcggaagtgtaaaaatagcaagtagaactaagttgtctttttgaggggaagcggcctctatttaatgccgataaaatcacttagcggacgaatctttgctttgtaagtaaaagagccttccttcaggtttggctgatgtataatttttatcggattcttagaattgaaaaaaagtacaacataatatggagcatgtgtaggtgaaaagccatattgacgcaatgtatcagctgtccaaatttgaaatgttcctctgttttttaatttaaaaagctgacaatcttttccattggtatgaagcaaaacgtattgcatgcgttcaaatccaggggtgacaagcaatgaacctttagaatcgcccgcacgaaggtaacaaattcctttttctatcattttttgcttcagttcctttcgtgcatggtttatcattaccataatttcttccgggttttctgccattttctttagaaatttgtcagcagttaatggagaattaatttcttccttacggcgtatgcctaatttcaaaaaatctttattttgttctataccaatgaatttacgattaagcagatttgccgcaatccccgttgtacaactaccggcaaaaggatcaagtatggtatctccttcacgggtggaagacaaaatgatacgataaagaaggcgaagaggcttttgtgtaggatgtgcaccacattgcatttcccaagaagcaacaaacggtattttccatacatctgacatacgagttcccccgtttaacatctccatcaaattacaattaaaatagtgaggaatatgcttatgctttcttgcccacacaatatattcagtcgtaaaattaaaatagtttcgagaaagtgtgggccttgcatcggatttttgccatactattatattaagaattttataaccaagttcgaccatgcaagatgctacggagaatatattatgataggtaccacatacccatatagttccgtcatcttttaagactttgcgatatgcagatagccatttgtagttaaaggcttttattgcttcgaaatctcgctctctatcccattctcctttttcaaaatttttccatattccatttatttgtaatgaacatcctttagaaagaaaatagggaggatttgcaaaaatcatatccactttgtggttaatctgatttatttgctctaggttatcaccatggagtaaaataaaatccttatattcttctgttagattcttattcatcatacggcaaaatttagttcctgttgtgcattttctatttgaacttcagcatgctcttgaagttcaaaattaaaaactaatgcttcaactatggcatggcggttttccaaacgtcctcctccgtggtaaaagtgatcttttgtttccacattaaaatgattccagaatctgttaatcatttcattatttctatattcattatgatgccatgttgaaagaataaaatgtgctggagtatgcaataaagcatcaaaaagcgcttcttcatccttctgcgtccatccgttataataatctacatatctgccataataaggagggtcacaataaataaaatcaccggcctgcgctctttggattgtatctaagaatgaaacattatcaaattcccagttatatttgtgaatttcctgctgaactttttctacttggttacagatttttgtgatgtatgccggtaaaaagcgattaggtttcttacaaaaaggtatgttccattctccacggcggttaaagcgcatcataccattgaagcctgcacgtgacaaaaaaataaaatcaaatgggctgtgttcctgattaaaacgattttttacttcacgataataagcatatccgctatcttctgctgtcaaaagtaattggccttctctttctaaataagtacgcatattttgaggggtaatctctccattcattatttcattatagaaattgataatatgaggattagtatcacccactatgcggtttcctccaaccggagaattaaagccgacaactcctgttccaaaaaatggttctacccaatttgcattttgaatatccaatcctgattgaaaaatcaaatcttttatccaaggaaccagtttggttttaataccttagtgattttataggtgggattattactgacatatttataattttgatagcttattagcctgtgattcaagatactccttgtatgttttaagattgttataatgtggaaatccaatgccagccttttgcgcatcgtctttgttaaaatagcccatccagtaatcatcaaatacatcttcacctagttgcgcaaatggtccttcaccttttatcagcttttcgatatttgttataccaccaatattacgggtatttccacttcctggaatatcatttgcaattttccatttaggctgaacgaaaaaaatgaaattttcaatcactgaatgaatcattttcaattcatcaattccaaagacttcacgctcattaattttggtatcattttgtttataaagcatgcctaatacagtgtgagaagaatatgaattatatggataatccgtactcattttttttgtcacgatttctaaaatatccccaatatgaccctaacgtcaggccatttactgactcagaagtgtagtaacttgatttaaaatcaacagcaaacaaatgcccatcactatcttcgaaagttaagtcaggataataattttgttttgaaggcaactttaattttaatccattcttgtttgcaaacttatcaagtcggggtataagaagtattcaataattttagaaactacttttgtgtcgttagttattgtttatatatttttgtctacatcaataaatccttttacaatccattcattattggctgtttctaaaaaattcttatatgtctttacctcttctgtcaataagttaaaaaaatcgtctttagtcatattgtgatgatattaatgagacaaaggtattttatttccctaaatgttcaatccactgaacaaaaatgttcaatctgcatcaaagataggaaatccaatccagaagaggaaaaaatgaagacgtaaaatcatttctattgtataagctgctcttcaggagaatttgcagcaatacacttgtttggaattatttacatttataactgtctgataattaatcgattataatttcactaaaacacaagtacattttgcttgagacacaagtacgttttacttgaaacgtcaaagagttttgcttcaaacacaaggacgttttggttcaaacgtccttgcgttttccctaaaatgtacttgtgtttgaagtgtactgaaaatagttgtcagtttgaagattaattcctgacaaagttgacaggttaaacattatattcctaaaaa

SEQ ID NO: 3804 - DNA, 41522 bp, Unknown
  gut microbiota DNA sequence
taactggaaaaattattcaaaaaactgaaaattatgactacattcaaacgtaacatactgattaccggcggtgccggatttattggcagccacgtggtgcgcctgttcgtaaacaagtatccggagtaccgtatcatcaacctggacaagctgacgtatgcgggtaacctggcgaacctgaaggacattgagaaccagccgaactatgtgttcataaaggcggacatctgcgactacgagaagatgcaggagctgatggagctgtatcacgtggacggtatcattcacctggctgcggagagccatgtggaccgcagcatcaaggatccgtttacctttgcacgcaccaacgtgatgggtacgctgtcgctgctgcaggcggccaaggtgtactgggaaagtctgccggagaagtatgagggcaagcgtttctatcacatctctaccgacgaggtgtacggggcgctggagatgacacatccggaaggtatcgagccgccgttcactaccacggcttcgtcgtcggaacatcacctggcgtacgggaaggatttcttctacgaggatacgaagtataatccgcacagcccctactctgccagcaaggcaagcagtgaccactttgtgcgggcattccacgatacgtacggcatgccgaccatcgtaacgaactgttcgaacaactacgggccgtatcagttcccggaaaagctgattccgctgttcatcaacaacatccgtcaccgcaagccgctgccggtatacggtaagggggaaaacgtgcgcgactggctgtatgtggtggatcatgcgcgggctatcgacgtgattttccacaacggtaagacggcagaaacctataacatcggcggtttcaatgagtggaagaacattgacatcatcaaggtggtgattaacacggtggaccgtctgctgggccgcaaagagggtgaagacatggatctgattacctacgtgaccgaccgcctgggccacgacatgcgttatgccatcgactctacgaagctgcagaaggaactgggctgggaaccgagcctgcagtttgaagagggcatcgaaaagacggtacactggtatctggacaaccaggaatggatggacaacgtgacgagcggtgactaccagaagtattatgactcgatgtataagggacgataaaaaatagacctgaaacgagaaacgtatgaaaaaaccaccgtgaaggaaacaaaccctccaaaaacggtgtttttttgaatttcagcaacaattttaatatgaaacctgtttatttttgttacatttgtcctgtcgattgataggaaaatagcaacaaatatgatttatacagacttctcagtaaaaaactatagagggattcgccaatgtaaattggaaaagttagaattgataaacctcttcttcggaaaaaacaactgtggcaagtcttctttgctggaatcattatttatattgtcaggccctgacaaccccacattacccattttagcaaacaagagcagagcactggattcattggaagaaacggatttaaaaattgagttctatcaagcaaatccagaacacactatacaattaaacagtctgggagaacaaagccgacaggtttctatccaaatgatagaatcgcactcccaaaacatttcactggaagacttacaaaagaactcatcggaaagtgccggtaaacggtatggactgaaaatcaacttctccacagaagcagagaaagaaagcaaatatcattctgaactggtggttacagaagaaaaaagcggaaacattacctctgacaaaagatacaaggaggctctttacgcggaatacattccttctaaccacatgcaaatcgacatcgtggagaaaatgactgagattattcagaacaaacaagaaaaggaaattgtggaagctctccagattgtagaacctcgtatcactgacgtacaactggtaggtaaaagggtaatggtagatgtaggactgccgacccgacttccaatcaatgtgttgggagacggagtacgcaaagtactggctgttattctttccatttacacatgcagaaatggggtgcttatcatagatgaactggataatggcttgcatttttcggtcatgccgcaattatgggaagtcatcctttatatgtgccagaaacatcatacacagatttttgcttccacacacagtatggatttagttaaatcgctggtcaaggctattggcaaatcagcacaaatgccacagatagcatcctataagctgataagaaaagctgacgacgaacttgtggctctacgttatagcgcagaagaactgtcgtatgctatcaaacaggaaatggaggtaagataggatgacacagattttcattgaagcacggtatgaaaaaacatctgagtatgtatttttaaatacaatcataaaggagcttggattttccgaagcacaatataagataatctgtgtcggcggaaatagcaacttgataaaagcagccaataaattcaaggagaataccattgaaggtggaaaaaatctgattatttttgatgcggacacacctgctacggggtatggattttcggctaccctgcaacgcatcaaccaggaattgcaaagcaatggaatgcaggctgacggaatctttcttttcccaaacaatgcagacgatggcatttttgaaaatttactggaaaaactgatgcaaaaaaagactcatgaacaatggctacattgctattctgactatgaaacttgtttggggaatcattatctgactcctaatctaaagggtaaattgtttacttacatcagtgcgcaaaagaccctgagtaacacacaacgaaacaaattggggagcggacaatggctgttcaacgatgcccaatattggaatctcaacgctcctgaattacaacctttaaaggattttctctgtaataacatttcttgaaataaattcttcattatgaaaagatattgccagacactggagctctatgacgacaaggagctgattgaagcctacgtggcagaacatgcacacgtgtgggaagaggtgaaagcgggtatccgcgaggtgggtatcacggacatgcagatttacattgacggaaaccgcctgttcatgattatggataccacggatgagtttgacatggaacgggattatgcacggctggctaccctgccccgtcaggcggaatgggaagcgcacatggcgaagttccagaaagctgctccgggagctacctcgcaggagaaatggaagctgatgacgcggatatttaagctgtaaagagtgaaagagtgaaaaattaaaagttaaaagttaaaaacgagtggatgttttctcttttgacaaaagaacagaaagacaaaagatttaataataaagtgaaaacgggatgcttttaccgcttttactttttaactattaacttttaactctatatgttcttctgttcttatgtctaaaaatatatgctcatgaaaaagttattgtcattgccaccaaatctggtggaatgttttcacgatattatgcacgcggaccacaaggagtggttctgcacatcagacccggtgggaaagaaactgggttcgggaggtggtacggcctggctgctgaatgcttgccgggaggaagaggataaggatgccgcactgggcgactggctggcacgggagaagcgtatcctgctgcatgcagggggacagagccgccgtctgccgggctatgcaccgtcgggcaaggtactgacgccgataccggtgttccgctgggcacgcggacagcgcatcacacaggacttgctgtcgctgcagttgccgctgtatgaggaaatcatggagcgggcgccggagggactgcgcacgctgattgcgagcggcgacgtgtacatccgtgccacggaaccgctgcaggagattccggatgtggacgtggtgtgctacggcttgtgggtagacccggaactggcgaagaaccacggggtgttcgtatcgtcgcggaaggaaccagagaagctggacttcatgctgcagaaaccgagcgtggaggaaatgggccagctgatgcaggattacctgttcctgatggacatcggcatctggctgctgagtgaccgtgccatcgagctgatggtgaaacgttctaccgacaaggacgggggcgtgaagttctacgacatgtactcggagttcggactggcactgggagcgcatccacgcatcgtggatgaggagctgaacagcctgaaggtggctatcctgccgctgccgggcggtgagttccaccactacggtacgagccgggagatgatttcgtcgacgctggcggtgcagaactgcgtgacggaccagcgggcgattatgcaccacaaggtgaaaccgcatccggcggtgttcgtgcagaatgcggagatggagttcccgctgacggcagacaacgcagaggtgtgggtggaaaacagccacgtgggcaagagctggatgctgcacagccggaacatcatcacgggggtaccgcgcaacaactgggcgctgaacgtgccggaaggggtgtgcatcgacgtggtgccgatgggtgaacgggagtttgccgcacgtccgtatggttttaacgataaattcaaggggagcctggaagaggcttctacggcatatctgggccgtccggtgacggaatggctggcggaaagaggtctgacaacggacgagattcggggctgtgaggacttgcaatcggctgcgattttcccggtgacggactcgatagaagatttgggtacggtgctgcaatggatgacggacggcggacagggtgaagccggacgggctatctggcagaaggcacggaaggtatcggccgacgagatttcggcgtatgcgaacctgcgacggctgttcgcccagcgggaggtgttccgcaaggagaactggagcctgctggccaagaaccaggaacggagcgtgttctatcaggtggacttgcaggaagcagcggaagcgtttgccaaagggggcatcgccctgccggaggaactgccggaggggacttctctgctgaagcgtatcagcgacgcgatgttccgtgcgaaggtgcgcgagctggaggggaatccggaagcgaaggaactggaggcacgggcgtttgggctgatgcgtcagggactgaccagcacgatggattaccgtcagcagccgaagttgtcggtgtatgcggaccagattgtgtggggacgcagcccggtgcgtatcgacattgcagggggatggacggataccccaccctacagcctgatggagggcggaaatgtggtgaacctggccattgagctgaacggacagccgccgctgcaggtgtacgtgaaaccgtcgaaggagtaccgcattacgttgcgctcaatcgatttaggtgccatggaggtggtgtctacctacgaggagctgcagcatttcaacaaggtgggttcgcctttctctattcccaaggcagcactggtactggctggcttccatccggatttctccatggaacggtttgcatcgctggaagcacagctgaagtcgttcggcacgggtattgaagtgaccttgctgtcggctattccggcaggttcgggactgggcaccagctctatcctggcggctacggtgttaggggcgctgaatgatttctgcggcctgaactgggacaagcagggcatcggcagccgtacactggtattggaacagttgctcaccacagggggcggctggcaagatcagtacggaggtgtgctgcacggggtgaagctgctgcagacgcaaccgggatggcaccaggaaccgaaggtgcgctggttgccggattacctgttcacaagcgacgagtaccgcaagtgccatctgctgtattacacgggcattacgcgtacggccaagggcatcctggcggagattgtgaagggcatgttcctgaactcgaaccgtcacctgcacctgctggaacagatgaagggtcacgccatggatatgtacgatgccatcctgcggaatgatttcgaggaaacgggacgactgatacggaagacgtggaagcagaaccagctgctggatgagggtacgaacccggcgacagtgcaggccttgacggaacggattgacgacctctgcctgggatataagttgccgggggccgggggcggcggttacctgtacatggtggccaaggatccggatgcggcggtgcgtatccgccggattctgacagaggaacgtccgaacgaacgggcgcgcttcgtggagatgagcttatcgaacaagggactggaaatcagtagaagctgagatggaaaagattggattagtaagaaccagggacggaaagagtttcctggttccttttattttgattacttccctcttttttctgtggggagtggcacacagtattctggatgtgctgaacaaacattttcaagatacactggagattacccgcacgcgctcggccctgattcaggcggtggtgtacggagggtattttatcatggcgctaccggcgggacggattatccgccgcttcggctaccgcacaggggtactgacgggcctggtgctgtatggcatcggggcgttgctgttcattccgggaggacggattcagtcgtttgagtttttcctgctggcgctgttcgtcatcggttgcggactgacctgcctggaaacggcctcgaacccgtatgtcacggtgctgggtgaaccggaaggcagtgagcggcgcatcaacctggcgcagtcgttcaacgggctgggctggatttgcggtccgctggcgggaggtttcttcctctttgccggaggaggtgacgtgactactccttacgcggtgctgggtacggtggtgctgtgcatcgccatcctcttttcgcgggtgaaactgccggaaataggccgggaagcagaaagcgaacaggctgaagcgagcgggaaatcgctgtggagaacgacctcgttcacagtgggactgctgtcgcttttcctttacgtggctgcacagacgggcatcaacagttttttcatcaactacgccaccgaaaatgcgggtgtttcggcacaggaggcttcggtatggctgtcgttcggcggcatgggattgttcatggccggacgcatgggcggaagctggctgatgcgcttcgtgaagggggaaaaagtgctggccgtttgtgcggctggtgcttgtgtatgcatggcggcagtcattctgatgccgggcggagcaggatggtatttcctgttactgtgctttttatgtgaatcgattatgtttcctactattttttccttatctttgcgccatgctggcacacaaaccaaacaggcttcttcttatctgattatgtcgattgtaggaggagcagtggctcccttgttaatggggctcatagccgaccgtatttccatggcagtgggatttatcgtaccgctggtctgctttatggaaatctggggattcgcagcaagatacagaaaactatcgtaatggttttgtcacattatcgtacacaggcaacggattatccatataaacgcacacaaacgtatgctgaaactaaaagatataaaaatcgttgaatcgaagaaagagctggaagctcttccggaagggaaactgttaatcaataccatcaatgcgcactcctataatacggctctgaaggatacgttctttgccgaagcgctgatgaaaggggatgcactgattcccgacggagcaagtatcgtgatggcttgccggaaactgaaagcgaaaagccagccgacagaacgtattgccggatgggacttgtttaccatggagatggaacggctgaaccaaaagggaggtacctgcttcttcatgggaagtagcgaaaaggtgctgaatctgattcgggaaaaagcgaaaacggtctacccgaacatccggattgaaacgtactccccaccctacaagccggaattctcggaagaagagaaccgggcaatcatcgaagccatcaaccgggctaatccggacttgctgtggattggtatgacggctcccaaacaggagaagtgggcataccgtcattgggataaactggacattcactgccattgcggcaccatcggtgcggtgttcgacttttttgccggcaccatggaacgggctcctctgtggtggcaggaacacagtctggaatggttgtacagactgctgaaagaaccgaaacggatgtggcgccgatacattatcggaaacacgttgtttatctggaatatctttagagaaatgtgactagcatatctgagattgaaacactaataaaaacatagcgcatgaaaacaaaatatgacgcctataacagttgggtaagcttttttatcgttacttgtgaaacgcttattacgggtggattgttctatctgttgtttctcactacagaagatacgccatggcacaagattctgcaggcgccgcacctgcagatcatcctgacggtgatgctttgctacttcgtatcggccatgcaggctggcgtggtgctttaccggcgtaaggtatatgcctaccagattctgggtaaggtattgaaaagtacaatctgcttcggagtattgtcgggggtagtgctggaactgggacgattcatggatgcctggtcgtatttctacctgacttttttagggctgctgtttatttcgctgtctgtattccgtatcctcatgcgatgggggttgaaaagataccgttcgaaaggtggtaacctgcgctatgtagtgctggtgggtagttcagaaaacaaccgcgagctatattatgaactgacgactcaggactggaccggattcagggtaaaggggtatttcgactttgagccgaacccgaagtttccacaggaatgtccgtacctgggaaaaccccaggacgtgaaagaatacctggaaaagaacgggaatacgcattacctgttctgctgtctgccttcgaaggaacatgtcattatccgttcgctgattaattactgcgagaaccacctggtgcatttctacagtgtgccaaacatttacaactatctgcagaaccgggtatatttcaatatgataggaaacgtacctttcctgagcctacgaccagacccgctgagccggacgggcaacaagatgatgaaacgggcgttcgacattgtgttctcactgctgtttctgtgtacgctcttcccgattatcctgctcattgtgaccattatcaccaagctgacgatgtcgggaccagtattcttcaaacaaaaacgaaacgggctgaacgacaaggagttctactgctataagttccggagcatgagggtgaacacacaggccgactcgctgcaggctaccaaggatgacccgcgcaagacacgctggggaaacatcatgcgaaaaacgagcatcgacgaactgccgcagttcatcaatgtgctgctgggcgacatgagcgtggtaggtccccgaccgcacatgctgaaacacacggaggaatattcgaaactgattaacaagtatatggtgagacacttcgtgaagccgggcatcacgggctggagccaggtgacgggctatcgcggagaaaccaaggagctgaaggatatggaaggacgtatccgtggagatatatggtatatcgaacactggagcttcggcctggacttgttcatcatctataaaacggtgatgaatgctatacatggggaaaagaacgcatactaagacttaatgaaaatttatttataaccaaagttttatgaatcattttttaaggcggggtatctgcctgggagcatgggtggccggttgcggcatggctcatgcacagctggccgcggtgaaaacgaacgcactgctgtgggggaacctgacgccgaacatttcaatggagctggtgacagcttccaaattcagcctggaagggactgtgttttacgggctgaacaagacgccgctggatgcccagctgaaaggggcacaggcggagttcaggtattggatttctggaagaccgatggcgcgttcattcatcggactatctgtaagcggcttaaggtatacggtggtgcacaagggaaaggcgcaccagggagaagctgcaggaccgggactgacatacggctatgcctggccgctgagtaaacggttcaacctggaattctcggccggagtgggtgccctgtggtacagggagaagaaatatccggagggtacatacctgaaaaaagaagagtataatgcaaacggagtgaagtgtgtgccgacagaaatagcggtgtcatgctgctatttattctaagaagctgaagcgtatgaataggaaaagaataagccgcatcgggaaatatgtactggttacgatgctgctgactgctgtccccgcaagcggatgggcgcagcgaatgattaaggtgagcggcacggtttacaacattgcggacaagaaaaagaaggttccgttctcgggaagcgtggtctatgtatatagctgcaagacggtggcggccgcaaaggacctgaagaacagcctggacaaggataataccaatttcgcactgttcatgaacgaagatgaaagggcggaaacggatgccaacgggtattacgagattctggtgccggacaacggggcactggtgttcaaagcgggcctgaacaaggccattctggaaaaggtgagcaaccgcatgaaaatagacgtagaagtggatgacggtatctatctgaaggaggtagtggtaacgggagagctgaagcagattcagccggaaccgaaggccagccgactgataggtaaccgtttttatccttataatacgtttctggtcccacatggagaaggcaacaagtattcgcgtctgattgtacagccgtatgtactgaactgtacgaccaacgacacggtggctttcttgaaaccactggtatacgacggcaaggaatatcacctgacccagacccgacgaatggggtacgacctgaaaagggatgctctggagccttatatccagtcacggccgctggtgaatgagcggatggtgattgaatggcaagacacggtgacggtgcccgacccgaacgtgaattacagttgctatgcggacttctgtatagaggactacaacaatgttccgttcagaaagacgtatcagattaatacatgcgagaacaagcgccccctgaaatttctgcaatatgacctgatagccttggatatggatttccaaaaatatccggagaaggcacaggtagagaagtttgacacggaggaccaggtggagctcagctttgaaatcaactcggaccggctgacggacgacccgaagaaccaggagagtctggccggaatacggaaaaaactgaacctgattctgaacgagcccggcgccatgctgaaagagtttcacgtcatcggcaaggcatcgccggaaggatattaccagcaaaacctgcagctggcccagaaacgtatgcaacggattcagcaggaggttatcggggtactcccccatgcggtagccgaacgcgtgtatcagaacccgcaggcggaagtggcttcatggaacgaggtggccgaactgctggagaaggacagcctgatggaaacggccggtttcatcagaaaggttgtaagagaactgcccgaccagatgaaccggcagggacagcgaatcaaggcctccaaggactaccgtacggtgattgtgccttacctggagcagctgagacaagtgaagtacctgtgccgctatgacatctaccgggaaccgaccgacaaggaggtgatggcggcttaccggagaaaaggactgaacgggatgtacacccggtatgaatactggaagctgctgcaattgctgaaggacagtcaggaaaaggaggcggtggcacgcaaggcatacgaagaatcgctaagcatgaagcgtccatgggtgctggccggaaacacgctggtcaagctgtacctggaaaaggatgtgaccgacacgcagatactggaaccgctgatagaccgtaccatctttaccgtgaactatgaaaggaaaaacatggatacgggaagaacggagattatcaacccgattgaggtggtggtgaaccagctgtgcatgtacatcaaagcgggcgactttgagaatgccagtgtcatggccaagctgattccggcggattacaaggaatttgacctggtgaaggcgtacgcatgggccatgggcggctatttccagggagggaatacgcctgaagagacgcagcgagccgcagagaccttccgcaccatctgtcagtcgtccgtacagaacgaggcggtgatgaacctggcactggaaacgccgcagggaaacgcacaggcggaaaaggtgctggaacagatggcggacgagagtccggtgaaatggtacctgaaggcggtgacggaagccagaaagggagacgtaggactgacggaagcggctctgtatctggtgagatgtttcaaccgggaccagaagatgattgtcactgcccagaacgacggtgaattcacgaaagagattgtggaaacggcgttggagatgtataagaatcagtaatcatgaaaataaacagaaagactttatatatagctgccctcggctatttgtggatgggcggaacggaaactatcctcgcacaggatgccacagccgattcggtgaaaaccggctttttcaacgcgatggattatgtgagacagaaaaggtatatccctgccggaagagcgattgaccccaaggccaggggatggaattcttccttgtcgatttttgctggtgccgggaaactgggaggcggagcggcaggcccctactccaaagaattcggtatcgccttcacaaaggatgtaacctcgttcaacagttaccgtctggccgtagaaggggcggtgaacgaacagattggaagaggcggcgtggaaatagcgcacatgttccggatactggattacctgaggggctacaaggacgacctgcgatgggacctggaaacggtactgggtatcggcatctacgggacgaaaaacaaggtttcaaaggaacgtttcgtagctggaggcatacacggcggactgcacgtgaactaccatctgcacaaccacctggacctgtttctggaaccgagggtgaatctttttaccgacggcatcaacgggctggagtcacagaagagatatgacatcggtgcccaggcgatggccggactgacttaccggtttaccggactgaacaagacttccggtccttcggccaactccggcgcactggacaacctgttctacgaaatttatgcgggtattcagggagattattctgccagaatacgaaaggcaccgataatgaacggggtactggaacccgtaggtccggtaatgggtatcagcatgggaaaatggttcctgcctttcgggataaggggaactttatttgccggagtgcataataccctctccgagaagggcactgaaaagataaaagaaggctacggaggcgtgcgactggaggctatggttaacctgaaccgtctgttcgacgaccgggtgactgacccccgactggaagtaaacctgatgggaggtgcggaagccggattcgtggcacaccggggagcgacttacgcccgcaaagtcagacctttcaccggaccgacactcggaggacagctggtgtatgccgtaaacgaccacatcggcgtattcgggcaggcacgctggagcaagaacagctatacgcaaaatttcttgcacggaacgagcagcaaacgccgcatgcagaacctgagcatagaaatgggggtgcagtacagaagacgcgaagaatgtattacccgtcaccaatacctgtttgaaccctataactttgtatcggtcggcatgggagcaaattacccgatgcgtaccggagaccagcagctgaaggccatgatgaagcacctgggacaacaattctatgtggggtatggaagaagatggagcaaatactcatcggttagaggatacatcgaaatggcgcattatccttacagtgtgagcaagcatgtatatccctttaccctcggagcggactacctggtagacctgagcaccctggccgcagcgtataacccggaaagaatctttacggtggaaggcctggcgggtattttatacacgcaccacggaacggcacaaaaggactatttcggcgtacaggccgggctgaaagaaaccgtgcggataaatgaccaatggggtgtctttgcggaagaagtgctgaggggctacaagggagccatcaccccgggggccagaaccttgacggagaagggaatctccctgcttccgtatgcgaatttaggggtgaacctgtacttttaggcagtttttttattaaacctcacacattttgatagatatcttatcattccttatcacggtttggaaatattgtattatctttgacgcagaattaataattacatgaatatgaatagtagaatttacattctggctattgcactgatgacaggtgtaggtgcaatggcgcaaaacacgcagcaaaacagcaacgtagaaaagattgaaaaatacactgtacagaccaacttgtttggcgacaacttgtttgtaggagccaacatcggtgcgcagatgtatgtaggcgactacatttcaaaaggaaaagccggcaaactgattactccgacattcgaaatcaatgtaggaaaatggtttactccagttatcggactgagagcgggattcggcggctaccaggctaaaggttactcagttaaagatgctggttttgcctacaaacgcgtagacaccaacgtgtatcgcaccaaatggggaatcctgcacttgcacggtgacgtaatgctgaacttcaccaacctgttctgcggctaccgtgaagacagattgtacaatgcaattccttacgtgagcatcggttacctgcgcggtatcgacaataacgaaaacgaattgtcaggaggtatcggattcatcaaccgtttccgtttgaacaaggcttgggacttgaacttggaattgaaaggaaacatcaacaacgacgtgatggacggtatccgtggcggaaagaatatggaaggttctgcagccatcatggtaggtgcaacttaccgcttcaaccgcagagactggactaagggtaccggtatctcggctgctgaaatgcaggctgtacagaatcagcttaagagcatgaacgaagaaaatgccagcttgagaaaccgcgtaaatgcactggaagaagaaaaacgtaaccagccggttgtaactgaaaccaaggctagcaacaagctgccggatgcaactgaatatgtagcgttcttcgacatcaacaaggcttacctgagcgaaaaagaagcagtgaatctggaagcttatgcaaacctgatcaagaagtatcctgaaaacaaattcatcatcacaggatatgctgacaagcagactggttcggctgaattcaacgaacgcctgagcaagctgagagcggaagctgtatacaacacactggtagataaatatggtgtaaacaaggatcagctgacaatggaatacaaaggtggtgttgacactatgttccgcgaaaatccgcgtctgagccgcgccgctatcatccgcatggcaaaataaaaaaaacactaaaatcataggaaatcgctgcacttccttgaaaaaggagatgcggcgatttctttttttcattctttctcttacatttgcaaactaaccttttttacgtaactttttaaacgaatttagatatgatcatagctgttgactttgacggtactattgtggaacaccgctatccggaaatcggacgggaaaagccttttgcctttgacacactgaaaatgctgcaaaaagaggggcaccggctgattttgtggactgtaagagaggacaagctgctggaagaggccgtggatttctgccgacagcatggagtggaattttatgcggtcaatacgaactatccggaggaacaggaggcgcatcagcatttctcgcggaagctgaaggcggatgtgttcattgacgaccgcaatctggggggaatgctcgactggggaagcatttaccgcatcatacattaccgcctgaaaattgcggatctggtggccgaaacgctggatgaaaggctggaagagggcatcgaacgccggaaacaggagaagaagaaaagacagggcttgtttggcaagctgttcggatgagacacatccggagaagatacgaaagaagctgtttcacacacggagcattccgacagtgaaacagcttcttttattgtatcccttttggggagaattattctacgtagagcaccagtcccttaaggtattcaccttccggatggtagatgttgaccggatggtcacccggctgggtgagctggtgaagaatgcgcacgctgcgtccgctctgtgcagctgcggtaaacacggcgttacggaagtcctgcttgttcaccacctgcgaacaggagaaggtaaagaggatgccgcccggacgtatcttttcgaaggccttggcattgagcttggtgtaaccgcgaagggcattgcgcagggcatcgcggtgcttggcaaaggccggcgggtcgaggataatcaggtcgtactggtcgcccatgcggtcgaggaacttgaaggcatcttccgcaaaggcctggtgacgggtatcgccggggaagttgagggatacgttctcgttggtcaggtcgatggccttggcagagctgtctaccgagtgaacgaggttggctcctcccctcatggcatagaacgagaagccaccggtgtagcaaaacatgttgagcacgttacggcccttggcatagcgttccagcaaggcacggttctcacgctggtcgacgaagaaaccggtcttctgtcccttgagccagtctacgtggaacttcagtccgttctccatggccacgttctccggacttccgcctttgaggaagccgttctcagtagccagtaggtcggccttgaagggcagcgtggtttctgatttataatagatgtgctggatgacgtcgcccatcacttcttcgagggcttcggccactaccatacggtcgaggtgcataccggcagagtgtgcctgcatcacggcagtatggtcgtacacgtcaataatcagtccgggcaggttatcgccctcgccgtgtaccagacggtaggtgttgttctgaggattgcccaacacgcccaaggcacagcggaggtctttggccacctgcaggcggcgtacccagaacgcgtggtcgatgggttcctgacggaaggaaagcacacgcacggcgatgcttccaatctggaaatgtccgcaggcaatgaattctttcttggaggtgtagacatctactacttcaccttcttccggctctccttccacacgggcgatggctccggaaaaaacccagggatggaaacgcttgagcgattcttcctttccgggtttgagaaatactttcttatagctcatttgtatggtttaagtgattaatcttcgagaatgtgttcaggggcttccgtgcgtatcacgcggtacttgcccgaaaggcgaagctcttccaggtactggtagatgcgtacgcaggcccaggcatcggtggcggcatagagctgctgtgcctcggtcagggtgtcggcctcccagttggacaggcgctggctcttggaaatcttttcctgaaaaaggagggcatagattttctgcaggctcttttcttcgatgccgaaagaggccacgtagtcctgcagctccacccagttgcccatgcgcgggtctttctgattgcggcggcgcagcatggcgaaatcatctttcagcgacaggccgattttgagcacatcgttctgaaggaactcttccaggaaatccggcagtccgaggtggttcaggcggaacaggaagcaggtgtcgtaagtagagacctgcaagagggccaccttgttgacggctcccttccggaacgaagggcgtgtttcggtgtccacccccaccagtacatgggtattgaggtaatcgatggccttgcgggcctcggcctcggtgtaaatcacgaagatgcgaccggggaaagagaccttgggtaactccgcaacgattttcttatctattttactctgtagttctaccattcagtttacgggtttagggttattcgtcgtcgcccatgtcaaggccttcgtagagttcttcttcggtgcagttgtcttcgtagagtgcggaatcttcctcttcctgactgctgtgcgaaagctggcggtacttcacgtcgtgaagggcacgcatcacattgaccaggcgctgtccccagaactcggcaaagagttcacggcagatggctaaggaatcgttcatggtgtgctccaggcccaactggaacacgcagatgaaatccttgatgggctggtaaatgtcggccaggctttcggaaatgttctgatgaatgggggtatcactataagccatgtcatcgaggaacacctcgaggtagtcatcgtattcgcccaagagagaggcgatggagccgcgaagcacttcgtaatcggtctcggtcacgaaggtttccgggtcggcatcttccatccgctcgcaagcaggaagcaacgaagccttcaggtataaaaggggaaggagtttcagggacttgtcgacgaaatcccgacagcgcatatcggaaacacgttccataaatccacagaactcggcagccactgtcacgaactcgactgcgtttttatcgaatattacttgagagtttttttcttccatattcatgcttattgacgtgcaaaggtacaaaaaaaatttctcagttttagttttattcgtacatttgcatgtatgtttagttaattcgaatcatcatgcaaacaaaaaaaacagatacaagcagaagtgaaaaagcggctgccatggccggaaaaacatggactatcctgaaaagtgagactaccgcgttcgtcatcggactgctctgcgtcatcttcggcgtgtacttgctgctggctttcagctcgttcttctttacgggaggaaacgaccaaagcattctgtcgcatcccaacccgtcggaactgctggaaacgggcaaccgcatacagaactatgccggagcacggggagcgcagctggcgcagttcctgattaatgactgcttcgggttttcagcttactgtatcattatcttcttagtggtgaccggcatgaagctgatgaaggcgtacgagttccgcatccgttactggttcttaggctgtgccacggtgatggtgtggctctctgtaaccttaggatttgcattcggaggactgctggaagattcttatatttatccggggggactgcacggctacaacgtgagcctgtggattcgctcgcaaatcggtgcgccgggattgattctggtgctgctggctacggccatattgttcggcgtggcactgacccgacagaccatgggcgtagtgagaaaggcactgcatccgcaaaagggaaataacgcagccatggcagaggaggtaactccccagccggaaccgacctaccggaagccggtagtggacgaaccggaagtgaccgctgcggaggatgaatcggagaagaaggaaaagaaagaaagtttctggaagagctggacgcaccggaaaccgaaacagaaaaaagaggaagagactccgcaggaagaaccggagaaggcggctgaacctgtcaaggaggaaccggagaaggtggtcgtgaaagaggaaccggcaccggagcgtgtcatcgacctgcccattgatactgaggaagaggatgagaagaagcacccttttgaggtgaagccggccctggaggaagacttcgacaaggaagaagaggagccggcatttgaggtcagcaacgataccaaggaagaggatcaggcttaccggggagacgtgtcgcagccgtacaacccgcgcctggacctggagttttaccgcttccctaccctcgacttgctgaatacgtatcagaacgacgatccggacatcgacatggaagaacagaatgccaacaagaaccgcatcatcaaggtgctgcgcagcttcggcattgaaatcagttccatcaaggccagtgtgggtccgaccattaccttatatgagattacgccggcggaaggggtacgtatctcgaaaatccgtaacctggaggacgacatcgccctgagtctttcggcactgggtatccgtatcatcgcaccgattccgggcaagggtaccatcggtatcgaagtgccaaacgcgaacccgcacatcgtacccatgagttctatcctgaccagcaagaagttccaggaaacaaccttcgacctgccggtggcactcggaaagaccattaccaacgaggtgttcatggtggatctggccaaggcgccccacatgctggtggccggtgcgacaggtcaaggtaagtctgtgggactgaatgccatcgtgacttccctgctctacaagaagcaccccagtgaactgaagttcgtcatcatcgacccgaagaaggtggaatttgccatctatgcgccgattgaacgccatttcctggccaagttgcccgacggagaggatgccatcatcaccgacgtgacgaaggtagtacagacactgaactcgctgtgtgtggaaatggacaaccgttacaagctcttgcagaacgcaggatgccgtaacatcaaggaatataacgcgaagtttatcaaccgccagctgaacccggagaacggtcaccgcttcctgccttacatcgtcatcatcattgatgagttcggcgacctgattatgacagccggcaaggaggtagaactgcctatctgccgtatcgcccagctggcccgtgcggtgggtatccatgccatcatcgctacccagcgtccgaccacgaacatcattacgggtaccatcaaggccaacttcccggcgcgtgtggctttccgtgtggcttccatgatggactcacgtaccattttggaccgtccgggtgcacagcagctcatcggtaagggtgacatgctgtacctgcaaggaaacgaccccgtgcgcgtgcagtgtgcgtttgtcgatacgccggaagtggaacgcatcgcagaattcatcggcaagcaacagggctatcctacagccttcatgctgccggaatacgtggatgagaatgcagaacccagcagtgcagccgacgtggacatgaaccgtctggacccgctctttgaagaagcggcccgtctggtcatctaccatcagcagggttccacttcgctgattcagcgtaaattctccatcggctacaaccgtgcgggacgcatcatggaccagctggaaaaggcgggcatcgtaggtccggccaacggtagcaaggcgcgcgacgtgctttgtctggatgaaaacgatttacaaatgagaatgagcagcctgaaggattaaacggactgccctctaacccataaaaacgattgtgacaggtatgaaaaagatttttcttctcgtcctgctgatgggagtcgccttgtgtcaggctgtggcccaacaggacgcaaaagctgaaagcatattaagcaagatggcggacagctaccggaaagccggcggcatcagtctgacttttggaggtacacaacaaggaaagctgttgctgaaaggcaacaagttctgcctggagagcggaggcatcaagacctggttcgacggaaagacgcagtggagttacgtggagcaaaatgaagaggtgaacgtgtcatcccccaccccggaggagatacagagcgttaacccgtatgcgttgctgacatcttacaagaagggcttcaactaccgttacgtgggcgaaaagacccgtcaggggaagcggggacatgaaatcattctgaccccgaagacctcgcaggacattaaaagcatcacactgaacgtaaaggaaaacagctcacccgtgtacattgccatccagctgcagaacggagagaaacaagagtttcagatttcgtcgtaccgcacgggagtgaacctgcccgacgcggtgttccgtttcgacaaaagcaagtatccgggagcggaaatcattgatttaagatgacatcatccgatgtatcgagaatagaactttgagccaagtaagagggggtttcggcatagatatacatgacgctgcccccttttattgcatctataatggggcgcgacacggaagtgggcaatgccggacatccgaagctccgtcccaaccgtccgccacgactggccacggaggggtctgcgtatgtggccccgtgcaccacaatggcacgttcgcgggcccggtcgttaatccctttctccagtccgtcaagaatgagcgaatagccgtttcgtccctgataggtggaagccgtcaggtaaaagcccagtgagcttttgtaggagccgtattcgttggaaaaagaagtggcatagtttccaccgctgttctttccgtgtgacactaccgaggaatacagcatccgacggtgcttcatgtcgaacacgtacagacgcttttccgtggaaggcttggaaaagtcaatcagggtcagcacatcgcgcttgcggttcttgatgcggttatatcccgtcaccgcctgcttgaaggcccgccagttgaccaccccttccagctgcatggaatggtagagcgacacgacctcatcggccgccttgaccgctgctgcaggggattcagtaggaacagactctccttccgccgtgaaatacgcacaggggaaagacaggaacatggcagaaagaaaaaatttgatgatatgattttgcatgactttttacgacctgaaaaatattcggccgcaaagttacggattttctgcccttcttcttccgtaaagagagttaattttatagaaatcactcgattacaatcaccagtgaccgttccgtcggtgcccagtcgtacacaaacttggcatgcgaggtggcattgcgcacacacatgtgcgaacggggcgtggtgcccaacgaccagctgtattcaatcatcgccgtgcgaggcacgttgaccggcaccccgtgaatgtaggctccgttggtgaagcggctggcatacggtgcatagcctccggtggccgcagaaccgtctttcaggaacaccatacgcgactttttctgctgcaccacaaacatgccgagcggcgtttcctgcgcatacggcggacggtgcatgcccgtagtggccggattcatgctgcggatggcccaggtaccttcttccagacgttccagggtggcaatgttctggtcgccccggtccaccacgaccacatggttaaactgcgtgctgtcggacaacagcttgacgtagcggcgcggcacccaccattctccctcgatggagaccggtgacacgcgatagaaactgcccgtctcgcccaggaaagacaccagcgccccgtcgcgtccgtagcgttcgggcaccagcgtatccgaaggaagatacagcggcaccgactgataacgttccactcccagcgtatcggcaatgcgccggtacacattctgcgtgtatttccgcaccagcggagcttcacggttcacattcttgtaattctggaatatcgcccagcggttggcatcgtactgaagattctcgataaaagccaggcatttgcgtatggcatcccatttgaatgaacggacggtgtcctgatacggatactcatccttcaaggtgtatttgtcaaaaagaagttccttcgccaagatgatgtcggcagcggtcagcggtttacgctcaaacggcagaatctcttccacctccatgctgtcgggagatgccgtctccgacacgatgggttgcgacatcggttgttccaccccacggcctgcttcctcccggcaaccgcaaaggagacacaagaagcatattaagcctgtcagtcgtttcataatgaagggttataaggttggaacaaagataataatttttactaaaaaaccgcaggaaaatgcaaaaaatcagcgactttctgtaaagaaagcacgacttccggcactttctccaattactcgtccaggatacgggccgtctccactttttccagtcgcgcacgcagctttcccatcatcgacttgcggatgcgcagacgcatcaagcagtccatgtcgtacgactgttccagtatctcgggcgactcttccttgacgatgcgcatgatgtcgttcatgaaaggatattcgaacgccacggccacgtcttcgtccaccgtcttctcgatgaccggagcttcatccagtgccagcgaagccgccatgcggtaggccacaatcagaccgctcgtccccagcttgataccgccgaaataacgcaccacgatgaccagcacatcggtcagctcgcgcgagttaatctgtccgaggatgggctttccggccgtgcccgaaggctctccgttgtcgttggcccggaaatccttccgttccgcgcccagcatataggcataacacacgtggcgggcatcgtaatatttcttctggtactcttccagaagggacttcacttcggagagcgtacgcaccggcagcgcaatggcaatgaacttgctgcgcttctcggtatagatggcttccgcgctttcctgaatggtcttataggtatcttcttgcatcgtttttcttctttcaggtggcaaatttaatgatttttctcgcatttttaaaaccggaaagcgtatctttgctcctgcattaatcccttaagaaactaatggcatgaaaaaattacaaaaactaacctactgtatgggactggttgccgtggctgcacctcatgcacaagctgcaacgcccgattctgaaaaacccaacatcttgttcattctctgcgacgacatgggatacggcgacctgggatgctacggtcagcctttcatccagacaccctgcatcgaccagatggcacaggagggcatgcgatttacgcaggcatacgccggaagccccgtcagtgccccgtcgcgcgccaccatcatgaccggacagcacagcggacacggacacgtgagaggcaacaaggaatactggctgggcgaggtgtggtacggacagaacaaggaatatgccgtcacgggacaggagccgtatgacccgcagcacatcatcctgccggaaatcatgaagaagaacggctataccaccggcatgttcggtaaatgggccggcggctacgagggttcgacctctactcccgacaagcggggcgtagacgaatacttcggctacatgtgccagtttcaggcgcacctctactacccgaacttcctgaactcctacagtcgtgccgcaggcgatacggccgtcagccgtgtggttctggaagacaacatccgctactcgatgagcggcgacgactatttcaagcgtacgcagtattcggccgacctgattcaccagaaggcactggaatggctcgacaagcaggacggcaaacagcctttctacggtttcctgacgtacaccctgccgcatgccgaactggtacagcccaacgactctatcctgaagaaatacaagaaacagttctttcatgacaagacctggggcggagatgcaggttcccgctacaacgagagcgtgcacacacatgcccagtttgccggcatgatcagccgactggatgcctacgtgggcgaaatcctggccaagctgaaagaaaaaggactcgacgagaataccatcgtcatcttcagcagtgacaacggtcctcacgaagaaggcggtgccgacccgactttcttcggacgcgacggtaagttgcgcggcctgaagcgccagtgctacgaaggaggtatccgcatcccgttcatcgtgcgctggccgggaaaggtgaaagccggtgaggtgaacgaccatcagctggctttctacgatatcatgcctaccttctgcgaactggtgggcgacaagcgcttccccaagaagtacctgaataagaaactggaaggtgactgtttcgacggtatctctttcgctcctaccctgttaggcaacgacgaggcacagaaggcacacgacttcctctactgggagttccacgaaaccgaccagattggtctccgcatgggcgactggaagatggtggtaaagaagggggttcctcacctctacaatctggcagaagacatccacgaagaccacgacgtggctgcccagcatccggacctcgtgaaccagatgaagcaggtaattctgcgcgaacaccgcccgaatgacctcttccccgtgaccttgccgaaataagatatttcactggaaaaacgcacttacgtttcaaaccaaacgccaaagagttttaaagaaaacgcacttacgttttacattaaacgcaagtgcgttttcttttcagatagttttccccatatccgttccgcaagtatatccacacaaaaaaggccctcccaaatgtaactttgagaaggccctgtatcgctcagaaaaaaatcttattccaatttgtgaatcaccagtcccgaacgcagtttcggttcaaaccacgtggttttcggcggcatgatgttgcccgtatcggcaatgtccatcagctgcttcatggaaaccggatagagtgccagcgccatcttcatttcgccgctgtccacacgtttcttcagttcacccagtccgcggataccgcccacaaagtcgatacgcttgtccgagcgcaagtccttgatgccgagaatctcgtccagaatcaggttggaagaaatcgtgacatccagcaccccaatcgggtcgttatcgtcgtaagtgcccggtttagccgtcagactgtaccatttgccctccaggtaaagcgagaagttgtgcaaggctgccggcttgtagatgtccgcacccttttcttccactacgaagttcttcttcagcgcttccaggaacgcctgtggagtcagtccgttcaaatccttcaccacccggttgtagtcgatgatagtaagctgctcggccgggaaacataccgccatgaagtagttgtattcctcgtcgccccgatggttcggattctgagccgccttttcagcacccaccagtgccgctgccgcactacggtgatgaccgtcggcaatgtaaagcgaaggcatttccttgaacgcctctgtcactgcctcaatgtccttgtcgtcgtcaatcacccagaactgatggccgaagccgtcatccggtgccacaaagtcgtacaccggcttctgagccgtatatttcgccactacggcatccagcgtcttgttttccggataagcaaagaacaccggttcgatgttcgcattgttcacccgtacatgcttcatgcggtcctcctccttgtcacggcgcgtaagctcatgcttcttgatcaccccgttcatgtagtcgggcacgtaagctcctaccaccagtccatactgcgtcttaccgttcatggtctgggcataaatatagtaacacggtttgtcgtcctgcaccagccagcccttttcctggaacatccggaaattcgctaccgccttgtcgtacacacgcgggtcgtgctcatccgtaccctccggaaagtcaatctccggcttgatgatgtgatacaaagatttctcgttgcctttcgcctcttcgcgggcctcagccgagtttaacacgtcgtaagggcgggaagctacctgctccaccaagtcctgcggcggacgaacacccttgaaaggtttaactattgccataatgcttgggggaatcagaagttatttcttgtttacacggaatttctcacaaccatctttcaggaagcccacaatctgacgggccgctgcgatgccggcattgatatttgcctcagccgtctgtgcacccatcttcttcggagtagagaaataacgtcccgggaaatgatcggcaaactcatcgtgatgagccggcatgatgtcggtcacatacttcaagtccggacggtcattcatcaggcgaagcaaatctgcttcgttaatcacctccttacgggcagtattcaccagcaaaccgtttttcggcatacggttcaccagatcataatcaatggagtttttggtttcggcagtagccggaatgtgcaatgacaccacgttgcaggtagcatacagttcttctgcagaatccaccggtttcacgccgtcggccaccatggcttccttcgggcaatacgcatcgtaggcataaacgtccataccgatgccctttgcgatacgagccacattgcgccctacgttaccgtatgcatggatacccagcttcttgcccatcagttccgtacccgatttgccgtcgtagaaattacgaaccgccatgatcatcataccgaaagccagttcggccaccgcattcgagttctgtcccggcgtattcatcacgcaaactccgtgagccgtagctgcctccaggtccacattgtcatatcccgcaccggcacgtaccacgattttcagttcctttgccgcatccagcacttccttgtcaatgatgtcacttcggataatcactgcattcgcatccttcactgcatcgagcaactgctgtttttctgtatatttctccagcaaagccagttcatagcccgcagcttctatttctttccgaataccgtcgatagctactttagcaaacggtttctctgtcgcaaccaatactttcataatacttgattttaaaaagaaaacaaggacgtgttatcgaaattccacgcccttatcttcgggtataacaacaattaatgcattttctcaaattcctgcatgcagtcaatcagtgcctgcacactttctaccggcatggcattgtagcaagaagcacggaaaccacccacagaacggtgacccttgatgcccaccatacctttttcggtagcgaacttcaggaagtcggcttccaggtccttgtattcatcggccatgacgaagcagatgttcatgtacgaacggtcttccttggccgttacggtgccacggaacagcttgttgcggtcaatttcggcatacagcatgtcggcacgctgtttggcacggcgctgcatttcttccacgccaccctgtgccttaatccagcgcaaagtctggagagccgcataaataggtactaccggcggagtattgaacatagaacccttgtccacgtgtgtctgataattcagcatggtcgggatgtgacgggaaaccttacccagcgcatcgttcttcacgataacgaaagtcacgcccgcaggagccaggttcttctgtgcacctccgtaaatacagatatatttggaaacgtctaccggacgagagaaaatgtccgaagacatatcggccaccatcggcacattgacatccaggtcggcatgcaattccgtaccgtagatggtattgttggtcgtaatatggaaataatccacgtcggccggcacttcataatctttcgggatataagtgtagccttctttttcagaagaagccacctctactgtttcgccgaatgccttcgcttctttcagcgctttcttggcccaagtacctgtattcaggtaagccgccttcttttccaggaaattatagggaaccatacagaactccatgcttgcacctccacccaggaacaataccgagtatccttccggaatgttcagcaattccttgaacaaggctactgcttcatctaccaccggctggaagtctttagcgcggtgactgatttccatcaacgaaagtcctgaaccattataatcaagaatagcctgagctgtcttttctatcacttcgcgaggcaaaatagacggtcccgcattaaaattatgtttcttcattggaagtttgttttggttaaacaatcattttagctaacacttgcgaatttagtgattatttttagacttccaaaagttttcgtgataattttacagccttattgaattttatctttcaaattacatacacaaacgccattttagtgacatattgacacgagaatagttagctatggcatggggatgctcacgagtcatagcaaaatgcgagacagccttcaccgccggaaggctgtcatgacacaaagttattattttgccatttctatcaaagtttttaccccctttatcttttcattttgtatgagttttaacgtttgttttgcctttttccgagaaattgccgcaaacgcatagtggtctttcacgtccacacgtcccacatcgtcccggcccagtccgcctttcttcgacaaaaaacccacgatgtcaatcttgttgatcttgtctttcttgcccttccctatatataaggtaacaaactccggcaaggcaggctgcggcgtcggctccggcagttcaaactcttccagcggacggggcacatagtcggggatacgttcctcgtcgtgcagaatcagaaacgcattaccctcggcctcccagcgcgccgtacgtccgttgcggtgaatgaacccgtcctcggccaccggcaagtgataatgcaccacgtggcggatgtccggaatatccagtccgcgggctgccagttcggtcgagataaagatgtggcagcttccgttacggaacttatacagcgcccgttcacggtcatcctgctccattccgccgtggaacgtctcgcaatacaccttcatggagtgcaggtacttccctacccggtccacactctcgcgatggttgcagaacaccagcgtcgactcattacctagcgtacacagcagcttgtagagcgtttccaacttgtccttcaccggcgaagtgacccgatataccgacaagcgctgtgacaccgtttcttccggattcaggaaatccagtttcagcgtgcggttcatgcccgtaaagcgcggaatctcctccgcatcggtagccgacaacaggaagcggcgacgcaatgccggcaatttcccgatgacctcggccatctcatcctgaaagccgaactccagacacttgtcgaactcatcgatgaccagcgtacgcacggtgcccgcctcaaaattctgcttgttcaggtggtcgttcatacgtcccggcgtaccgataatcaccgccggtgaaatgcccctcatagtgcggtgttcctccatggccggacgtccaccgtaacagctcatcaccggaaagccggtcgccatggccttgaacacctgctcaatctgcaaagccagctcgcgcgaaggtaccagtaccacagcctgcacgccttccactccctttttcagtgagctcaccagcggcagcaggtaggccagcgtctttccggaacccgtgggcgaaagcagtatcaaatcgctgccctccttccacgcatcgatggaagcctcctgcatggcgttcaactggtcaatcttcaggtttaatagtatcgtttgtatgtccataattcttggttttttgtgggttagttagcaaaggtaacgaaaataaatcacaagcacaacaccagatcgggcagcaacaccgccgtttccgcttcctctttcggcgcatccttcggtttccacgccaccacgaagcgcacggaagccgacttcacctcatagccacgctccctccactcggccaacttcttctgcatattctgcgacaagcgggccaccggcttttgcgcctgattatacaatgtgtagtctttatagaacaacgtatcaccccctttcaacgatagcacctcccgtttgagttccttgaagaatcccaagaacacatccttgtgcgaaagctgcaacacaatctcaccgggcattgcatactcccgcgaatctaccagatactggtctgctttcagattcgcaaagcaatctccgtttgtatgcacaaacaaccgtttcttagcacgggtaatgcccacataatatcggcgcatctgatgcacatcttttgggaacccgtccgaaacaagcatatacacgtcgtcaaactcacggccctttgccttgtgaatggtcgacaccaccacatcagcccccgacacgtcacaaaaatcttccatcgaagactcaaacacaaactccttgaaatccgtgaaatacttcatccggttgatttcctcaaacaactccacgcaacgcctcacgtaaggcaagcccaaactcccttcataagccgcaaacgtagcacccttcgccttctcccagagttcatccggaatcaaaggcgtactcacctgcttgcctatatacttcaggaaatacctcatctcggccatattccagaacagcaagccctccatcgactgaatcagcttgctgcgcacaccacgcttccgcaacagcgccaccagaatgaccgcctcttcattggtctgggtaagcacacatgcggtaccctctcctctattccgtagcagttcctccaccagcggctgatacatgcaggcagactgatggcgagtcacccctacccatccgtcttccttgcgcatcgatacaatcggcatgcttttcagccttccgccaatacctttcacaaaatcattggccgctgccaccacatgacgtgcactccggtaattctccgtcatctccacaaagcggcttccagcctcctgtgtcagttgccacatgtaaccggaatccgagccacggaactcataaatattctggtcatcgtcgcccacagctatcacccgcatctcctcattgtggtgcatcaacgcccttaccagcgcatgctcttccacgcccatgtcctgcgcctcatcaatcaccagcaccgtcttgccaatccggttgggctccacttccccctgttcaatcatctccgcagccttccccaccacgttctttacttcctccaggttaccaatcaagcccaacaagtcaaaacaataggcatgaaaagtcttgatttccacgtagtgcgccgcattgccaatcagttccatcagccgctgcttgaattccgtggcagccgcccgggagaaagtcagcatcagcaactgctcgtgcttcacatcctccagcaacagcagtgaggccagcttgtgtaccagcacacgggtttttccgctgcccggaccagccgccaccacaatgcagcgcgactccttgtccgaaataatctccatctgccgatgagacaactgcccgaacaactgcttgtacttttccggcgtgaggttacgctgaatctcgttcacccgctcacccttgaagtatttggcaataaatttcctgtaatccatctggaaataatcctgcacatactgcaaagcctcctgataatccttcaccatcaggttggcatattctcccacgatgtgcacctgctgaatcttctgcttgtagaactcgttcagcatccggtaatcctcctgtttgtagcgcgacttattatcctttatccgcttgatgtccatcgcattgtaaagcaccaggaaaccaccttccagcttgagagccccaatcttcgacagatacagaagtgcttcttccacatcttccagctgcaaatcttccattctgccaaaaagagactgaggactcgctttcaactgattcaagagttccaccaccgagaactgcacggccgccttttccgttgcggtttccttaccctctcgctcctccaccagcttatacagccactccacggcaaaacgactgatctccagccgtttctcaaaccgtttgatagtagtctccaggtctgcccggcgagtaagctccatgttacgtgcagcgtcctccttcttgtgcgtatacccttttatggtaagaaaatacaacaacgtgcggatgtccttttccttcgacgtgacaactccgtcgtgcaccgcattgtcgttcagctgcttgcatgaaatccgcagcgactcatccgggatatggttgagaatatactgttccagtttcgcaaaacgctccagcagcatccgcgacttccgttccgagtcgcccgcatcctgcaaataggccgaaatatccctgctgtcggccaatataccctcctgccgcatccgctctaccaccgacaccacttccttcttggtcagtcccagaatatcggccaggtaatcaatccgcgattctgcccccgagtcctgtgccttggcaatgtacttctgcgaaatcaaggacgtaatgattctcaccgccttctctatctcgtcaataccaaacaacaccgatgccgtgatacgcttccgtgcctcgtccatgttctttaccgtgataccggtggcatacacatgcggcacattgtttcctcgctccagataaccgctctgctccaatgccgccagagccgtccgcacacgtgtctcaatatccgccaccgagtcatcccatcccgcattccgggcaatctccagtgccgaacagcacaccctcatgcgtttcctcgtcatatccttcaccgccttccacacctgctggatttcactgatactcaacttcgtctgattcaacagaataaaatgcttatccaggtcattgtcactgtaaagcacgtaacagcgtgcgttaagatgcgggtcacgcccggccctgccggcttcctgcacatagttctccagcgaatcggaaatatcgtaatgcaccaccagtcccacatccttcttgtccactcccattccgaaagccgacgtcgccacgatgatgcgcacctggtcgctcatgaacgcatcctggttggcaatcttctcgtcggcatccatctttccgttgaaaggcaacgccttatagccgtcgcgcgtcaattttgcagccagttccttggtacgccgtgtacgcgacacgtacacaatggtcggacagctggactctgccaccagctccctcaacttggtatacttatcctcgtccgtctcggcatgcaccaccgaatagtgcagattcgttcgcgaagccgtagaggcaaacaactccaaatccaggttcaacgtccgcttgaaataatcacaaatatcctgtaccaccttctgtttggccgtcgccgtgaaacaggataccggtatcgagttacggcatcccttcttctgctggtactcctgaataaacttgccgatatacagataatccacccggaagtcctgcccccaggaagacaaacaatgcgcctcatcgataacgaatcgcaccacgtggcgcaccatcagaatccgctcgatggttttcgagcgcaacatctccggggcgatatacaacagggaagcatctccctcctgcaccctctgaatggaaagcgccctcgtaataggatccagcagtccgttgatggtcacggcatccgtaattcccttgtcagccagattgtccacctggtctttcatgagtgactgcaacggcgaaataaccaccgtaagtccatgcaccgcccgtgcctccataagtgccggaagctggaaagtcagcgactttcctcctcctgtaggaaagatagccagcaaagactttccctctaccgccgcccgggctgcccgttcctgaagcggttcacccccgtaggtacggaactggtcatagccaaagaaagctttcaggttacgcaatacatccagctggctattgcaataggcacagccttccgcgcaacgtgtacgccgcaacagtttcatcacatattccacttcaggataattgcgaagcacccatccgggcgtcacggaacgatggtcagtcgtatcaaccaatgccagcgcataagccagctcacacggataacgctcaatcagcatctccacatcggcatgagcacatatctttccctcataaaaccggcgtatcagaccgggtaatccccagctcacccgttcggctttcaccaggctgagaaacccgtcgaactcttccttccccttcagcaacgaagcaaacacctttcgttgctcatcgggcaatgaattccaccgggtaatctcatccagcaacaaatcgcgcgccttctcacaatcgttcaccggattgttcatctggtctgcagccagtttgtcgtctttcaccagtcggtgataaggacgttccggaaacagcaacggtgatacgtacagcgtatccaccagcgtccagcgacaatccttgtcagggaacaggtatttcgcatcgtggtgaatgatattatgtccgcaaaggtaatccgtatcgtgcaggaattcgaacagctcttccttcgatgccttatgaaaggtggcaccgtcctgccgaaaagcccctatatcatgaattttatggtccttcaagcctacctctacgtctacaatggcataacgcgaggttttatttcttgtgaatatatcccagattgccatagattgtgtttctcaaaataatcacaaaaataatgaaatccggcaagaatgggaggaaatggagaagaatattcaggggatggctggaaatctataaaaagaacagtgaaaagaaaaactaaaatcttatccatcttctccagcggaagattctaaagaagcgaggaaaccagcttatcaccggtcgagggcaatcccagttccggctttgtacgtctgccacatagctcgccacaacaatggccggattctccccattacgcacagcttcacgaagtacacgggccacctcctttttatcagtatattccgcctcaccgaatcctttgatagttttcaatacccgcatgatattgttggcatagcccacaaacgtaccaaactgccagccgctatagtcctttacttctatcacccccagtccctgcagagtagcccccacaaggtctatttgagagtagcttccgcagttgtagcaggcaagattaaaaaaatcttagtcttatattctattttgttgtccagataagctgttattcgtatttttgtaaaatattacgggagacaaattttgccgtaatattttgaagcatatgaaaaaattatatacatatccggcaaaaccatttgttaagtgggttggaggtaaaacacaactccttgacgatataaaaaagtttttacctagtgatttatcacaaaggaatgatgtgacttatattgaaccatttgtaggtggaggagctgttttattctggattctgcaagaatatcctaacataacgaaagctataatcaatgacataaacgaagagctaatttgtacatatcgtgtaataaaatcagatgttgaaaatttaattcttgaattaacacgaattcagacagagtatcttgcacttgataatgtggaaagaaagaattattttttatttcaacgtaatcgttttaatgagaaaaacaattcggatgttaaaacagccgcattattgattttcctcaatcgtacttgttttaatggactatatcgtgtaaattctaaaggaaagtttaatgttccatacgggaaatacacaaatcctaaaatttgtgatgaagaaacattaagagcggattcagctattttacaacgagttgaagttctttgtggtgattttgcacaaacaggcaaatatgcaggcgataatgttttgtattattttgatcctccatatcgtcctttaacagagacttccgcatttacctcgtatgcaaaaaacggttttgatgatgctgaacagatgcgattgtgcaatttttgtgaacagatagctaaacataaatccttgtttgtggcaagtaattcagatccacaaaatgtagataatgaagattatttctttgatcatctttacaagaggttttcaattaaacgggtctctgctgcgagaatgataaattcaaagggtagtggtagaggtactatttccgagataatgatttcaaatgttgccaatgtttactagtatgagagatttcgacagttggcttgctagttttagaccttcaatagccgattacaaatattatactgatttcaataaggtatttaataatgtagatgccatcaaaattccgctcaatattctaaactctcttattggttcgaagaatattgaagaagattttaaaaagattttgacacaatacccagaaacattaaattgcattcctattcttttggccaagcgcgaatttgatattatggcaatggatgaagaaggtcagattgattttcattttgataagcctaattgtacaaacgaggaatatgtcaaatttatgcgtaaaacaggtctttttgatttaatggaaaatcatatagtcaacaatcttgttgattatgtaacaggcatcgaaacaggtctggattccaatggtcgtaagaatcgaggaggtcatttgatggaaaatcttgtagaaggttttctttgcaaagcagggcttgcgaaaggtaaatcgtattttaaggagatgtatatccatgaaatagaaagcaaatggaatatagatttatcttctatctcaaataatggtgggtccgaaaagagatttgattttgttgtaaaaggtaaagacatagtttatggaatagaaacaaacttttataccagcagtggttccaagctaaacgaaacggcccgtagttataaaacgattacgctagaaacaaaagatttagactattttaaatttgtttggttcacagatgggtgtggctggcgcagtgcaaaaaataatctgaaagaaacatttgatgttttggagcatttatacaacattgcagatcttgaaagtggaataatatcaaaagtacttatttaaatgcctgttgcttattataagtctgaaaatagagattttactcttcttaagggagattgtattgagcttctgaattcgtttgatttcaagttcgatatgatttttgcagatccaccatatcatttgtcaaatggaggaataagtgttcaaaatgggaaaatggtatctgtcaacaaaggagattgggataagtccaacggatatgaagaagattatctatttgataagtcttggatagcaacttgtcggaataagctgaaaagcaatggaacaatctggataagtggtacatatcataatattttttccgtggcacgatgcttgactgaattgggattcaaaatattaaactgcattacttgggagaaaacaaatccaccgccaaatctgtcttgcaaatatttcacttatgctgccgaatatattctttgggctcgtaaagagcccaaagtaccccactattttaactatgagctcatgaaaaaaatcaatgggggtactcagatgcgtgatgtttggcgattaccggcaattgcacgatgggaaaaatcttgcggtaaacatcctactcaaaaaccgttgtgcgttctgtcacgaattattcaggcctcaacccttcctggcgcatggattttagatccattcacaggcagtagtacaaccggtattgccgcaaatctattgggacgccgattccttggaatagatcaaaacgaagaatttctggaactaagtaaagctcgtcgtaacgaactgaatagcattaacaggaggaatgaaattctgataaaactggaaaaacaggccaatctattccgtaataaagatgccaatgttttttgtgaacctgaagaatattatggtctggatcttccgttctaatactcacgatgacggattactatattcaagaggttccttagatcccttgttccttcaatgcattcctttgtccataaaagcgtaaggcaaaattgatgagcatcggggttttgtttttcacacaagcagaacaattctagtatcaaagcaattcccccgatggacatcgttccatctaccttcacattgctgtatagttcttcaatgtgccttatagtggtaggtgcatatgcagctctctcttcaactgaattaaagggatgacaattctcataaaaatggagataaaaattaagaagacctataatttctcctttatagtgttgagccttgattagtaaatccacaacccattcatcatgcggaagtaaatatggcactgattcaggatttggcaatagtatttttactttaaaatccaaatcagggcgaacacctcttgaaccctgaaacatgccaatggcagtcccatcggccgtaaagaatgtatgtattgccggcccttttggaccgcgatactgccacatttggccattaacgatatatttaggattatacataagctgtattaaacattttttattccattgtatagcatatttcgaccactccaattccagtaggttatatcttgttctataaagagccatttgatacatttacaaatcatgtcaaccggataaccgctccggaaagaaaacttacaatatatctgagggtcaatctcgacacagttaaaaatagcatctatcacagtaagtagcaatgtaaactgagacgagtcttccgcttttttctcagctaaatcatcaatgatgttatcgtgagaaggtctattactatatgagatacgtccatttttatttatatgcttaaatctcatatttgaaacacgtacttcaaagtcaaaccctttgttaaggtttgtaggccttttcaaataaattatattaccagcattgtccgtctccacattgtattcatacttagtggggatacctgccgcaccaggtgcttcgcttaaaaacaactctgtcaaagtgcgacgatagtctgcacgagttttctcaataattgtaacagtatgaatagtaatcatattaaaacaaatctttaatttcaacgttaagtgctttagcaatcttttcaatgttacagagtgtgatgttcttttcagcacgctcaaccattcctatataagtgcgatgtacaccagctagttccgcaagtctttcttgagatagccctaattcttttcgatatttttgtacattatgtccaaataaaagtagaataggctctttattcattactccttcgtttttaatttatgtcctatttattgtttacaaatgtacagatgctaattaaagttatcaacatactataattagcattgctttgtgtaaaataattatacttcctaatcttagagtttaaaatagggctgttttacagacctatgcccaaatggatttatactcaaccaattctaccaaaatgtcactctccccacttcctctccccaacctctttcttttctcgctccgtagcccatccgtccaaaatctgcaagcagaagcacttatccaaattccaaaagcaattcaaattccctttacaaactcaaaaagaaagcaaacaaaacaatccaccatcagcacacccgcaaaacgcacaaaagcaaaaccaaaaagacaccacaatacatttcatccaacctccacaactagaaaaactcacctcctccacgcctcccaactctccccaaaccaccgtcaaaatccctgagaccgccaaacgcaagtacgtttcctctcaaactgtagtgtactaaataagttgacacaatttatttagtaacatgcgtaaaaatcgaaagtattcaaaggcagaatgtct

SEQ ID NO: 3805 - DNA, 56112 bp, Unknown
  gut microbiota DNA sequence
gttaaagacaaggcattctttttgtacagactgactaaaatttatgcctaaacaataaatccctcaggtttttacgttgacccgtttttacgttgacccccaagaaattttgcattgagccagattatctccgaacccaacacaaaaaaagacatctaagatgttactcttaaatgtcttctttgtagcgggacccgggattgaaccggggacctcatgattatgaatcatgcgctctaaccagctgagctatcccgccattttcattaaaaaaaccgccaggcgtggaagccacccaacggctaaatcattctttgtagcgggacccgggattgaaccggggacctcatgattatgaatcatgcgctctaaccagctgagctatcccgccatcatttcgtgattgcgggtgcaaagatagagcaagtttttgaattacgcaaatttatcctctcttttttactcttttttctaagaaattcccgacaattccttctccagcataacaataactacctgaaatacaagcatattatttatttgaaaaaataatatcaaatagtttttgccaacagtctttccgcctcacaagttcttaaaagcgaagaaaaaagctgaaaaaaaactcttcaatcattatggagtaaacaaaaaaatactttaatttgccgccgttgctaaaaaatacaaataaaaacacaagaaacatcatgaaaagaaaaacacaaatcgaatatccgctcaatccgtcttcaagcgtcattatatggaatgccatcagcagtacggctggtttggagcgctggtttgccgaccgcgtaaccaaagaaggaaaaacctacacttttcgctggggaaaaacagaaacacgtcaagctattgtggtaaacagccgacctgaattttttatccgcttccactggctggacgatgaagaagccaaaagctattttgaactgaaaatccattacaatgaattgacaactgaccacacactggaagttacagattttgcagaaccgggagaagaagaggatgtacgcaacctttgggattcacaaatcgaaaccttaaagagagttttcggagtataaatctataaaatatacaaaactttattttgctgtccgttttttgtgctacttttgcatactgataatataagacaggaatgctacgcataaaaaaacttgatatattcgttttaaagagttttctgctgctcttttccgggacattctttatctgccttttcattttcatgatgcagtttctatggagatatgtcgatgaattggtcggaaaaggtttggaaatcaatgttcttgcccagtttttctttttatcggcactgacattgattccgttgtctcttccgctggccattctgctggccgctctgatgactttcggtaactttggagaacgctacgaacttctgtccatgaaggcagcaggaattcctttgtttcgcattattcgtccggttgtattgttttgcatgtttttaggtgtcatgtcattcttctttcagaatgtcatcggccccaaggcacagaaagagctttggacactgctggtatccatgaagcaaaaatcgccggaagtggatattccggaaggggtgttttacagtgatattgagggatacaacatctacgtaaagaaaaaagaccgtgatacaggcattctgaaagacattctaatttacaacttctctgacggatttgaaaacgcccatatcatctgggcagaagaaggtaagctggaactgacagcagacaaaaaacatttgtatctgcacttgtacaacggagagcaatttgagaatctgaaatcacagtccgtcatttcccgcaacgttccctaccgccgagaaacgttcaaggaaaagcataccctgattgcttttgatacgaactttgaaatggtggacggtaacttcctgaaccagcgttcggacatcaagaacatgaacgaaatttccctggctatcgactcactcaacatgtatgccgacagtgtgggacgcgccatgtattcggatgccatgaaaacgacttaccggaagcctgttctttccaaaacagactctacaaaaatggagaaagaacatcttgccgttatcaatacagacagtattctgaacggtatgacttctgcccaaaagctgaaaacgctgaatacaacagaaatgcgactttcttcgctcatgtcggactggaacatgaagagttatatgacccgagatgctgacagcaacatccgtcgtcatcagtcggactggcataaaaagataactctttcactggcttgtatcattttcttctttatcggagcccccttgggagccatcatccgtaaaggaggactgggtatgccagtcgtcatttccgtgttgattttcgtgctttactacattatcgactccggagctacgcgtgtggccaaaagtggagagatgaacatcgtgttaggtacatggatgagtaccatcatactggctccgttaggcggtttccttacttacaaatcaaacaaagactctgtggtttttaacatcgacgtgtatgtaaacttcttccgcaagctgttcggaataagagtatcacgccacgttttcaagaaagaagttattatccacacaccagactatactcgcatctgtcaggatttggacaaactttgtctggaatgtgaaacttacggagaaaatcataagttattaggaccaccgaattattatcaggtgtttaccaacaacaagcatgatgatgccatcaaggaaatcagtctgcaaatggaaggactcgtagaagaaatgtccaatacgaaggacggagtattgctgaatttattgaacaattatccgttcttatctgtaaaagctcacaagagcgtatcagacaaccgctggctgaatctactgattggaatcattgttccggccggactgcttatctggctgaacatctggcgctatcgcgtgcgcctggacaaagatttgaaaaccattgtcaagaataaccgcgacatacaagaaagaatcaaaacaacattctaaaactatcaatatcattatggagaaaatcaaactgaatacaattgaagaggcaatcgaagatttccgcaaaggagaattcgtcatcatcgtagacgacgaagaccgcgagaatgaaggcgacctggtagtggctgcaggactgattaccccggaaaaagtaaatttcatgctgaaacatgcaagaggtgtactttgcgcccctatcactatatcacgttgcgaggaactggatttaccacatcaggtatccaacaatacgtctgtattaggaactccgtttaccgttaccatcgataaactggagggatgtactacaggtgtatcggctgccgaccgtgctgctacaatccgtgccttggctgatccgacttccaaaccggaaacattcggtcgcccgggacatgtcaaccccttgtatgcacaagaaaaaggtgtattacgccgcgccggacatacagaagcctgcgtagacatggcacgcctggccggtttatatcctgctgctgccctgatggaggttatgaatgaagacggcaccatggcccgtctgccggaactgaagaagatggccgacgaatacggtttcaaactgatttccattgccgaccttattgcttaccgtctaaaacaggaatcactggtagaaaaaggagtggaagtagacatgcctaccgaacacggtcatttccgtctgattccgttccgtcagaaaagcaacggtctggaacatgtagctttaattaaaggtacattctcggaagacgaaccagtactggtacgtgtacattcttcatgtgctaccggcgacatcttcggctctatgcgctgtgattgcggcgaccagttgcacaaagccatggaacagattgaaaaagaaggaaagggagccattatttacctgaaccaggaaggacgtggcatcggactcatggaaaaaatgaaagcctacaagttgcaggaagaaggaatggatacggtagacgccaacatctgcctgggccatcaggccgacgaacgcgactacggagtaggtgctcagattctgcgtgaaatcggtatccacaaaatgcgcctgttgaccaacaacccagtgaaacgcgtgggactggaagcttacggactggagattgtagaaaacgtacctatcgaagtcactcccaacccatacaacgagcgttacctgcacaccaaaaaagaaagaatgggacataccctacatttcaataaataaataattaagaagaattatggaaacaaataatttagtaaaaagctatgccagcaaggcagcccagactgctttgttccgcagcgtatatctgtggatgacactggcacttgtcatcacgggctttgtagccatgtacatagccaagtcgtacaccctgattgaaaccatcatgcagaactccatcatgttctggggattactgattgctgaagtaggacttgtgatgtatctttctgcccgtatacacaaaatcagtttcaccacggctacccttctgttcatcgcctattcggtattgaacggtgttaccatgtccgtattgttcctgatttatacgttaagttccatcgctaccactttcttcgtgacagccggtacattcggagtaaccgccctctacgggtacatcaccaagaaagaccttacccgtatcggcagtctctgcctgatgggagtcatcggactgattatcgcttcgctggtcaatatgttcctgcacaactcgatgatggacatgattatttcctatatcggcgtactgctctttgtggggctgacggcctacgactcacaaaaaatcaagcaactcctgtcgcacgatgacattgaagtcaacgaaaccacacagaagattgccctgatgggagccttgacactgtatcttgactttatcaacctgttcatttaccttctccggatacttggagacagaaaataaacctttttagaagctaatttcttttatatgtggaagaaattagcttcttttgcaaaaaaattccaattttaataacacaataacatgaaccaactttcagatcgtttgaatagcctgtcgccttcagctacattggctatgtcacagaaaagtagtgaacttaaagctcagggggttgacgtaatcaatctgagcgtgggagaaccggatttcaatacaccggatcacattaaggaagccgctaaaaaagctattgacgaaaactactctcgttattctccagttgccggatacccggctttgcgcaatgccatcgtggcaaaattgaaaaatgaaaacggtctggaatatacagccgctcaaatcagctgtgcaaacggtgccaagcagtctgtctgcaacaccatcatggctttaattaacaaaggtgacgaagtaatcgttccggctccttactgggtgagctatccggaaatggtgaaactggcagaaggtactcctgtcattgtacgtgccggtattgaacaggatttcaagattactcctgctcagctgaaagcagccatcactccgaacactcgtgccctaattctttgctctccgtctaacccgactggttcagtatacaccaaagaagaattacagggactggctgaagtattggctaaacacgaacgcgtaatcgttatcgctgatgaaatttacgaacacatcaactacattggcaagcaccagagcattgctcagtttgcagaaatcaaagaccgcgtagtgattgtaaacggtgtgtctaaagcatacgccatgaccggatggagaatcggtttcatagccggaccggaatggattgtaaaaggtgtaaacaaactgcagggacaatatacttcaggtccatgctctgtatcacagaaagctgctgaagcagcttacactggtactcaagctccggtagaagaaatgcgtaaggcattcgaacgccgccgcgacctgattgtgaaactggcaaaagaaattccgggattcgaagtaaacttcccgcagggagctttctacctcttcccgaaatgtgattctttcttcggcaagaaagacggcgaccgcataatcaataatgcagacgatctggctatgtacttgttggaagtaggtcacgtggcttgcgtaggcggaacttctttcggtgcgcctgaatgcatccgtatgagctatgctacttctgacgaaaacatcgtagaagctatgcgtcgtatcaaggaaacattggctcgcttgaaataataagctacaaattacatacagacaaagcagtctcggataactctgaggctgctttttttatgtccttccaatcactttagcattttccacaaaacgcaaggacgttttcaattaaacgcaagtacatttcatgtcaaacgcctttgcgttttaatcaaaacgtacttgcatttcagttcaaacacaagtgtgtttttccaagcctcctcaagaacaaaaaaataagggaattctccaaaaagaattcccttattgtgtgtcatacagacgattcgattatcccaagtgaattgcttcagaaggacaaacgtcagcacaagttccacattctgtgcaagcgtccggattgattgaatatttatcaccttctgagattgctccaaccgggcattcatcgatacaagtaccgcaagcgatacaatcgtcactaattacgtaagccattgtagtaaaaaagttaagttattattagtcctaaattgatagtgcaaagttaatctttttccaatcagttgtcacatccactttgcattttctacccaatttatatcatgtctaaatagtatcaatgcaaaatggactgatacatcacctgctgcattcgcgtacgtatgttataacgaaccaggttattctgttcatagacagaaggataggttcggttgctcaaaaacacaaaaatcaactcgttatccgggtctatccacacgcaagttcccgtgaaacctgtatgtccaaacaccgaagctggcgcttctggactacaaggactgttgtccgtatgttccgtatcgggtttatcaaaacctaagccccgccgactgtcacgcgacttcaatgtagtgaaaagctcacaagttgcccggctaaggtatctccggtcaccgcagattcctttgtccagccacatctgtgctattcttgccacatcctgcgtagtagaaaacaaaccggcatttccggatacgccacccatgaaagcggccgcctcatcctgcacaaatccctgcaatttgcccccacggaggaaatcagtctctacagaaggtacaatctgctccttcgggaatttacgtaagggcaaaaaggctgtatgacgcagtcccatcggggcatagaatacgctatccaaatacatatccattggcatacccgctatcttttccaccatttctttcagcagcataaagttcaggcaactgtaacgataggacttccccttcaaaggaagttttacaatctgctccactatattcttactgaaatcacttctcaagaacaaactgtctgctacctgaagcggatattcagcagaaggaacatgcgatacccactccggattataacggaaatcattgcaggcatacacattctcggccagtttcaacgtgtgatttttatcgggcttcttacggaacagccctcctttgcaggacttcatatccacagcttcctcatagaaaggccagtaggcaggtaacccggattcatggaaaagtaaatcctggaccgtaatacgcgccttatccgtttttttcagtataggcacataatctgctacccagtcggtcagtccgaattttccctcatcataaagcttcatcactgccagcagcgtagccgtgactttcgtcaaagaggccaggtcatacaagctattttccttgacctgttccttaccctcataggtataactaccgaaacacttgttgtagaccggaagaccttcccgcaagatcattacatgacatcctggataagccttcagccggataccttcttctgcaatactgtctatctgcgacaatatcgaagcgttcatccccacatcctccggactatattgacgaggagtttcggggtcgacagtcagtccatccccagccttaaacagtcccgacaacggaatagacaaacgtccgtcagcatacgcattgtctaagaacaaatcggccacatgacgctgcacaaacttctcatcagaatgtgccagtattacagtagaagcatgacgaaccacttccggaatcttttccagcatcttcatatcgccaaagcaaatcaaagccaaaggcttgtctttggccagcttttccagcaaagctgcatacggttccaccttatcggtatgtaaggccaccaatactcgctgtgtcgggcgcaaacgtgcctccacggcatccaatgaatctacattcgcatgcagccagccaaccggaaaagtctgcttcaactgatgataaaacggataagcttccgacaaggaaggagagacactcaacagcaccgtacccgatacagataaatcaagcggaaccaatgacgaagaatccttcagtaccgtcactgccgcttttgacaattcctgctgaagcgacagaagctccggcgttaccagtttttctgcaagtccttcttcttccacttttttccaggaagaaagtcccagcgcatatttaaatgacagtactttccggcatttccggtcaatatcagtttccgacagacgaccttttttaagcgccgacatcacaccgtcaatttcttttttcaaattacggggagataaaaccacatcgtttcctgctatcaaggcacgggcacacacatcatcatgcccggcaatgcctttcatctccagagcatccgtcaccaccagtccatgaaagcgcaattcatcaatcagcgtacgcataattacttcctgcgaaatggaagcaggtccttcacctaaactcggagcatgcaaatgacctaccatcacaccgccaattcccgcctcaacggctttcttaaaaggatacaactcgatactatccagacgagcgcgatcaaagtttaattcaggcaacgcattgtgtgaatcaatttctgtatctccatgcccgggaaaatgcttacacaccgccattacgccattgtcctccaatccttttacataagctgccactttttcggccaccctcttcgggtcactgccaaaagagcggaaattgattaccggattattgggattgttatccacatcggctaccggtgcaaaattaatctgcacacctatcagacgacactggcgagccacttctttaccatattcataaagcagtgaatcattctgtatacatcctaacacacgattgtagggaaaagaaggggtatctttcaagcgcattcccaatccccactcaccatcaaaagtcaccatcaaaggcaccgacgcatgagcctgggcatagttggtcatctgcacctgcttccgaagttctccaccggtaaataacagccctcctactccataatcatcgaccatctttcgcaaaacattcttgctgtattggtttgtcaccggctggagagtataaatgaacaactgacccactttctgtttcagcgtcattttctccatctgcccgtctacccatttccggcaggcttccgtgtcgtgtacccggctcaagagcgcaggttcttgtgcaaagagactagtcgaggccagacaaacacacaatatacaccacaaaatccgtcttttcattctatcctatctgtttaatttttctgcatcttgacaaccatacgcccgacaaatgccgcactttttcccatctgctgcacaggcacctctattccgtcaagattcttataaaactctggaacttcaaagaaggaatgagaatgtccgcctaatacaatgtcaatgttacgggtattctctatcagttctatatccgaataaggttcacctttccatcccaaatgcgacaggcaaatcaccaagtcacaatgttcctggttcttcagcaagtcggctacacgctggccttcagacacagggtcttcaaattttacattcccgtaattggcatgcgccaccagaccgtcaagttccggtcccagtccaaacacaccaatacgtattccatcgcgttcaatgacggtatactcctttaccaaaccttccagcacggtacctgtcacgtcataattggcacatacaatcgggaagttggccatcttgaacaagcgggccatattgtccaggccaaaatcgaactcatgatttccaatcgtacctgcatcataccccatctcattcatcatcttgatttccacctctcctttaaacaaattataatagggacttccttgagaaaaatccccggaatcgaacagcaacatatctttgtgctcacgacgctgttctttcacaaaagccgcccggcgcaacacacccgcctttccggccagtaccgtatcagggaaataagaggcaaagggttcgatacgactatgcatgtcgttcgtatgaaatatatacaattcttttaccgactgcgcggccatcacactcaccagcaggcacgccagacataaacaatatatctttttcatctcttttctatttttcaattggacgcacttacttttattcttccttctacctgcgaagttacaaattgtcctttctgctcacactgctttacatagtcaagcaacaaattacgcaacaacgcatctttcgggaatattttggaagaagcccgacggaacgcttccatcttatcatttccctcggccagataatctatggtagctaccgtataggttttctttgcatcaatctgctggccattcacctttgcttccaagaggtttccctctccatctatttttaaagcggcgccactaattccctcgccatgtacagaagctatttgtccgaacaactccttcaatgtggccccgtccattgtcagcacacacaaggcattctcaaacggagcaatctcatacaccgttccaaaggtaatttcaccttcaggcattgcattccggataccccccatattcatgacagctacatcagccggcttaccaatcgcccgcactgctgcctgacgaagtacatcggccatcagattagacagcggagactccggacggtatgcagtcaggttctttgccgaatgtccgataatcggcgacataatactatctactttctgctgataaggtttcaagatattcaacgcttcggcatccggtttacggtcgtacacatcagtaatggccacccttccgccttccacacctgccagcgaataacctgagctacagctggccagcagccacccggccaacacaccggcaactgcactttttacaagtctaacattgagataattcataaaacaaggtttatttgcagtcaaaaatacggaaaaaaggaacatgctcaaaagaatgataaaagctatccaaaagacttctcattttttaataaaataggtagaaaacatttggctagctcgcagaaaaacactaactttgccccgctttcgcgcaatcgctgtcaaagaagagttacttgatatgttgcgttgtaacgatcaaacaatttaatttattacaaaacatggatttaattaaaattgcagaagaagcatttgctactggcaaacagcatccttcattcaaagctggtgacacaatcacagtagcataccgtatcgttgaaggtagcaaggaacgtgtacagttgtatcgcggtgttgttatcaaaatttcaggtcacggtgaaaagaaacgtttcactgtacgtaaaatgtcaggaacagtgggtgttgaacgtatcttcccattggaatctccggctattgacagcatcactgtcaacaaagttggtaaagttcgtcgcgctaaattgtactacttgcgtgcacttaccggtaagaaagccagaattcaggaaaaacgtgcaaacgtgtaattcagtattccctgaaaaagacaaaataaaaggagacaccattgggtgtctccttttattttgtggatacgttaaatatcatctgcaaaccggactaacaaaatcacgctaaaagtcctgtaatcctctgtatagaaaaatttcttatacactacactggtaggttatttctattgaaatactcccttcaaatcattgtactcaaaggttaatcacccatttagaaatacggtcttctgatttgaaatcattccctctatcccataatacaacaaaaaaggccgcctcataagagacagccttttttcatatttataaaactattactgacgctgagtagctgaatagttaatcttcagtgcgtatgcctgacgaagagcctgttttacttctgttacgatacccatcttggtttttgcatccaccttcagggaaacagtcataaacggtttgtcttcctctttcatgttttcacgttcctgatagatgtagtcctgaacttctgaagattcagagaatttatcgttcaactgaatacggtcggtagtacccatctttttctggaactccggcatcggtttaccgatgtagatgaaagacaccaaagatttcttttccaatttttccaactctgtagcctgaggaaccttgaactgaaccttcaatgtaacttcacgcatggttgttacaatcatgaagaagaacaacatggtaaagataaggtcaggcaaagaagaggtattcaactccggcatgccacgcttaccagtcttattaaattttcccatgattattttcctccatattttttaggttctgcttcagaaatcttctgcggataatagtctgtgatagctttctgttcatcttcagaacattcagcgaatgctttgccgaactgagactgagccaattcgttacgcaactcattgtaagctgctaccaattcgttctgaacctgaatataagcatcgtagctagtacccacgtcattctgtacagagattacatgcttttctgtaatcattacgtcaccgaagaacggaagatgttttgcatgcttttcaggcaagttctcatcgttattcggattggcaatgaattcttttgccttttgtctcaactgtctgatatcagaccattctccaccaaccatcaactggtcgtctttgttcaaacgaacctgaagaacgtttctttcctttacaataatatcatctttctgctccttgttttcaggcggaggcggtaaacgtcttgccagacctcggtcagtatccattgatgttgtaataaggaagaaaataagcaacatgaaggcaatatcggccgtagaggttgcattaatctgcggcacatctcttttcttttttgccattttacttactttattaaattattaaactcaatgaatgatattatctctgtttgaaaatacctgtcaggttcagcaatgtaccaattgctgcaacaacaagcaatgcataagttgaatacaggaacatatctgtaactttcaacattgttgcattttcgtaagcagtaccaccacccaacaatacaggtacgttagaaccgatattatatgttataattaataatacgaccaaaaggatcagaccaaacaaagacttgatagcgcctttcggattatctttcaatgcagcaccaaactgaagtactgctgcaataactgtaacagcgacacagacagcaaacataccgtacatcaggtacatcagggctggagtattagccggttcaaccaaaccagctgcatttgtttcgctgtatcctactccgtagaacatgcccagcactaccaaaatcagtgcgatgcatacatagaatacgtagtatgatactttgtatgataatttagccattgttcttattattttttgtatttcaagttgtacttcatgatcatatcaagcaatgtgatagaagaatcttccatctggcttgtgatagcttcaatcttagacaagatgtagttatagaatacctgaagaatcaaagcaacaatcaaaccgaagatagtagtaatcaaggcaactttcataccacctgctacaactgtcggagaaatatcaccagcctgctggatttggtcgaacgccataaccataccgattacagtacccaagaatcccaaagacggagccatagcgatgaacaatgtaatccaagagcatcctttttcaaggtaaccagcctgaacaccaccgtaagaaacaactgaacgttcaactacgtccaaaccttcgtcgattctcatcaagccctgatagcagatagaagcaacaggaccacgagtgttacggcagattgtcttagcaccttctacatcacctttttccaaagcagcttcaattttagccatcattttcttcacgtcaacttcagccaagctcaagtaaataatacgttcaatacagaaagccaaaccaagtaccaatgcgatagcaaccaaagacatgaagcctgcgtcaccttcgataaacttagtctttaattctttgtgcaaaccaccttcttcaacaactgcaggtgctgctgcttcatcagctgctgctacttgttctgtctgagccggagctgctgtagctgtagaatcctgagccatagctgtctgagtcattccaaatgagaggactcccatcactgcaagaattgcaaataactttttcattgtgtgtctaatttttaagattaattaattaattaatagtttgttaattgtttttctcttttttcgcggagagaacgggattcgaacccgtgatacgcttttggcgtatacacgctttccaggcgtgcctcttcaaccactcgagcacctctcctttttaatcagccggagcctcatttcagccatttttgtaccccgcgctgatttcagtcacaaatgtattcttttttttcgtcttacataacatcaagcctgcaaaagtttacttttgaagtcgaaattaataaactttaaaaacttttctccgcatttgtgaagacttttaaagcattttccgtggtccgggaggcgatttccgacaaaggtactccatagattaccgaaagacattctgccaccttcaccagatttgcactttcattccgtttgccacgataaggcacaggagccaaataaggtgagtcggtttcgagcacgacgcgcttcaaaggcacattcttcaacacttcgggaagggtactttttttgaaagtaaccactccgtttatacctaacataaaagattcgtattccaacagccgttctgcatcttcactagtgcccgtgaaactgtggaagattccccgcaaggctgtatgcttgtaacccgacaaaacctccagcagttccggataagcttcccggcaatgtataataagaggcagatcgtattccagtgcccacttcacctgttcttcaaagacaatcatctgctcctcacggaaggtcttgtcccaatacaagtcaacacccacctcaccgataccataaaagcaatgagaagaagaagtcagataccctttcactttttccagacgttccttccaaccggcatctaccgatgtgggatgaaaaccaatcatcgggtagcagcaatcgtgcgcctcacacagtttaagcatagcctcgaccgtcgtatcatcaatgttaggcataagcaagcgggtcactcctgcctcgactgcacgaatcaccgccagttcacggtcggcatcaaactcttcagtataaagatgggtatgagtatcaatcagggcgttcatatctttacaatttacggtccattaaatgacaaacaaacttcttcagttcttctttaagagaggattccacgtttactttatccagcaactccagtccttccttataataggcatcaatgcgagcctgacaaagttcaggaactcctaccttattatatagagctgtaaccgactggattttttcttcagccacgtagtccgtagcacgaagccagttcagtaacgtttccttatcttctccttcagccaggctcaaggcggtaatcagcataaaggtcttcttattgcaaagaatatctcctccaatcttctttccaaagacagccggatcaccatacacatccaggtaatcatcctgcaactggaaagccagtcccatcttaatgccaaaatcatagagcaactgcgcatccttttcgggagcacctcccaagatggcaccaattttcaaggctgccgcaagcaacacggaagtcttcagacgaatcatttcgatatactcgtcgaccgtcacatccagacgatgctcgaactccatgtcccactgctgtccttcgcatacctcaagggcggtacggccaaacacttccatcacgcgttccacacattcaagcggacatttcttcatcataaactgataggcaagaatcagcatggcgtctcccgaaagaatcgccgtattctcatcccattttttatgtaccgtaggcttgttgcggcgcatatccgccttatccatcaggtcatcgtgcagcaaagtaaagttatgataggtttcaatgcctgctgcctgtgaaaagatacgggtcacatcttccttatataaattataagccaatagcatcagcaccgggcgcaaacgctttccgcccaaccccaatacatactcaatcggatcataaagtcccatcggctcccgcatataagaaaggtttccgatatattcgtgaatctgctgtaacaattgttcgcctgtctgttgtttcatggaaatgtaatttaagataagagaaaaaagaaaggctgcaaaaatgcagccttcactttattataacggtcaatagattactgcaacttaaaggttacaggcacggtatattttacacgtacagctttaccacgctgcttacctggtttccatttcggcatcatcttgatcacacggagtgcttccttatccaagtacgggtctacactacgcataaccaccgggtcaacgatagaaccatcctgatttacgacgaactggatgattacacgtccctgtacaccgttttcctgtgcgatagtcggatacttgatgttcttaccgataaacttcaaacattcagccataccacccgggaattccggcatttcttctaccacctggaaaatctgctgttcttccggttcttcttcttccacttcaaccggtacatacttgatttccacagcctggttgttttcttcacttgactggatagtagattcttctacgtttgcatcattttctgcaatctgaagaacttcttccactttcggagcttcaggaggaggaggtgcctgcttctgttcttcctgttgttcagtgataggaatcatttcctcttcaaagattggttcggtgatacctgtatcggcagtgacctgcttgtcacgttctgtccattcgaacgctacaaacatcgctgccaagatcagtacgaaacctaccaataaccacgtggtctttttgccctcgaggtccgctttcggcgatttcttgacttccataaatgtgtttattaaaggttaatactctatacgtggcaaaggtagcataattccccgaaactccgacaccccaacatgaaaataatgtaaaacaatgcatattttttattccgcactggaaataatcagcatatcgccttacgtgctctatgtttccctgtgcggaaacgtagggttcacgcagggaaaacctacgtttccgccatgaaaaacataggttttccggaaaggaaacgtaaaaaacacaaacaggtatctgaatcattgctacaacgttttttcatctctgaagtcccaaacgaatttctaccttatattataaggaagagacgccaaaaactttatccaaaacatccgatatacaaaggatttacactatctttgtcaatgcgaaatctattttatcgaagccgaaacatgaaaaaaattattattgccatcgacggattctcttcctgcgggaaaagtaccatggctaaagacttagccaaagaaatcggatacatctatatagacagcggcgccatgtaccgggccgttacattgtattgtctggaaaacggattgttcaataccgacggaagcattcaggaagaagcgctccgccagcagatgagacaaatccagatttccttccagctcaacccggaaacccagcgccccatgaccttcctcaacgggaagaacgtggaagaacgtatccgcaccatggaagtctcctcacatgtcagtccggtggcagcactcgactttgtgcgcaaggccttagttcagcaacagcaggaaatgggcaaggaaaaaggaatcgtgatggacggaagagacatcggaacagccgtattcccgaatgcggaactgaagattttcgtgacagcctctgccgagatccgtgcacagcgccgttacgaggaactgaaagccaaaggtcaggatgcttcgttcgaagaaattcttcacaacgtagaagaacgcgaccgcatcgaccagaaccgggcagtaagtcccctgcgcaaggctgacgacgcgattttactggacaacagtcacctgaccattgccgaacaaaaacaatggctgaaagaacaatttgaaaaagctgcacatgcatcacattgaaatagataaggactcaggattctgctttggagtgacgaccgccatctcaaaagcagaagaagaactggcaaagggcgcacctctgtattgcctgggggatattgtacacaacgggcaggagtgtgagcgactgaaggaaatgggattgattaccatcaaccacgaagattttgcccgactgaagaatgtaaaagtcttgttgagagcacatggagagcctcctgagacttatgaactagcccggaaaaaccacatcgaaatcatcgatgccacctgtccggtagtgctgcgcctgcaaaaaagaatcaagcaggagtatgacaccactccccacgacaaagacagacagattgttatttacgggaaaaacggccatgccgaagtgttgggactggtgggccagaccgaaggcaaagccatcgtcatcgagaagctggaagaagtcagcaaactggacatgaacaaagacatccgcctgtattcgcagacaaccaagtcgctcgacgaattccgccagatagtgtcctacatcgagacccacatttcaccggaagcctccttccagtacttcgataccatctgccgtcaggtagccaaccgcatgccgcatatccgggaatttgccgccagtcacgacctggttttcttcgtttgcggacataaaagttccaacgggaaaatcctctttcaggaatgtaaaaaggtcaatcccaactcttaccagatagacaaaccggaggaaattgacaaggccttattgtcacatgcacattccattggaatctgtggagccacctctacccctaaatggttgatggaagcgtgtaaaaaagttataatggacgaataataaagaagaaaatcagttacaatataaattcatatttgtacttttgcttcataaaaatcaaactaacaactaacaattatgggaactattaaatgtattggtattcttacatccggaggagatgctcccggcatgaacgccgcaatccgtgcagtcacccgctctgccatctacaacggattacaagttaaaggtatctaccgtgggtataaaggattgattacaggagaaatcaaggaattcaagactgaaaacgtcagcaatatcatacaattaggaggtaccatcctgaaaacagctcgctgccaggagttccgtacaccggaaggccgtcaggtagcttatgaaactatgaaacgcgaaggtatcgatgcactggtagtcattggtggtgacggttcgttgaccggtgcccgcctgctggctcaggaatttgatgtaccttgtatcggattgcccggtaccatcgacaacgacttgtatggtacggacacaaccatcggatatgacactgccctgaacacaattttggatgcagtagataaaatacgtgataccgctacttcacacgaacgtttgttctttgtggaagtaatgggacgcgacgccggcttcctggcattgaacggtgccattgctgcgggtgccgaagctgccatcattccggaattcaatacggaagtagaccagttggaagagttcatcaacaacggtttccgcaaatcaaagagcagctctatcgtgctggtagctgaaagtgaaatcaccggtggagccatgcactatgcagaacgtgtaaagaacgaatatccgcagtacgacgtacgtgtgactattttaggacacttgcagcgtggtggacgcccgaccgcacacgaccgtatcattgccagccgtatgggagtagccagcatccaggccctgatggaaggtcagcgcaacgtcatgattggtatcgaaaacgaccagattgtgtacgttccgtttgccaaggctatcaagaacgacaagcctatcgaccgcgaactggttagcgtattgaacgaattgtcaatctaacaaaacaattccatataaagaatcccccttcaaaaagcatttaaacgtcttttgaagggggatttttgtatactgtattttcttcttttattttctccggcgatttctgcggtgcgtacgtgcatgacgtttataacgtatccagcggcggcgaatctgccaggcgctcagtcctactaccaccaaaagaatcagaatcacaatcccgctattcaggttgtcgccttttacacgcgaccagatttccaatacatctaccgtcttgtctccaaagtcacgtatcatggcacaacgggctatcacagacttatcgggatactgtgtgttacgcagcttcaccttctgtgcctccggaccgaagaaatagctggcatcgacttccttatccagggtagaatcaatacaagcttccagaatttccggggcagcaatggcactcacatacccgttctcttccatgttacgcaaagcgatgtccggcctacaaaggaagttgataaaatagctggctgccttaggattcttggcatacttaggaattacccatccgtcgtaccacacattgctaccttcttccggaatggtataggcaaggtccactcctaccgttgccgcttcttccatagcccactgtgcgtctccgctccaggtcatgttcatccaggccttgcctttggtcatcatttccttaccaaagtctgcttcccatccggccacattcggcttcaacagtttcagatatttttccaccgagtccatggaagccggtgaatagtcgttcatcaggtcagccacactgcgggtactgtctttcaaatcctcacgatgcgcatacagcaaagccataccgtacgaatcgcgataggcatccttcatcagaatcttgccggaaaaacgtttctcccacaggcacccccatgacttcaggtctttttcggaaacaaactgcttgttatacagcaggccggccgtaccccacatatagcacacggcataacggctggccggcagatcgcccttcaccgtcagtttatctatctgctgacggatatagggcgccactccgttcatgtaattgggtgaatgagcaaaagccgtatcaataggctgcaacaagcctttgtgcagcattcgttcgatgatatactcggaaggacacaccacatcaaagtcttcatgccctttctcaatttttgtcagcatgatttcgttgatgtcaaatgtctgatacacgatgcggatatcttctcccgtcttttccttataatattcctgaaaatcttccagtacgccttcacctatgtagtctgcccaattgtacaccttgagcacgttttcgcgcgattcattagcgttgtagcatcctgtcaacagacagcacacacacaaagccacccaccagttccaccttttcatcttctgtttcatttattctttgctttgtcagctctacggttaataataatcagcagtaccagtatcaccacaaaaatcacggccgacagcggacgaagctccggcgtcagaccacccttgcgggcatcggcataaatataggtagaaagcgtttccaatccctgatttccaatggtaaacaccgttaccgcaaaatcgtcgatggaaatggtcagtgccagcaggaatccgcttaccattcccggacggatttccggaacaatcactttccacaaagcctgcatcggagtagctcccaaatcgagcgcggcctcatacaggttcggattcatctgtttcaggcgcggcaacacactcagcaccacgtacggagtacagaaggtgatgtgtgccagcactacggtggtaaatccttgggtaatgcctaatgacacaaacagcaggaacaaggaaataccggtaataatatctccgttcaatataggaatggtattgatgaatcccatggctttccggctgcgggccttcagattgtagattccgatggcagccacacttcccaacaaagtcgataccgtcgcagcaataaaggcgatggctattgtatttatcagcgcattcatcagggaatgatgtgctccggtgttacacaaggagcggtacagattgagcgaaaagccggtccagttgcccaatacctttgcatcggtaaaggaataaatcacaataatcaatatcggagcatacagcaacaacagcaagacccaaagataggtctgcatcagcactttctttaccatacctgtcctcctttctctgaatcactcttttcatcagaactaaagagtgaagtggccgcaatcaagaacagcataatcaaggaaagggctgctccatagttccacatactgttgttgatattctcctgaatagtcgtaccaaacaacttaatgttgttcatggtcagcaattctgcaatggcaaaggtagagatggtcggcataaacaccatcatgatgccgctcaccactccgggcatggacagagggaacaccaccttccagaacacctggaaagagttggctcctaaatcctgtgctgcttccacataactcgggtccatcttctgaagggtattgtaaatcggatatatcatgaaaggaataaagttgtaaatcattccgaatatcaacgctccttctcctaaaggcagactggcaaagtcgaacaaagctacggtagccagcgtacgtatcaggatgttgacccacatcggcaggataaacagcagaatcagcgtacgcgaatagcttgaattactgcggctcagaatccaggctgccggatatcccagtacgatacaacctatcgtagtcagtatagctataccgatggaataaataaaggtattgactgcttccggatgggccaggaatttccggaagttttcaagcgtcatacgacctgcatcatcggtaaatgcatataccacaattagcagaagcggaacaatcacaaaaatgatagagaaaatgagataaggaagtgtccagcttcggcgtgaaagaaaaaacaaacgcagtttattcatcgttcctcctgttttacacgtacccgaatatcttcaggagcaatggaaatgcccacacggtctccatcatcccacacatcattcgtatcgacaaacacattctcatcccagtctgaccataccgtcaggtggtaatggtttcctttgtacaaaataaacttgacttctccggtcagcatgccgtcttctgcgttgtccagcaaattgatttttccaaaatccacgtctaccagcacatcgcccaacggcactttctgaaggtctaccggtgcacactcaaactcacatcctaagaattccacatgagtttcatcgataagcttgccttcaaaggtattacagatacgctctttcttcatgatgtgaatatcaaacggcttgaccagcatacccacttcggttccggccttgaaagcatgataatcctgcaccacaaactcatagccgtggcacaacaccaccatttcatagtgtactcctttaaaaatacaggactgtacggtaccacgaagctgtgccatatccgacaccgggaatatatacaaatcctccggacgaatcaccacatccaccggtgtgttttcgccgaagccttcgtccacacattcaaagtcacggtcacagaaatgtaccaacttatccttcaccatgactccgttcaggatattactttctccgataaagtcggccacgaacgagttaatcggctcattgtagatgtcggtaggggtaccaatctgctggatacgtccctcactcatcaccacgatggtatcactcaatgtcagggcttcttcctggtcgtgcgtcacgtacacaaaggtaatgcccagcgtcttgtgcatttccttcaactccatctgcatgtccttacgcatcttcaggtcaagcgcagccagcggctcgtccagcaacaacacttccggctcgttcacaatggctcgggcaatggccacacgctgctgctgtccacccgaaagcgagttgacatcgcggtactcatagtcggtcatacccaccattttcaaggcagcctttacttttttaagtaccgtatcctttggcttctttttcagtttcaagccaaaagcaatattgtcatacacattcagatgagggaacaaggcatatttctggaaaactgtattaacaggacgcttgtgaggaggagtctgggtaatctcctcccctgcaatacgaatcaccccttccgaagcggtctgaaatcccgctatcaggcgcagcaaggtcgtcttaccgcatcccgaagggcccaagatggttacaaactctccctttttgatggataaattgatattatccaaggctgttttttcaccaaaaaactttgatacaccctttacctctataataggtttaatttcactttgcatcatttcttgaaaattagttcgcaaagttacatattaattcatttcacaaggcatatcacccttatttttcttccttatttttaattactccaatagaaacaagccattttgaatatttattcatcactcctgtttcaacccggagaaatacatttccaatagttttctggctgccgagaaagacgtggctcgtccttccagcacatccttttcctgcaagggaagcaaggaagcaatttccggattctgatagaagctgtcgcgcaaatgctcattgatggtttcatacatccagtatttggcctgctcgttccgacggtgttcaaaataaccgttcttgcggacaaagtcgatgtaggcatacaccatatcccagatttccttgacaccgatattataaaatccggaatacgtcagcacctgaggagtccatccggattcgggagtagggaaaagatggagcgcattacggaaatgcgtagccgccaactgtgccttctctacattatttccatcggccttgttgataatgataccatcggccatctccatgataccgcgcttgatgccctgcaactcatcgcccgtaccggccagctgaatcagcaggaagaagtctaccatggaatgcacggcagtttcactctggcctactcccacagtttcgacaaagattttatcaaatccggcagcttcacacaagatgatggtttcacgggtcttacgggccacaccgcccaatgagcccgccgaaggactgggacggataaaggatttaggatgtaccgacaatttttccattcgggtcttgtcacccaaaatacttcctttggaacgttcactgctggggtctatggctaacacggccaactttcctcctttttcttcgagcacatgcagtccgaatacatcaatcgacgtactttttccggcaccgggcactccgctgataccgatacggatagaattacccgaataaggaaggcatttttcaatgacctcctgtgccagcacctgatgttccggcttgacactttctaccagcgtgaccgcctggctcagcatggtcacatcgcctttcacaataccttccacatactcggcagcagaatactgacgacgtttgggtttctttctcagattcagataaggattaacaatggagggttgttccactccctggttcacagttaaccccttataagcttcgttgttttcggggtgttccataaaagtttttatttttcggacgatttcagccgggctttcacacggatggtaatcatcggttggttaggatcatcggtaatcatcaggacacggggtgtacctttcacacggtgaagattctgtgccaacacagtaatcttcatcttagtcgattcacccggtttcagcactctctttttcagtttcacggccaaagccatgctgaatacctgcatatcctgaatattcaggtcagagcgacctgtatttgaaatgacaatcgtctgcgacttcttttggttgggtttcaaatccacaaattccagttccttagccgacaacgtgatctgaggaggattgtttttctgctgttcggtcaacttggagaagtcaggcaacagagccacagatacaggtatttcattctcactgccgactttatcacctgggaagcgggacagatagacagaagcacgtgtaatacctaatttcggcaatttctcagaatccagtgttaccagaatctttccggtctttccacgtcccagtttttcaggttccgcttttgcctccagataaggaggaagatgcatcagcacaggtgaataagccttgttggaagtattggccaccaacaattcaatgaccgggcggtctcccttattgacggatttaaaatcaagttcatcctgtgtcaaccggatggcaccgatagcataaggatgcgtaaaggaatagttcttggcatcggctgtcacctctccgttaaagtccaggtaaataggcagagaagctgcattgcaatacacacccacatctttatagaaatgcccgatagcttctgcatcgaacactaccgtaatctttccttttcctccggcaggtacaggttcttctgtccattgtgccttggcacatccacaggaagtcgtcacattggatataaccagcggcttgtctcccgtattggtaaactgataagtcacggttgccggagtgcgccacaacacgtagcccaagtccttagtagtcatatcaaaggatattttaggctgagcccataaggacatgcaagcgacaacacacaaaaaaagaagggtatatattcgtttcattgattttattctttctaaattacggaaacaaagatagggagaaaacggaaacaagcaaaatcaagtctgaaaatttattttctccataacctcagaaatttgtaaaaatgtccgaaccggaatcccggcccggacgtgattttattcgatatataatgtatatccttccgtatgactgccaaactcaggagcgtataccgaccgtatttccgatgtacctgcctgatatactcccgaacggtctacatgcacttcatattcaatgacgtaggttccttttcgcaaatgatccataaagaaggtcgtcaccgcatcaccacttacccgataccgtcccaagccatcagaccattcgtagcctgagatttgccgcactggttccatacaagctgcacgctcgtctttcaaacatacaaaatccatatcccggtcggcacggagagtcaggcgtaccgtcaacttatcgcctacttgcaacttttctttggcagacaaggtcttacctttatatatatactcacgtgaaacttgcaggccctttccttcaaatgccttcacacggtccatatcttccagatattgtgcatacacggcaccccatccggcagcttttcccgtatgacttacggccagtgtcttcacctccgcctccgctccacttaacgtatgactgatacaacccagtccgtctttcggagtttccagtgtgacattacctgccaccgcctgcatctgtccggcttctgtcaaagccatgccatctgccagcaaggcatacaccgcatccgccgtagccaaaggtgtattccagcactgcacctgcttttgcttcagcaaccagagtttcatttcctccagcatcttttcatccttctccacacactgaatagcttccatagcagccacctgcgtcggaatgcgataaccgttccatgcgtatccggctttcggcgtatcaaaataacgtcccatttccgacgttactaccgtatattccttaatcgaacgtaccagtatttctgcctgcgtacgttttccctgtgcctgcagaatccgggcaatcaatgccttctcataaatggaataagtagcaaaacggttttccagtttggagaccatgtattcttttgctgccttgttcactttttctcctgccatcgcatccagtgatgcaatatacagatacctcaccgccagctcacttggccattgcggacttttcttacgagcctcgtttttcttcaggttctcatattcctgacaaaaagcattttccaggtaattcagacctttcaagtacatgccagccacttgcgcatccgccatgatatgcatggatttcagtcgggccagcagttccaccacttgcgtagtaaccaaccgacttccctgcatgccgttaaaccagctccagcttccatcccctttttgcaaggccttcaatttttccacggtctgccccatgcgataattcatcgtattcaggtcgaacaacaatccaatccgttgtctctgctcctgttcatctgccgcctgagccagccaaggcgtttcggccagcaacaagcttttcagttcctggtttttctccagctcactccacaacgtttctttctttactccctgctttttccaagcttcaaacacaggctgaatctgcggattcagttccacaattttccgtgccaccgcattggcatagtaagccgaagcccaagagaacgcatcgtcctgctgcggatttcctactaccggaagtgcctgtacggcataccatatcggagtagaagtcagttcgatggtcagctgccggttctgggccgtcttgctctgtccgttaaacaaatccttcaggctcacttcctgagactccccgcctttcacctgcaaggacaaggtttccgtcatccattgcttgtcagtaagcacaggaagataatgctgttctccatcactaaactcgccagcttccgccttcatccggcaaatcaaaacctcgccatccatatttaccgggaaagtaaaacgtacactgcccgtttctcctgccttcacctgaaaatcctgtactgcctgacacaccacactttcatccatcggattcaccaattccagacgtaccgcccctttcacctcttccgttgacagatttatcaaagaagctgccagtgaagtttcatctcctctacgaaggaaacgaggcaaattaggctgaatcataaacggtttttcagtccgggtttctgcctgcaggagtccgtaatccatgtggcgggtatgtgccagccctctgaacttccactgcgtcaatgcatctggcacggtaaataccaatcgcacggttccggttgaatctgtacgcaaatcaggatagaagaaagccgtttctgcaaaattctcgcgtaaagtcatcgtctgttccgtttccagaggaatcgtttcagactgaagttctacttctaccactccatcgtcctgcgtgaatcccgcctgcgcattcaaagcctcatccgccctcatggcatctggtgctgcagccgcagccttcatcatgattcctgccccgcgtaccatcagaccgtttcgagagaaggttctatactgacgcaaagaaggaacccacaaccggctatacaactgccagttgtcaggagtatatacagaagacaatgaataagtatagaaaggcgaataagccatcgcgatgctattcactgactgaataaacggcatgactgaaggagtatatcggctgaagcccaactggaaattccacgggttatcccacaaacggtcgagcgaagcatcatacaaggtagccagcagacgggcatccaccggtttgcctgccgcatccaaaatctgcatggtccaggtttcttctgtgcccggacgcaaacggtcgcggaaaacttcccacttcaatgtcagttttttctccggtaccggacgtttcaaagcgacttgcttggaataccagataccgtctttcataaatccaaagctgacggtgattccatcgccgtattccggcctccacgtataatcaaacggacggatttcctcgttcagcacaaacgagtcagaaaccagcatccgattgccactgtacacatgatagaacaaatgtacattcttttcactgctgcccacatacaaggtcaccggctgcgtttcctccaactgtgtaccgtcctgatagaaccattccacagtctttaccggaggaacccggtcttttaacgaaaagagtacaaactcctgttctgcacgacaaggacgcccgtgctcatcactggcggttacctccagcaagtattttccggaagccaacttcttccatgcttccggctggaaaggctgtccggatttcaccgtatccccccatactgtttgctgcttctttccggcctcatccaatgtataaagtgagccgaccacatccaatgccacaggctgttgctgcatgttcaaggcctgcacctgcatcttatccagtttctcacgagccacttttccggccaatccctttatctgtaatccgatggcatgttcacccaccggaagcaccagtacaccttcctgcgtttctccggccgcatccgtcacttccaccttcacctgataacgatagaatccgttccagcctaaggagacttccgcatccggacgttccagacaaacctttaccgcaaacattccgtcggctgaagtcatcagttcaccctctgccaactgttgctctcctgccatgttccgccagaaccaggcctttgaacgggtcaaggtataacgcaccttaccgccctgcaccggtgcaccggaaaattttttcgccgtaccttccagttgcaaggaatcccccatcgtgtaagcttcctgcacttccttccaggtgacttcaaacgtcggacgcttgtattcttccacccgaatataacaggaagccttgtccgattctatacggaacatgccggccaatgtttccgaaggcaactggaattccgctgaaaatgcgccgaagtcatccgtagtcagttctttccgggctatctcccggttattggcatcccgcaaggccagccagatggctgcatctttgcgtacctctaccctatcaccttcctgcgtataagccacaccggatacatacaccgtctgccccttgcggtacagcgcacggtcagtaaacaaatccatgcgatccaccttcttcttgctgtcattgaccgtcggcaacacccttctggaccagtaagccacctgcataaactcatccttgcctgcacgtgcatgcatccacaatgactctttcatgtccggcactactaccttaccctgcttatcggttttaaacgtcttatataaggtataattgcctggcacaggaatggaatagaacaccaattctgccccttcgaccggctttccggtcttacaatccaccacatgacactccgtctgccttccttccatcgggaaagaaaccacctgcaatgcagacagatgcactacatcgtatcccgttttatcctgatagccgtcggggattgatttcaatatataaatccccgcctcgggcatccggctggtcagcaaagaaaccgtatccttgtacgtaggagtatccggcaagtccaaccgcactttatccaccagtttaccatacttctttatcaggtccgcatgctccagattctgtgcaaacacagaagaagaagccttcaggttcagtctataccattccagtgtcgcccctttcaggttcttgctggtaacacgaagttccgcttccgtctgcggataaggatgagttacctgcaccgaaagtgatggcatgcatacaatgcgctgcttatctttcaaatcggccgtgaattctgaagaaggataccgttttattccttcttctatcaccttcatttcggacacgaagtcttgtttctgatgatagaaatcggcccatgacacatacaacgccgcacaggcatccactccgtcataggcttttgcccacgcctgcaactgctccaacacctgttcgtccgacagctgttgcggatacctccatccattacgctgccagtacatcaatcgctccagacgtgtcaataattccgcgtcacgatttcctgccgcctcgtattgtgcaatcagcttttcatacttgtcgaacacggccaactgtacggccttgcttcctcctccattccatagaagctgaaagatggactggcgtaacagcaaatcgtacatattgtcaccgaaatagcgctggctccatttgccctgttcagccatcggacgaaaatcggtcgtagccacgcccagcaaaacctccttatcctttactgcccggtcaaactcatacaatgcactgtccacttcctgaggagcggattccaacttatagtatcctgacagaaacgccaacacggctttctgcaaaggatcgttctcctctgcagcccatgcattcagtcgacaaagttcacgctgcaaactgtccggtgtcaaccctacctgacattccacccgcgaaagatacgctttcagcatctgcggagcattcttctcctttcttgccttttcataaatctggttcacctgtgaaatcaaggtctgcggcaaatccttcttccgggtttcctctacctccttccaaagacggtcgtaactctgagctatccccaccaaagggaacataaaagccaacaatcccgtggcacatatcaagaatagtctgttcatcatttccaattttaagttttacaaggttgtctttataaagataaaaccaaaaccctgatttactgcacagattttcattaaaagaagtaaaaccacagaaaatcgaaacaaaaaaacggaggctgcccctttcccttttacgggaatcggacagtctccgtatctatttatccactaacggatattactttttcggtgtattttccagtgtagccagcaagaaatcatagaacttcttcactgacggcacatgacagcgttcttccggtgtatgcgggcactgcaaagtaggaccaaatgaaatcatatccagtcccggtacaaccgcaccgatgataccacattccagtccggcatgaatcactttcacttccggtgtttcaccaaactgtgccttataagattccttcatggcatgcagaatcggagagtttacatccggttcccatccagagtagctgccagaacgttctacgtgcatacctgccatagagaaacagctttcgatagccgtattgcgataatccttcattgattcgcgagagctgcgtgtcaataccttaatggcagcctttccattgccgatttctacgatagccaggttagaagaagtttccactgtatccgggatagtcgggatgaaacgttctactccattcgggcatgcataaattgcgtccaccaggttgtcacggatttcttccggcaccatcatcttcggcaagtccacacgctctgccgtaaagctgatattgtcttcaatggtcgcgaattcatcacgccatacctgttcgcattcacccacgaacgccagcacatcttctacctccgaagccggtacggtaatcactacttcacattcacgcggaatggcgttgcgcatgtttccaccttcccatgacaccagacaagcctcatcgtaagcaatcacctggttcatgaagcgagccatcaacttgttggcattggcatgtccccagccaatctgaatacccgagtgaccaccgcgcaatcccttcagtgtcaccttcagcgccacgtcttccggatctgtttcttcttccttgtattccaaagttgcggtcaggtcttctccacctgcacagccaatataaagttcaccttcttcttctgaatccaggttcagcaggatttctccttccactgtgccctgtttcaagccgaacgccccatacataccggtttcttcatcggcagtaatcagcgctgtcagcggaccgtgcttcaaggtcttgtcttccataatggccatgatggctgccacacccataccgttgtctgagcctaatgtggtacctttagccttcacccattcgccgtctacataaaccggaataggatctttttcaaaatcatgctgtgtatgtttgtctttctgaggaaccatgtccatgtgagcctgaaggatgacagacttccggtcttccatacccggagtggccggtttgcgatagattatgtttccagcctcatcctgaaatgattccacacctacctgcttgccgaattccagcaagaaagcctgaattttttccaaatgtccagacggacgaggaatttgcgtcaacgaatagaaatgcttccacacattctgcggagccaaagaaagaatttcgttcatattatattttttgattttattccggaaaagcaatttcacttcccggtctgtttcttatttacaagtggtaaggctacaagcccgtaaacacctagcaaaattaataaaaaggtttgaataccgtgcaccagcagggcaaatattccggcatcttcctttcccaccccatacatcatcatcatggtaatgactgcaaagtgccacggacctgcaccgttaggagtaggaacggccactgcaatactgcccaccacaaacatcaccagtccgggcatccagcccagcgaggcagaaaagtcaaagcaatagaaactcacatagaattgcaggaaatagcatacccagatgcccacggtgtaaaaagcgaacagccacggatgttttacatgccgaagcgacaaacatccggcccacacatcattcaatatgccgcgcaccttcgcaaataccgtcaaattgcggatcaggaaaaacgccagcacacccaaggcgaacagacagatgagggtgatataaaagttggtggaagtaaacaagcctgtaaagaagcccatgttcgtaccggtcttttcaaagaatgccgcaaacacacgcgactggagcaacagcgtcactacggtaatcagcagcacacagatggtatcgatgagacgctccgtcaccaccgtacccagcgatttggagaaagaaaccccgtcgtacttcgacaggataccgcagcgggaaacctcccccacacgcggtacgaccagattggccgcgtacgacacaaaaaccgcatacacactgttcgacaccttggggtattcacctaacggagctaatgtcagattccagcgccagccgcggaacagatgccccagcacaccaaacaccagcgaaaaggccatccagccataattcatgccgccatccagcacgctccacacacgccggaaatcaaaatcgtggtatgtccaaagcagaatagccgctccgagtaccaacggaagcgctatctggaagaccttatttagtactttttttaaacctgttcgttccaaaatcagtctgtatataaagatttatgtttaactttgcaagtcacaaagataatacgaacatttaaaacctgaggtatgaaattagttaaacctaaaaagtttttaggacaacacttcctgaaagacctgcaagtggcacaagacatagccgacacggtagacgcctgcccggcccttcccgttctcgaggtaggtcccggaatgggagttctcacccaatacctgctgaaaaaagaccgcccgctcaaagtggtggagctggattttgaatcggtggcttacctgcgtgagaattttccgcaattaggagaccatatcatcgagcaggatttcctgaaaatggacctccggcaacttttcgacggacagccttttgtgctgaccggcaactatccctacaacatttccagccagatattcttcaagatgctcgactacaaggacttgattccctgctgcacgggcatgattcagaaggaagtggccgaacgcatcgcggctcgtccgggcaacaagacctacggcattctgagcgtactgattcaagcctggtacagcgtggaatacctgttcaccgtacacgaacatgtattcaatcctcctcccaaggtaaaaagcgccgtcatccgcatgacccgcaacgagaccaaggagttgggatgcaacgagcagttgttcaagcagattgtcaagacgacattcaaccagcgccgcaagacgctccgcaactccatatctccgattctggagaaaggaaatccgctcagtgccgaccctatcttcaacaaacggcctgaacagctttccgtacaagacttcatcgacctgaccaaccgggtggaagaagccttgaattcctcagccgcaaaggccgagtgaccctgcacacgagacttacagactacgataacaaccctcatcaggagtttacaagatgaatagcgaagatattaaattagtcaccgaactgattgagaagaaagattccgaccagttaaaagaagtcatcaaggacctgcatccggccgatatcgccgagctgtgcaacgagctggacgcagaagatgcccgcttcatctacctgctgctggacaacgaaacggcagccgacgtactgattgaaatggacgaggatgcacgaaagaaattcctcgaaatacttccccctgaaaccatcgccaagcgctttgtcgactacatggattcggacgatgccgtagacatcatccgtgaaatggacgaggacaagcaggaagaggtgctttcgcacattgaagacatcgaacaggcaggcgacatcgtcgacttgctgaaatacgacgaagataccgctggtggtttgatgggtacggaaatggtgattgtgaatgagaactggagtatgcccgaatgcctgcgcgaaatgcgactgcaggcagaagaaatggacgagatatattatgtatatgtggtagacgacgatgaacgtctgcgcggtgtattcccgctgaaaaagatgattaccagtccgtcggtttccaaggtgaaacacgtgatgaagaaggacccgatttccgtccatgtggatacgcccattgaagaggtggtgcaggccattgaaaagtatgacctggtggccgttcccgtggtcgacagcatcggccgcctggtagggcgcatcaccgtagacgacgtaatggacgaggttcgtgaacaggccgaacgcgactaccagttggcatccggtttgtcacaggacgtagaaacagacgacaacgtgttccgccagaccaccgcgcgccttccgtggctgctcatcggtatgctgggtggaatcggtaactccatgattctgggcaactttgactctacctttgccgctcatccggaaatggcgctttacattccccttatcggtggaacgggaggaaacgtaggaacccagtcctccgcattggtcgtgcaaggtctggccaacagctcactgaacgccgaaaacaccttcaagcaggtgctgaaagaatccgttgtagcccttatcaacgccaccatcatttccatgctggtgtatatctacaacttcatccgtttcggagctacggctacagtcagctattcggtatccatcagcctgtttgccgtggtcatgtttgcctccattttcggtaccctggtgcccatgacactggaaaaactgaaaatcgatccggccattgccaccggaccgtttatctccattaccaacgacattatcggtatgctcatgtacatgggaattaccgtattattatcctaaatttttgttaaagaaaaacgcaagtgcgtttgaggtaaaacgcaagtacattttacttcaaacgcacttgcgttttaatcaaaacgtccttgcgttttctttgaaacgcaaagacgtttttttcaccccctctacaagcccttctgagccacattcctcgtctttctatttcgaaaaatgattcttaccttatagtttttttctgaaaaagtatgaaaatcagattttttttctttaatttgtaagaacctttactaatggtaaagaaaaaactaggatattatactctttaaaatctatatacgatggaagtaaatgaaaccaaccgcccattaaccgaaactccgatggaacaatccattgaagcaccggttcctactgttgaagacaccgaaaaggaaacatccgctcccaaacagacactggaagaagtggtgcaacgcctcaaggaaatcaacgagaaaaacgacctgaccgacaagcaggaaatcgattcacttaaacaaacgttctacaaactacaaaaagccaaatcagaagcggcacggaaagctttcatcgacgaagggggaaaggcagaagacttcactccggaaacagaaccggcagaagaagaattcaaagctgtcatgaacgccatcaaggagaagagaaatgccttagcggctgcacaggaacaggaaaaggaagaaaacctgaccaagaaactgggtattctggaaagaatgaagttcctgaccgaatcgcaggaagataccaacaagatatacgacgaatttaagaaattgcagcaggaatggaatgaaataggtcagattccggtagcgaaagtaaatgaactgtggaagacttaccagctttacaccgaaaaattctatgacatggtgaagctgaacaacgaattccgcgaatatgacttcaagaaaaacctggaacagaagacccgcttgtgcgaagctgcagaaaaactggccgaagagcctgacgtaatttctgctttccaccagctgcagaagcttcatcaggaattccgtgccatcggcccggtagccaaagacctgcgcgaagaaatctggagccgtttcaaggctgcctctacggttgtcaacaaacgccaccagcagcattttgaagaactgaaagaaaaagaacagaataacctggaccagaagacggtgatttgcgaaatcgtggaaggtatggaatatgacaccttcactacttttgctgactgggaagacaagaccaatgaaatccttgccctccaggccaaatggaaaaccatcggctatgctccgcaaaagatgaacgtcaagattttcgaacgtttccgcgctgcctgcgatgaattcttccgccggaaagctgctttcttcaaatctgtgaaggaaacaatggcagccaacctggaaaagaaaaaagcgttctgcgaaaaggctgaagccctgaaagaaagtaccgactggaaagaaacggctgaaatcctgaccaagctccagaaagaatggaagaccatcggtccggttgccaagaaacattcagatgccgtatggaaacgttttataggtgcctgcgattatttctttgaacggaaaaacaaagcgacttcttcacaacgctcggaagaagtggaaaacctggccaagaaagaagatgtcattaagcgtatgactgccctggaagctgccggaactgcagacgatgcaactgccgaacaagtacgtgccctgatgaaggaatggaatgccatcggcttcgttcctttcaaggaaaaagaccgtctgtataaagaattccatgcattggtagacaagctgttcgaccgcctgcacctgtcggctactgaaaaacgcctgagcagtgtacgcactaacggcaacaaagaaggaaatctctaccgcgaccgtgaacgcctggttcgcacttacgaagggctgaaaaacgacatccagacctacgaaaacaaccttggcttcctgaattcttcttccaagaagggaaatacactggtggccgacatcacccgcaagattgagcgcctgaagaaagacatggaactggtgctgaagaaaatcaaggacattgatgaaagcttgaaagaaaaagaataaaaacagcttactcaaactaattttattaccacaagaggtatccattcccatggatacctctttttttgtttttctttcaatttttcacaagaatttcactcgattgtaaaatcttcacgcaaccaagccatgtttgatatttttttgaaaaataatcgtataaatattttattactccaagaaaatatcttaaattaaagccaaaattcaagaaacaaactttcttgtattttgttaacccgaataaaatataagcaaaatataattctgaatgaattaaaaacataaaataaactattcttaatatgaaaatgaaatcactattagggattgtactttccctaagtattctgcaatcttgccagaatgacgaaacaaacatcatccagaatgaagtgaataacaaaggcatcacattctcttctatcatagatgatgcacaaaattccagagcttacgatacgtcgtgggaagccaatgacgtaattggtgtatttatgctagccaacaatagtgataaaaatgtactggctacaaacattccttatgcaacatctaaaggagacggctatttcgtaagccagaatagtcccatatactatccggaagacaatagtgcggtcgacttcattgcatattatccttatagtgaaactattagtgactataaaaactatcccattgatttaagtaaccaaaccaaacaaaacgccatcgacttgatgactgcagtaaacctgacaaaccgtcaattggcgtctccacaaggtaatctgcaattcaagcatctgttggctaaattggtgctgaatttgaaatctacttctggaagttccctgaaaggaatcaaagcttctatcagcggactgcaagtaaaaggaacagctaatctttctgacggtaccattactccttccggtgaagctacaaccttttccttatttataaatgaggaagccacacaagcagaagccattctgttacctcaaaccttgagcggaaacctgaaaatcaaactggaactgaacggacagagcaaagaaattaatacggagatttctggaagcattgagcaaggtaataaatatatatataatgtaaatgtgaattatcaggggggagagattacgaccgacccagaagcaaaatatacgaaatggtttgaaacaccggtaattactgagtcacaactgaatcaatctaatataaaatacgttactcattataccggaataacttatgacgaagctccactcaacggtattgagatccgtaattatagtatgctatacgataccaatctgaaaattgcttactgggtatcctatccattatgcggatggtatctggaaggaaacataggccgtacggaggattggggttatgaccctaaaatagcaactaaccttcaagcgaatctcaaaaaagctctcagcggttacagcagagggcatcagattccgagtggtgatagacagcgtaaagactgcgacatgaataatcagactttctattacaccaatatgactccgcaattacaaaatggattgaatggagctatttgggctcaactagaaggcgctgtcagaggctggagtagtgggatagacacactatacgtagtaacaggtgcgatgcctactacggcaactgataagcaaatacaatatgctaaagataataatggaaaaaatatagcaatacccaaatattacttcaaagcattagcccgtaaagtaggtggaaactatcagacaatcgcttttaaacttgaccataaggcatatagcgatacacaatatatgaaatatgctatcagcgtatcagaacttgagaatatgacagggttcactttctttccatcattaccttctgaggtaaaaaagacgctaaatacatcgcaatggaattaaatctatctgatacagaatctacaaactttctaaataaattagtatgaaaatctcgaatctactgtacatgggggcattatcaaccctagctctaatgagttgtacaaacaatgacgacaacagcgaatggtacggaagtgaaggcatcgtatttaccacagctattcaatcaagagtttcaggtaacacttggaatgcaaacgacgaagtaggtatttacatgatgaacgcaggaagtggaattgaggctgcaaccgcacaaaacaaaaagtacattgcacagaccaacggcacattgacggctgctccaggtaatggcatttatctccctgaaagcggaaatgtagacttcattgcatattatccctataccacaagtgtaagcggcaataagcttgcggtaaatgtatccgaccagagcaatccggctgctatcgacttgatttattctaacggtactaaaggagtagcagcaactactgccaccactattagtctgggatttacacaccaactgactaaagtcaccctgaatgtaaccaaagatgaaacaattgaaactcttaacggattgggtgtaaacattaagggtatcagcacagaaggtgaatttaacttggctgacggaacactgactgctacagcaggaaccaacaataaagatgtagcgatgtacatagatgcacaaggtacaacagctacggctacagccatcattctcccaacagctgcaagcaccgaccagacgtcactcaacctgacttttaacctcaacggtcaatcattcacccatacaattagtgacgcaagtatttttgaaaaaggaacaaatgtaagctttaatgcaaaactatccatcaacaatgggaaaccggttgttacagtaggaaatgcaacaatcagcaactggactgaaaaaccaggtggagatattaatgttgatttcgatggtggaactcaaccaggtggagaaactgtggtctttgaagaatcattcgctaccagccagggcaacttcgaaatagacaacaagcaactccctgaaggtggaacattcgtttggaaacacgatgctgggactcctgaaggaggaagtccatattattatatgaaagccagcgcatttatcaataaagccgcaaaagcatcagaaagctggctgatatctcctgaagtagacttatctacagctacaaatgcaactttaaccttcatgcatatcattaaccatgcaggtgacatgcaaactcaacaaactttgtgggtaaccgaaacatctactgaaaactggcaacaagtaacaattccaaactatccagctggaaataactggaacgaagtttcttcaggaaatattgacttatccgcttatgccggtaaaaaaatcaagtttgcattcaaatatgtaagtaccacagcagctgctgcaacatgggaagtatatgatgtgaaagtcgttgccaatggagaaggaggaggcactgttgatccagagccggaaccaggcacagctgaaaccatattcttagaaacatgtggtcaaactaatgttggcagtactaaatataaaattaatgactatacaggatgggataacaatgaaacacttactttcagagacgaattcgctggagaattccaaaatgcagatgtcagagctacttcaactttagataataatgtttggttaccagcttatacccaatcaatagaaaaaccagcaggcctcaagatttctggattcaatgtttctaactacacaagtttatcattagaatatgacattgcggctaatgtaactccagcaaatcaaaatataatcaaagtaagaacagataaaggaaatctaacaattgaaagtaaagaatttgcagctaacaataaatatcaaactgtaactgtaagtttacctgatgatattacctatattgagtttgtttctgatgcagataatacagttggatttagattagataatatcaaactaacaggtatatctaagtaatacaattttactcctaatcccacaagagaacatgaaaaagctctataaaactttttcatgttctctttcaaccccttataaaataacactaaactaacaattattttttatgaaacacaaattactgttcttcatggcattcttccttccttgccttgtttttgcacaaggaaatgtaagcgtgaaaggaagtgtgatcggagcagtaagcaatgaccctattccaggtgtaattgtgacggtgacagaactgaaccgccaagtcacaaccgacgcggacggaattttcaccatccgaaatattcagccgggaacttacgtcattcagcttaactccgtaatgattacgcccaagagtgtctccattgaagtagaaaacttaggcgtaactgaactaaaacctatccgagtaactgaacttaacgcaaacgaagacgtgtccatgattggtatcattgatgccggtatggtggatgatgacgtggaaacctccgggcaggatgtcagctctaccgtgattctgtcaaatgatattttcctgaataaagctgcctatcaactttcacccgcacgcttctctccacgtggatacaatagcacacaggaagtaaaatacatcaatggcgtagaattcaacgaccagaacagaggtgtattcaactatgcggcagtaggtgcactgaacgacatgacacgtaacggtgatgtcaccaacttcacagctccttcgtcctttacttttggtgagttgggaggtacggaaaacatcaacatgcgtgccagcagctatacacctggaggaaagttaaccttaagctataccaaccgaaactattatctccgtggtatgtttacctactctaccggactgaaggacaacggatgggcattcaccacctctattggtggacgctattcgaatgaaggtaacatcgacggaactttctacaagaacgtttctttcgccttctctgctgaaaagcaatggaaaggaggagaacatagtctgtcaatggtagctttcgtatcaccggtacagcgtgggcagcaaggtagttcttaccgcgaagtgtatgaactgacaggaaactacctttacaacccgaactggggataccagaacggagagaaaagaaatgcaaaggtggttacggcattcgacccgactgccatcatttcgcacatctggaaaatcaacgacaatataacgctgactacaggtgtaggagcacattatgcccgctacggtaatacggccctgaactggtacaatgctcctgaccctcgcccggattactaccgctacctgccttcgtattttgaagatgaaatggtacaactaagatacaaagagttgtggcgtactaaccagaccagctttacacaaatcaactgggatgacctctacctggctaatgccaacaacattcgtaatggtaacggagcagctgtttacatgctggaagaacgtcgcagtgacctgttggaaacttcattcaactctactttgaacgcacgcatgagccgtcatttcgacatcacagccggagtcggtgcacgctacactcagtcacgccagttcaagaccgtggccgacctgctgggagcagaatatgtgctggatattgataagtttgcagaacaagacttctctggtgatccggacaaaattcagaacgacttgaaccgcccgcagagaaaagtatacgaagaaggaattttcggttacaactataacctgaacatttattcactgaatgcctgggtcgtgaatcagtatcattcacgttattgggattactattacggaatgaagctgacttacaccagcttccagcgtgatggtaaaatgcgtaacggacgttatccggacagttctttcggcaaaggtgcgcgccatcagttcacagacttaatggtaaagggaggactgacctacaagttcaacggacgtcacatgattaacgccaacatcagttatggtagtgaagctccgttgcccaacgaagcatacgtatcaccgcgtatcacagaccgtaccattgatgacatgaagagtggacgggttctctctgccgacatcaactacatcttctctactcctcacctggccggacgtatcggagtattccagactaatttctatgaccagatggaacgtagcagctactatgacggcattgaaggaacatttatcaaccacgtgttgtatggagtaaaccgcattcacagaggtattgagctgggagctacttacaaactggatgaccattggagcttcgacctggccggaaccgtaggtgaatattattacagcaacaaccctgacggtatcaagaactctgaaaacggaaagatagtagaaagagaacaagtatacatgaaggatgtttacgtaggtggagttccacagattgccggtacattcggaatccgttacttcatcaaatactggttcctgggagccaacctgaacggatttgcacgcaactacatcgaagctgctcccctccgccgtctggcttcaagctacacagaagtaactccgtataaccagtattacgatgccttcaagcagttgaccacacaagaacgtttcccggcagcctatacattagacttgtctatcggaaaaattttctacttgcctggaagacaatctatcaacttcaatctttctctgaacaatgtattgaacaagaaagatatttgtaccggaggatacgaacagggacgatttgaccttgaccatccggaacgctttggaggaaaatactactacatgcagggcatcaactgtttcctgaatgtgagctaccgtttttaatcattaacctacataaaactcagaatatatgaaacttttaagaaatatcagtctgccactcattgcctcactcgctctctttgcatgtgaacgagactatgatgctcctctcttgacagaacctgaatacacaggtccagcagccaatatcacgatttcagaattgcgtacacagaatgcagcagctactcaggacgttcctatcatcatcacgcaagaccaggtactcaaagccgtcatcacaggtaacgatgaatcaggaaacatcttcaagaaaatctacttgcaggatgaaacgggtgccattgaaatggaagtagaccaaagcagtgtgtacaactattatccggtaggtcagactgtatatgtagacctgaacggattgagcatttctgtatacggtgacgaacaacagctaggacatccagaaggatatttattccgcacaccgtgggaagatttcgaaaaacatgtcagcaaagacggatgggctaatccagaaaatgccaagcctgttgtaattgatgacatcagtaccatcaacgctgctcccgataactataaattcaaattagtgcaatttaccggagttactttccagaacggtggtaagggtatctttgctccagaagatggttatggtgaagaaaatattaccgacagtcatggaaatactatcatgattcgtaccagcaattatgccagctttgcaggtaataaacttccagaaggaaaaggtaatgtaacaggtatcttaggaagattcagaggtacttggcagcttactttacgcactgctaatgacgtaagcgactttaccggaagcaatgaagaaggtggaaatgaaggtggagaaactccaagtggtgaaaccgttttattccaagaatcttttggaactccagagaagagcggaacctactggccatatttcagtgattatactggatttgataatcctgccagcatgtttgagaacacatctgaagaaaaagcatctgtacgtattgtaagtaatcttacgaatgtctggttccctggaacaaaagatgtagcaattgctatcaaaaatatcaatgcacaaggtaatacatctgctactttagaatatcaagtaggctccaatgtatacaaagcaggagaaaaacaagatttaaaaaccttgagagtaaaatgcaatggacaagaattaagtattccaagcaaagaagttaccggtgatgctcaacaaggaaatactcctttcaaaatgacgattgaaaatgtaacaatatccgacaatacaactttagagttctattgtacaacctcagaaaacacttatggtttacgcttatacagcgtcaaactctatgttccaggaggtggaagtggcagcaccggtggtggcggaggtacaaccattgaacccactccaagcaattaatgcacacatcaaaccatgaaagttatgaataaacgattgcttattttcactttgttcattacttgtgtatataccaccagtctgtttgcacaagacagactgggtgtttatgcagccgcattctataatttagaaaacctttgggatacggtggacgaccctaacaacgaaggggatgatgatttcactccggaaggaaagtatgaatggacccagaccaagtatgaacaaaagttacagaatattgccaaggtaatctcacaattgggaagagattattgtccggcaggccctgctatcatcggtatctcagaagtggaaaaccggaaagtattggaagacctgacaaaaacagctcccatcagtggaacgggatatgaaatcgtacatttcgaatcgcccgaccacagaggtatcgacgtagcagccttgtacaacccgaaactgttcaagctgattgatgccagaacctatcctttcaacaagccggatatgccgcactataaaacccgcgacattctgctggtaagtggtatactggccggggaaccgtttcacctgattgtaaatcactggccttcacgctacggtggttccgcttcttctccactaagagaatttgctgccagcatcgtgaaacacattggcgattctatccatgcacagaacccggaagcaaaagtgctcattgtgggtgacttgaatgatgacccgttcaacaagagctgtagcgaggtactgggcgctaaaaagaacatcaaggaggtaaaacctgacggatattacaatgctacctggaaattgtacgatcagggtatcggttctctctgctaccagaaccaatggaatttgttcgaccagcagattatatcaggcaacctgattggtaaagaccgcagcacattgaaattctggaagagcgaagtattcaaccgtccattcctacttcaaaaggaaggaaaatacaaagggtatccacttcgtacattctcgggtactacattccagaatggattcagcgaccacttgccgaccctcacctattttgtcaaggtaatgaagtaagaaaaaacatatctcttataaagaaagccgttccgtccacacaatcggaacggctttcttatttcatttaaaacctcttcaaataccctttaaactactacgtagtagttcctccgttacctcgtagtaacagaccgactactacgcggtaattcattcattactacgtagcaaaatttcctccaaatcctccggcacatagaccttaccgttaaactgcaaagccgcttctgccgtataacgcgccttgcgggtggacagtgtcttgtcctccgtgtgatacagcaacagattcttcactccaagctgagctgctaaccgtccggcatccaaagccgtgctatgatgcttctcgtagggtttgaaccgttcccggtcttcatacaagcagaacgcctcacacagcagccagtcggctccttccacatacatctggttgcatgcgttataaggttcatcacccaaacaaaccagcgattgtccatcaggaagacaggtacggaaaccaaactgtttctcctttgtagaagcgatgtcaaagcattccacttccaggccgatggcctgaaatttttctccgctcttcacctcacacaacagtatctcttctcctaagcgtgccacaatcttcttgggtaaagtcatccggcaaatccagtcgagcacctgtaccactttgtcatgcccatatatgcgcagttcgccctggtactctcctttctgaatagcctgagccaccatgcgaatcatccatatcacacccagtatatggtcggtgtgtgcatgcgtcacaaatatctcatgaatgcccgacaaggggatatgtgctttctgcaactgcgacagaatgccattgcctcctccggcatccactaaaaagtatttatcctcccggcacaaggcaaaacaggtattatagcaggctacggtggccgcatttcccgtacctaacatgataagcttcatcgaattttccatacaatgtatccttttaaacacggcacaaagatacaaatttcctgcttttatttttttaacacataaggattcttaccactatccccctcttccctcaaaataaggcaccgagattccaacgtaaacataaaatacaataagccccttgcaggaaacttttcctattcctcacgtaagatattgaaaattcgatttttcgggttgttgtacttttgccaataagcctgcacgggaaattaccttttatacatattgtatgaactacaaaaacgccacatcacgatattgtatcaaataagatatttaccctattgaacaataaggttttacaacccacaaagcccctattgcatatatcaataaaaaaaacgtcctttgcggtgtagacagaaaaatgcttatggaatacactgaacaattagccaataatcacatctcagtagactgcgtggtcatcggattcgatggagagaaactaaaggtgttgctcgtaaaaagaatgggggaagaaagtggagaagttttccacgatatgaaactccccgggagccttatctatatggatgaggacttggatgatgcagccaaacgagtgcttcgtgatttgactggactcaagaacgtagacctgatgcagttcaaggcgttcggttcaaaagaccgtaccaagaatcccaaagatgttcactggctggaaagagccgaaaaggccaaagtggaacgaatcgtaaccatcgcctactttgccatggtaaaaatagacaagactctcaacaagaacttggatgaatacaaggcagaatgggtggcattggaagaagtgaaggacctggcattcgaccacaatctgattattgcagaagccatgaagtttatccggcagcacatcgaattcaacccgtcatgcatcttcgaactgcttcctcggaagtttaccgccctgcaactgcgcatgctgtatgaggtgatttacggcaaggcattggatgtacgcaacttccataagaagatttccatgatggaatacatcgtgcctacggaagaatacgaacagggagtatctcaccgggccgcaaggtattaccggtttgaccggaaaatctacaacaagacaagaagataattttaaaagactatataacgatgtacgtattaggttatgacataggaagctcgtcagtaaaggcgagtctggtcaatgtagaaagcggaaaatgtgccgcatctgcctttttcccgaaaacagaagcgcctatcctcgctgtcaaacagggatgggctgaacaggacccgcagagctggtgggataatttgaaactggctacacaagccgttctcactgcttctggtgcaaaagcagaagaaatcaaggctatcggtatttcttatcagatgcacggtctggtctgcgtagacaagaaccagcaggtgctccgtccttctattatatggtgtgactccagagctgtaccttacggtcagaaagcatttcagacattgggagaagcgcagtgcttgtcacacttgttgaactcaccgggcaacttcacggcttccaaactggcttgggtaaaggaaaatgagccggaggtttatgaacatatctataaggtgatgcttccgggtgactatatcgccatgcgactgacaggagaaatctgcacgacagtttccggattgtcggaaggtatgttctgggatttcaaggaaaacaaagtagctgatttcttactggattattacggtatcgacgcatccttgctggctgacatccgtccgactttctctgaacagggaaaggtaacggaaaaagtagctgccgagttagggctgaaagctggtactccggtgacttaccgcgccggtgaccaaccgaacaacgctctttcgctgaatgtattcaatccgggtgaaattgcttctacagccgggacttccggagtggtatacggagtgaacggtagtgtcaactatgacccgaagtcacgcgtcaatacatttgcccatgtgaaccacactgcttcacagactcgtctgggcgtattgctctgcatcaacggtacgggtatcctcaattcgtggatgaaacgcacattggcttccgacctcagctatgcagaaatgaacgaggttgccgctcaggcacctatcggtgctgccggcatcagcatccttccgtttggtaacggagctgaacgtatgttgcagaatcaggaaaccggatgttctattcagggtgtcaacttcaacctgcataaccgcagccacctgcttcgtgccgctcaagaaggtattgtattctccttccgctacggtatcgacatcatgaagggtatgggaatggatgtacggaagattcacgccggacatgccaacatgttcctgagtccgttgttccgcgacacgctggccggagtcacaggtgctactatcgaactctatgacacagacggttcagtaggagctgccaagggagccggaatgggtgcaggcatctaccgcgacaatgtggaagcttttgctactctcgacaaactggctgtcattgaaccgaaggctgccgacgaaaccgcatacgccgacgcatacgcacgttggaaagaatgtctcgaaaaatcaacaaacaattaaatataacaattcattaacttataaaacaaagatattatggcaacaaaagagtactttccgggtattggaaaaatcaaatttgaaggtgtagagagcaaaaacccgatggctttccgttattatgatgcagaaaaagtcatcctgggcaaaccgatgaaagaatggttgaaattcgctatggcatggtggcacacattgtgcgctgaaggtggcgaccagttcggtggcggaacaaaaagcttcccatggaaaggaaatcctgacaaagtacaggctgcaaaagataaagtagatgcaggttttgaattcatgcagaaaatcggtatcgaatactactgcttccacgatgtagacttgtgcgacgaagcagctactatcgaagaatacgaagctaacctgaaagaagtagtagcttacctgaaacagaaacaggctgaaactggtatcaaactgttgtggggtactgctaacgtattcggtcatgcacgttatatgaacggtgcagctactaaccctgactttgatgtagtagctcgtgctgccgtacagattaagaacgccatcgatgctactatcgaactgggcggtacaaactacgtattctggggtggccgtgaaggttacatgtcactgctgaacactgaccagaaacgtgaaaaagaacacttggctcagatgttgaaactggctcgtgactatgcacgcagcaaaggtttccagggtactttcctgattgaaccgaaaccgatggaaccaagcaagcaccagtacgacgtagatactgaaactgttatcggcttcctgaaagcacacggtctggacaaggacttcaaggtaaatatcgaagtaaaccacgctactttggctggtcacacatttgaacacgaactggcagtagctgtagacaacaacatgctgggttctatcgacgctaaccgtggtgactaccagaacggatgggatactgaccagttccctatcgacaactatgaactgattcaggctatgatgcagattatccgtggtggtggtctgggcaacggtggtacaaacttcgatgcgaagactcgtcgtaactctactgacctggaagacatcttcatcgctcacatcgctggtatggatgccatggcacgtgctttggaaaatgcagcacgtctgctggaagaatctccttacaagaaaatgctggctgaccgctacgcttcattcgacaacggaaaaggtaaagaatttgaagaaggcaagctgacactggaagatgtagtagcttacgcgaagactgtaggtgaaccgaaacagaccagtggaaaacaagaactgtatgaggctattgtaaatatgtattgctaatacgctgatttatcagtatccgaccggcatgcccgtcggcgaaagtctctttcccgaccggatatgccggtttttattttccataaaaaacctattatcatgaattacacagaaaaaggaagcagaagttatctgttttccatcgtactggtagccgttttaggaggattgctgttcggctacgataccgctgttatttcaggagcggaaaagggtcttcaggctttcttcatgggagcagacgatttcatctatacagatacctggcacggtatcacttcttcgagcgcccttttaggctgtattatcggtagtgctttatcaggattttttgcttcccgtttcggaagaaagctttctttgctgatagccggcgtcatgttctttttatctgcattaggctcatactatccggaatttttgatatttccgtacggggaaccctcctattcgcttctgttggcgttcaatttttaccgcgtcataggcggtgtaggtgtgggactggcttctgccatctgtccgatgtatattgccgaaatcgctccgagcagtatccgcggtacattggtttcctggaaccagtttgccatcatcttcggtcagctggtagtctattttgtcaacttcctcatcttgggagaccatctgaatccggtagtagagatagtggatggtgtcaaccgcatcatgaatccggaagctgctgcctggagtactgaaaccggatggcgactgatgtttgtcagtgaagccgttcctgccggattgtttacccttttagttttgtttgttccggaaacacctcgctacctggccatgaccggtcgtgacgaaaaagccctgtttgtattaagccgtatcaacggtctgtcacaaggaaaagagattctacaggaaatcaaggctactgcccatgaaaagacagaaaaactgttcacttacggctggatggttatttttatcggtatcatgctgagtgtattccagcaggcagtaggtattaacgccgtactttattttgcaccgcgtattttcgaaagcatgggcatgggcaatccgatggtacaaacggtattcatgggaattgtcaacatcctgttcactttgttagctgtctttactgtagaaaagtggggacgcaagcctctgctcatttacggttccattggtatggccatcggtgcactcggagtagccctcagcaatgccgtgactggcatcagccctatggtacccgtcatcagcatcatggtctacagtgcatcgttcatgttcagctggggtcccatctgctgggtgctcatcgccgaaatattccccaataccatccgtggtgcagccgtagccatcgctgtcgctttccaatggatattcaatttcatcgtctcatctaccttcctgcccatgtacaacatgagtgccggtgatatgggcgacaagtttggccacatgtttgtatacgggctctatggagctatctgcatcattgcagctatctttgtatggaaattagtaccggaaacaaaaggtaaaaccctggaagacatgacacgtttgtggaaagagcggaaaaaataaagaggataacccaaaaaggcttgcagaaattctgaaagccttttttatactgattctcattaggatggtctacataaaacagacgggtcaacgtaataatctgaggggtaaatccgataaatttatatctttgccggaaagaaaatcagcaaaagttatggaaaccag

SEQ ID NO: 3806 - DNA, 1426 bp, Unknown
  gut microbiota DNA sequence
gggtcaacgtaaaaacctgagggatttattgtttaggcataaattttagtcagtctgtacaaaaagaatgccttgtctttaactcccctgaactgcgcacgaaagttctttattttagcattaaaggattcagatgcagcgtttgtggaacgcttttcaaagaagtttatgatttccagataatgtgtctgtatggatcttgccactcttccaaaggcaaggaagcctgatttgtctacttcatcataccaccttgcaagtcttgtcaatgccacgtccttatgtctgcactgatggtaaatcaatcccagtctcatggaaagatagtatgctttctttatatcaggatactctctgaagagaataccggcacgcacgcgctgtgattcagtccataaggattcttttttgtagagaagatagatgcttctggccagcagctgttttcttgaatccccgttttcaaataccggagcatgatatatctttccgcatgccctggcatgtgccatctgtatggattcctcatccagggcttcccagcgtgccttcaccctcatttcctgaaccgcttcataagccagtttctgcacgtggaaacggtccgtcacgcggcgcgcggccgggaagcagatacgtgccgtctgttccatgttcggagccatgtcaagggttatttccctgacctggaagcgtctgcgtctggaaagctttagcaggacggatgtgacagtcctgacgtccgtaccctttatgattgcaatgatacttcccgaacgtcctcttttctccttgtttatcaggattgtatagagttcgccctgtgacaggctgacttcatcaatgcctacatacgggccgatgttcttttcgaagagtacccattcttccgcatgggacagctggttccagctcatgtaaccgctcagatgattgcggtactgacgctcaagaagttcaccgttcaccccgaagagaaggcctagaagcttgcagcttacaggaagggtatcaatatagttcttttaaaaaagacgcaaaatcatgcgttatgcggctgccttctgcaaccagtttccagttacggctcacatagcgtccctcatcctttacaatccatcggcgacggcggatattcaggaaaagcttcttgccacgaatcgggaaatcctgaactactaccggttcataaaagcctttgctttccacctgcatgcttgagtattcaccgggaacttcgttcttctcttccaggtaaatcactatttccgtactgctttcctttacatccgaaatgatgaaataatccaatgtcccttcaggaagaaggagacggtaaccgctggtttccataacttttgctgattttctttccggcaaagatataaatttatcggatttacccctcagattattacgttgaccc

SEQ ID NO: 3807 - DNA, 21880 bp, Unknown
  gut microbiota DNA sequence
aactgccatttctcggcaaaagcctttgccttttctaccgtgcgcgaagccacggcatagcgtttcacccctttcattcctccaagcgtggctgccatttttgccgcaatgctaccacatccgatgattccaatattgtaaattttcattttgaattaaagattaaaaacagcaggtacaaatctataaaagtttcaggagggaaccagctatgtgaggggctttttgtaactttgcaatatgaaaaaattcgtggatgtcataatacccctgcctattgccagccagtacacgtattcgcttccggaaggtatggaagcaagcatacagcctggctgccggatcattgtgcctttcggtcctaaaaaattttatacgggcattgtcaccaaggtacacgaaacggctccggaggcgtatgaaaccaaagacatctcggaagtgctcgattcacgtccggttttgttaggacagcagttttctttctggaaatggctggccgactattacctctgcacgttgggagacgtgtacaaggcagcccttccttcgggtatgaaactggaaagcgaaacactggtggaatacaatccggactttgtagcctcggaaccgctccctcctcgggagcagcgtattctggacttgctcagtgcggacccggagcaatgtgtcacccaactggagaaggccagcggcatgaagaatttgttgccggtcatcaaatcgctgctggagaaagaggctatctgcatcaaggaagaaatcaaacgaagctataaaccgcgtacggaagtacgggtccgactgacagaagcgttgcagaacgaacatcacctgcacattcagtttgatttactggcacgggcccccaagcaacaagccatcctgatgaaataccttgaattgtcgggatggaatgccgaagggaaaaatatccgggaagtcagcaagaaggagctgctcgatgcctccggacaggcgcaatccgtcttcaagaacttagtagacaaacaaatactggagacgtacctgcatgagattggccgacttacgggagaccatgcggaaacagttccgctacacaccctgagccccgcacagcaacgggcgttttatgaaatcctgacttccttccagaccaagaacgtatgcctgctccacggcgtgacggccagcggaaagacggaaatctatatccatctgatagaagaagtgctgaaagctggcaagcaggtgctctatcttcttccggaaattgccctaacgacccagattaccgaacggttacgaagggtattcggcaaacgcttaggagtatatcactccaagtttccggatgcggaacgggtggaaatctggcaaaaacaactgactgaacaaggttacgacgtgatattgggagtccgttcctcggtattccttccgttccggcgactgggactggtcatcgtggacgaggaacatgaaacgagctacaagcagcaggaccctgctccacgctatcatgcacggaatgccgctatcatgctggcttccatgtatggggccaaaaccctgttaggtacagccactcccagcctggagagttattaccatgcccgaaacgggaaatatggtctggtggaactgaccgaacgccatcagcagattcagttgccacacattgagttagtggacatcaaggaactggcccgtaagaaacggatgacggcacagttctctccacttttactacagaaaatacgggaagcactggagcagaaggaacaggtcatcttgttccagaaccgacggggttttgctccgatgattgaatgccgcacctgcggatgggtaccgcgctgcaagaactgcgatgtgagtctgacctatcacaaagggcttcatcagctgacgtgtcactattgcggctatacctatgccgtgcctacagcttgtccggcttgtggaggagtggaacttatgaaccgcggattcggcacggaaaagattgaagacgacatcaagcagatttttccggaagccaaagtggcccgaatggacttggataccacccgtacccgcacggcctatgagcgtatcatcaacgactttgaagaggggaagacggatattctgattggcacgcagatgatttccaaaggactggacttcgaccgggtaagcgtggtaggtatcctgaatgccgactcgatgatgaattatcctgatttccgctcgtacgaacgggcgttccagctcatggcacaagtggccggaagagccggacgaaagaacaagcagggactggtggtgcttcagacgaagtcgccggagaatccgctcattcatcagattatggccaacgattatgcccgtttgtatcaggagcagatggaagaacgtagcctgttcaaataccctcccttctaccggctgatttatgtatatttgaagcaccgtaaggaggacatcctgaatcaggcagccgacctgatggccgctcacctgcgacaaggcatgggcgaacggatattaggtccggacaaaccacccgtggcacggatacaatcgcttttcatccggaagattgtcatcaagatagagcaggaagcttccatgagcaaggtacgccgctacctgacgcaggtacaacgcaccctcatagaagatgagcgcttccgctcactgatggtatattatgatgtagaccctacctaaaccctatacacatgaagatagaattagatgtacatacgcacaccattgccagcggacatgctttcagtagtctgcaggaaatggcacgggcagctgccgacagaggcctgaagttgctcggcatcacggaacatacaccgggaattcccggaagctgtcacctgatttacttccgcaacctgcacgtggtaccgcggcagatgtacggtatcgagctcctgcttggggcggaaatcaatatccttgatacacaaggcacacttgatctggatgaatttcacatgagcttgctggatttgcgaatcgcaggtattcattccctgtgctacacgccgggaactcccgaagaaaatacacaagggatgataaaagccatcgaaaacccttacacgcacatcatcagccacccgggtgacggtacggccaaactgctttttgaaccgattgtgcaggctgcaaaagcccatcacaccctgttggaaatcaacaacagctccttgaagccttgccgcaacaaagtggaggcacggcccaacaacttagagatactccgtctctgcaagcaatatgaggtgcccgtcatcctgggaagtgatgcacacatctcattcgacattgcgacttacgaccatgccctggagctggtcaaagaaaccgagtttcccgaaagcctcatcctgaatacggatgtagcacgttttaaacagtatttacaccttgataaatgatgaaacaaagaatattattcgtctgcctcggcaacatctgccgctcctcttctgccgaagaaatcatgcgtacgctggtgcgccgggcaggaagagaaaaagagtttgaaattgattccgcaggcatcagcggtttccatgaaggagaactgcccgatgaacgtatgcgggctcacgccagccgcagaggctaccagctgacccaccgctcgcgtccggtacgcacggaagatttctatcacttcgactggattttaggtatggacgaccgcaatatcgatgccctgcgcgacaaagcgcccgacgtggaaagcgaacagaagattcaccgcatgactgatttctgccgtaccaaggtaatcgactatgtgcctgacccctattatggtggcgctcaaggcttcgaaaatgtgctcgacatactggaggatgcgtgtgaaggactattggcgcatctgtccgacgaaaagaaataacttgaaacttattaaacccaataccatgagtcaaaccattgcaccttttgcccgtccgctatacgtaatgacaaaacccgtaggggcagtctgcaatttagcttgcgactattgctactacctggaaaaggcaaatttatacaaagacatctccaagcacgtgatgagcgacgagctgttagagaaatttatccgcgaatacatcggctcgcaaaccatgccgcaggtactctttacctggcacggcggagaaacactgatgcgtccgctcagcttctacaagcgagtaatggaactacaacagaaatatgccgggggacgtaccatcgacaactgtatccagaccaacggtaccttgctgacggatgagtggtgcgaattcttcaaaaagaacacctggctggtaggcgtgtccatcgacgggccacaggagttccacgatgaataccgcaagaaccgtcagggacgtccgtcgttcaccaaggtaatgcaaggcatccacttgctgaaaaaacacggggtagaatggaatgccctggccgtagtgaatgacttcaacgcagactatccgctggacttctatcatttcttcaaggaaattgactgccactacatccagtttaccccgattgtagagcgtatcagcccccatgccgacggccgtcacctggccagtccgctacagaaagacgagaaattagccgatttctccgtatcaccggaacaatggggaaacttcctctgcaccttgtttgacgaatgggtacgccaggatgtaggaaatttcttcatccagttgttcgactctaccctggccaactgggtaggtgcgcagccgggcgtctgcaccatggccaagacttgcggacatgccggcgtcatggaattcaacggcgacgtatattcgtgcgaccactttgtatttccggaatacaagctgggcaacattcatgaaaagacactggtggaaatgatgtacagcgaacgcctgatgaagttcggacaaatgaaacaagactcccttccccgccagtgcaaggaatgtgagttcctctttgcctgcaacggtgaatgcccgaaaaaccgtttcgcccgcacagccgacggtgagccgggactgaactacctgtgcaagggataccatcagttcttccaacacgtagccccctacatggattatatgaaaaaagaactgctggccgaacgtgctccggccaacatcatggaagctataaaaaaaggagagctctaaagccctcctttttttatagttgcctgaagatatcacctcaatcgttcttcaacaacacattctgaatagcctccttcaggttcttcttaggcaaggctccctgtgccatctgtggagtgccgttcatcggcacaaacaacagggaaggcacactgcggataccaaacaaggctgccagttcttcctcttcgtctacattcaccttatagatgtctacctgtccggcatattcatcggccagctcatccaataccggagccagcatcttgcacggaccacaccaggtggcataaaaatcaatcaaggccggacgctcacccaggaatttccattcgttcggattcgcttcataatttgctactcttgtcaaaaaatctgctttggttaaatgtactgcactcatattcttctgtttttaaatttttacttactttcttttgttgcctgataaggtttcacaaaatccttatacaatgctttgttcccggacgaggtgccgcatcctcctgccgcacagcaggaccagttcaccatagccatcagcatcaacaacccgcccaatactatcatcagggagtctgaagcatagatgccataagcggcaaacactgctcccgaaaggaggcgtatcacccggagaacatcccaattacgaaataaccttttcattgtcaacaccttttttgtttgtttctgatgcaaatgtagatggaaatgcgcaggggcacaacagattttatttatctttgtattgataaaatctattgaaccatgacattacagcagatggaatatatcgtggcactggacaagtaccgccactttgtgcttgcagccgaggcatgcggcgtgacacagcctaccctcagcgcgatgattcaaaagctggaagaagaactggatgtcaagattttcaaccgcgaccggaagaatatcacccctacccgcatcggcgaaaaaatcatccgtcaggcacagattgtgctgaatgaaacccagtgcataaaggaagtggtagccgacgaaacggacagcatgaacggtaacctgcgtatcggtattctgcccaccattgctccctacctcgtgcccgactttatccatcatttccggaaaacctacccgcacgtaagcctgttcattgatgagaaagaaaacaagtcattgctacaggagctgcactatggcaacctggacattatcctgaccaccccgccggaggacttgaacggcctgttagagattccggtctataccgagaagttcgtggcctacttttctgaagcatgcgaccaggccaaaagctgtatcgccaacggtacccttcctcccgaacaaatgtggattctgaaagaaggtcattgtgtacccaacggcggaatgaatttctgcaaaaacaaggacatcggcaatcacatctatgaggccggaagcatcgagaccctcataaaaatcgtggaccggaacggtggatataccatcatccccgaacttcatattgcgtcgctaaccgagaaacagaaagcccatgtcctgcctcttcaggcaaatcctccggcacaacgccacgtatccattcttatcaaagaagactttatccgcgaaagaatggtcaatgcggtcatagatactcttaaatccatcattcccgcttctatgttagaaaaacggctgtcttcacattccgtcagattacggcactcaaagagcgaatgaatgacaatatgtcacagaataagactttttgtctttatgatttaaatttaaagtgacaatttgttacaatctattccatcagacagctaatatagtttgcaaaggtttaaaaatcggcatagaaggtttaaaataaaggtactacattaaaaatggaagttacaacaacctccattcaagatttgtggtacactgtttgcaaaagagtaagtgaacttgaatttcaaaagggttcgggttcagaaacaaaattgattaacaactaaaaataggagattacaactatgatgccgactagaaaatattacaatcagaactggttaccaagtatctttaatgacttcttcgataacaactggatggaaaaagcaaacgctaccgcacctgcaatcaatgtggtggaaagcgacaaggattacaaagtagaagtagccgttccgggaatgactaaagaggatttcaatatccacttgggtgatgaaaacgaactggtcatctccatggaaaagaaagttgaaaacgaagacaaagaaaacaaaaaatacttacgacgtgagttctcttacaccaagttccaacagtcactttacttgcccgacaatgtcgataaagaaaagattactgccaatgtagcaaatggtgtattgactattgagctgccaaagtattctcaggaagaaaaagcaaaaattaatcgtgtgattgaaatacattaatcatcacaaataacggaaaactctcgtctgcatccattgtgggcgagagtttttattttggaactaacttaaaacgattgatatatggcatttattgattactataagattttgggagtagaccgtaatgccactcaggatgaaatcaagcaggcataccggaagctggccaagaaatatcatcctgacctgaacaaggatgacccgtcggcagaaggaaagttccagcaagtgaatgaagccaacgaagtattgagcgatccggaaaagcgtaagaaatacgacgaatatggcgaacactggaaacatgccgatgagtttaagcaggaacgtgaggcatacagcagggcacagcaacagcacggtggctccggctactggtactccatgaacgacggtgaatttacggaaggatttggaggaacaggggcaagcggcttctccgatttcttcgaacagcttttcggccacggaagaggtggacgaggaggataccacaccatgtcgaggggacaggatatagaagcacagatgcacttgtcgctcaatgaagcctacgtcacccacaaacagactttcagcatcaacggtgaaaatatccgtatcactgtgccggcaggtgtggccgacggacagaccatccgtctgaaaggctacggccagaaagccatgaacggaggagaaaacggagacttgtacatcacctttgtcatcgataaggatgataccttcgaacgtaagggagatgacctctacacccacgtcaatatcgacttgtacactgccgtactgggtggagaagtacaggtgaagaccatggacggaatggtcaaattgaaagtaaaaccgggtacacagaacgacacgaaggtccgtttgagaggaaaaggattcccggtgtacaaacagaccggccagttcggcgatatgattgtatcgtaccacatcaatatcccgacctccctgaccgaaaagcagaaggatttgttcaaccagctgcgcgctgccagctgataagatataagtaaccccgtaggaggtttccgcaaatgcggaggcctcctacgtttttttgtgtggctatacatagcaaaccttccctaaattatcaagttaaaactgcaatgataaagatgcgcaattccattttttatatcacataatatttcatatatttgcaattatacataaatatccctctttattttatgaatcgtatcaaacaaatacttgaagaaaagggaatcacgcaaatctggcaagatgagaaaatagatgaaagttttagccaaactaatgcgtatgtatgcaaccgtcgacaaccaaggatagaatggctatatgaaattgcttctttattggatgttgaaacgaaaaatttattagtcaataatcaagaaataaagaagtaatcaatgatagaagtcaatcagataatcaagaacttaatcccaacggaacctgtcaccatcatcaagttacagcctctcgggaatatgtattccattaaatacacaggagtaaatactcacaaaactagtaccaaagtaattagtaaagctcaatttgagtctttggaagtattgacagcagaaggcgaatttaattttaaaggagctccagagaagtttgtcatgtttgcagaagcagaacgcatccattcagcttatcagtttgacccattatttgccattaactgcagtgtggtcgaccctcttcctcatcaagttgaagcggtttacaaatacttattacctcagcccaaaattcgttttcttttggctgatgatacaggtgccgggaaaaccgtcatgacagggcttttactgaaagagctgattatgcgtggtatcattgaacgcattctgattgtaaccccaggtggtttgacaaaacaatggcaagaagatgaaatgggagtcaaattcaatatacctttcactttagtcaaccgcagtctgtttacagcagatcctaacattttccgtacagccaataaagtcgtcacatcgattgactttataagtcgggaagatatcttgtctgtggtcagcaatacaagttgggatatggtcatttttgatgaggcccataaattatcagcatacgaatacggacaaaaaacatacaaatccaaacgttatgaggcagcttatgtcttatcgcaacaatgcgaacacttacttttattaacagcgactcctcatcgtggaagaacagatacgtttaaaaagttactgcaattattggatgaagatatttttgctacagatgatgtagcttccgacagagtcaaagaattaagtaaagaagggttgaataaattcttcatccgacgtttaaaagaagacatgaaagattgggatggccatccattatacaaaaaccgttttacaaagaccatttcctaccaacttacacctgaagagaaatacctttacgaccaagtgactaactatctgactagacgaaaagaagaagctactgaagaaaaaaatattcatgtcagtttagcattagccgtcatgcaacgccgtttggtcagctccatttatgccattaaaaacacgctgtacaaacgttggaatgccttacaaggtattgttgatgaagtaaataagaatcctaacatatggaaacagcgtcagaaactagaactgattgatgtagacaatatagaccaatatgatgatttggaagatgacgaaaaagatgcactcgataacatcctttccgatccaaaaaaatttaagttattcacaacctccaaaagtctggcagaaatagccaatgaagcacaagaagttaaacgcctatacgacattaccaaccacctttataatcagaatcaagaagaaaagaagtacattcaactcaaagaattacttaaaagccaaggagtgattaatggacagaaactggtgatttttactgaacataaagatactcttacctatctacaagaacggctaaccaataatggatataaagtgtctgtcattcacggtggcctgtcggtggacgaacgccgggctgcccaatgggaatttatgtctccagaaactcaaattttgattgcgaccgatgctgcaggtgaaggtattaatctgcagttctgcagactactcatcaactgggatatcccctggaatccgaacaggttagagcaacgaatgggacgtattcatcgttacggtcaaaaagaagacgtgcttgtcttcaacttggtagcggacaatacccgcgaaggacaagtattagccaaactactcaataaactggatatcattcgggaaagcatgggggatgaccgtgtttacgatgtcattcaagatgtgctgaaagatgtcagtctggaagcaatcattgcctctgtgtttgacggaaaagaatcagacttagatcgcttcctggctcaaaacaaccaagagattgagaaagagttcaaatgtcagattgaagcacaacaaaaagctattgcccatagtccggtagattataaggatgccagacttttaaaagaagactctgatgaaaagcgtctgcagcctatctacattcaattattctttgaacggacattcaaatatttaggaggacgttacgaaaatgtacagaaaggaatttataaaattacaaccatccctgagattctcagcaagcagttaaaagaaaactataatatacttgccgataatctgaatcaactcttattttgtttcgacaaacaaatatttcttgattaccagaatacagccgctattttaggaaaagtacattacataaatcctggtaatgcattgttcgatgctctgacagattgtgtgcgtaaagacttcaaagaagaaatgctgaaaggaaccatattggtttcaccggaagatacggaagaatactttgcatttttcgtaaagaaccaaattactgataatcgtcctagtaaaggagatgatagcattgccaacgagcagttgagtttcatttttcagacagctgatggaacttatcacaatacttctcctgccaaattcctggaccttcatgctccatcgcaatttgccaaggaaatacttccacctgctactattcaaagtcaggaagtaatgagctgggctttcgaacatattacccttccattattcgaggaaaccaaagtaaaagtagaagaagatgtagccaagcggaaagaatatttgcaaacagctttcaaccagattattatggacttggatatcgccatcaatgatatgcagatgaaagtcttcatgggcgatgtaaaactacaagaaaaattatcgtacaagatggtacgtaaagctgaactgatgcaaagacgtgaagaacgcattgccgacatggaacaaatgatggagatatcacctaaagaacctgaaatcataggctgtgcttatgtcgttccactgacacaaatggaatacaaacaacatttccacatgacacgtgatgaggaagtggaagaaatcgcaatgcaagttgcaatgaattatgaaacaggccaggacagaactccggaggatgtttcccaccaaaatttaggctatgatataaaaagtatagataaattcgagctgaaacggtatattgaagtgaaaggacgtgccggtaccgatggagtcatgctgtcggaaaacgaatggaaccgcttggcacaattaggtgacaaagcatggctctatatagttataaactgcaaaaccgcgcctgaactttacagaatacagaaccccgccattcgtcttacctttgaaaaggtatcaaaaggagtacaatattacttgcctttaaaagaatggcaacagaaatatgaacaataaaaaaagactatcatgtatatcagtgaagacttacaacaagaacttgatttctttaaaagaactaatgagcattttgagattgaggctggaaaaagttccaccgaagtgaagaatgcaacgaatgagattctttacatggccatgtctgcatcattagtcatggattattcagaagatggtttctttgaaaatttcgtcatcaccgacaaaagtatttcaggacgttctgaattgcaaattgatgcgtatgctcttattgaaaccgaaagttcaaaagtaaaacagcttcatattttccaatacaagctatacgcaaacgattccaaaagcgcgtctcccgtggagttactcaattttgcgacttttgtgaacaataattttgtacacccggagtttctggaaaaaccttcggacaatgaagtagtagctgaaataaaaacaaaatgtgatgagtttctgaaaggaagaagagatcgtcgcatcatcgtatattgccattatatcaacaatgctacaggtatctatcgcaataatgaaaaagaaataaataatgtcttagcccgcttcaacgcagaccggcaattattaggattttccattcaggtatatggagtgaaagaaattttggaactggccagagaaggaaaaatccaagtaggaagtgaatccctagaattagttaatgaaggaatgtattcttaccgacttgaagataactccaaacgcgaaagtcttggattacctaagaaagtgattgtggggatgtgcaatgtcaatgaattcatccggctgcagaataaatatcaccacaaccaactgtatgcagaaaacatcagattatacctgggtgaccgcggaaatgttaacaaggatatcattgcaaccattaccagcagtgaaagtctttggtttccttatatgaacaacgggattagtatcatttgtgatgccttgaccattggcaacacaaatgcagcaaaacatgtgcaaacttttacgttggagaacatgcagattatcaatggatgccagacagtcaatgcgttatatagtgcaaaatacggtgaaaacacgcgggacaatttcaggccggccaatgttatggtgcgaatttatgaaattaatccgtcacagaccgacttcaaaatgaatatcatcaaagcaacaaataatcagaattctgtaaaaagttattctttgatggctaatgaccctatacaaatacgcattgctgaagtcctcaaaaagttcaacatcatttatgaccgaaaaggagaaggcaagaatatacaggggaatcaaatgattataagcatggtcaatgtagcattagcttacagagcagtttaccttttcatggcacgttcattacgctccggtttaggcaaatcacgtgtattccaaaagaccgaatatgataagatattcaatggcaacttgctggaagaagggaatgaaaaacaactggatgaattatgttttaaatttatcattgccaatggtatactcgatgccataagagagcaaatccaacaagataatgcaaagtatctggggaaactccctatcttcaaaaaaagtacctattacttggccggatatatgtatgcttctcggaaaacggatttcgatgctttacagaaaaatatgacagaagtcttccaatcagacaatgaacaaaaactgagaggaatgaattttccgaataaggtaaccgaaatcgtaaaaacgtactttgatgcaatggttaccagcttcatcgcattttataacaacttaaaggacattgacaaaacagacattgacaacctcctgaagaacaaatcttttgatgaagcctacaaaaaagaacttgaaacaatgattggtaaacttccggatatagaagattaattatgacaaaagcaaagaagctcatagaagtagcaatgccgattaaggaaatctcggcagaaagtgtacgcgacaaatctatccgtcatggacatatttccaccttgcatctgtggtgggcccgtcggccattgcctgtatgccgggcggtaatatttgcaagtctggtacccgatccgctggatccggagtgtccgcaagcattctgtgatgctgtgcaagacctgctggccaataatccgctttatgccccttatccagatattccctatacatctatctatgacccgatgcctgacaaccttcgcaaccgactgttgatgtttatcgggaagttttcacctgcctgcaaaaaaatatgctggccggaaaaacgactccttccaaggaccaagtgcaagaaggatgcctgataaaatgggaaagtaaaaacgaccctacagtgcttcgtctggctcgtttgctgatatgggtagcctacaattccgaactacgttctgaagccacatacacagacttggctgtagaatttgatgaagcttctaaagccatcacgaacgctgagactgcattgtatcacacgacaaaccgacatctcacttctccagaggtaacagccaaagaagccgccttacaaaaggctatcgagaaattccagaaccggatgcccagcgtattcgatccttttgccggtggtggcgccatacccttggaagcagcccgtttggggtgtcgttctttcggtaacgacatcaaccccgtagcgcatatcattgaaaaaggttcggtagagtttcctcaaaaatacggaaaacctatcacctacactcacgaggaatttatgactttatatggtaaagaaggagtaaagttgtataccgaaaattttggaggaatgcctacgggcaatgtagaaatacccaatagattgtctttcgatgtagaatattatgccaaaaagttactagccatgactgaggccgaagtggggcatctttatcctgcggacgaaaaagggaacaagcccatagcttattattggacacggacagctacgtgttctaatccttcttgcaaagcagaagtacctctgctaaagcagttttatttggcaaataccaaatcgaaaaaggtatacctgaatcctatcatccatggtactgatattcagttcgaaataaaagaaggaagttatgacgagaaagccttacccggatggaataaccgaggaaatatgacttgcccctgctgcggaaatatcacaccagtagatcaggttaaacaacaattcataaacaaatctacatctgaaaagctattagtacgcatttttgaatcaaaaacaggtaaagaatacaaacttgccaataatattgtttatgattttacagaaaacaataaggtcgaatatccatcagaaataatgcctatacattattcgcaagcttttccatcatgtacttggggattctcaaaatggggagatatatattcctcccgtcaattgtatatgctatctacattcataaaaaatttatccaaattaaaatccgaaataaacacatccgaatatcatcaagctctgctcactttccttgccatctggtttgaccgtatagccgtggcaaatacctcattaggcagatggcatataagcggagaaaaactagaacatcccttcagccgccaggccattgccatggttttcgattacccggaatccaaccctttctgcaacagttcgggtagtgccctcaaccaactggagtggataatccgttacatcgagtcggaaagcaattctccttttgctgcattgttagcaaatgcttccagtggagaaaaaggacaattcgctgccaagacactgactgctgtcgtaacagaccccccttattatgatgcaattggatatgcagactgctccgatttattctatgtttggatgaagcgcacattgggagacgtctaccccatcaactttgctactccccaaaccccaaaggcagaagagtgtacggcattgaaacaccatcaccacaatagtgaggcagaagccaaaaaacatttcgaaaacaaactgacggctatttttgatgccatcgaataccaaacttctgagattgtcagcattatgtttgcccatcaaagcaccgaagcttggacaacactttgcaattcaatattaggagcaagaatgaacattaccggcagttggcccatggatacagaattagtaaatagaagtagaggaatagggagtgcagccctcgaatcgtctgtaaccgtttcatgtcgcccgtctgaacgtaacggattcgaaagtttcaaacgagtgaaacgagccattgaaaccaaagtcacagaagaagtcaatgccctctacgaattggggtttcggggagcagacctcttgacagcctgctttggacaagctgtcagtgaatttgggaaatacgaaacagtagaaaaagcagatggtagcgaagtaaccgtaggtgagcttttagaattagcccggactgcggcatttaacgccttactaagcggttttgacggagatgaatatacccgtttctatatcggctggttacagatgaacggcatgggagatacagactttgacgatgcagccaaatttgcccgcgtgggaatgagcgtcaacattagtgacattttcgctcacaatctacttatccgtaccggtaacaaacaacatctggctacctacgccgaacgaacggtaaatgaaaaattaggtataagtgccagtgacccgctgatagaccaagtacaccgggccatggccaattggcgggatggcgaccgtggaaaaatccttcatcacatacatatagtaggaaaagaagccaacaatcctttctggcgtgtgttggcatccttgaaagaactgttgccggaaggagatgacttaacacaagtacaggagctaatttctaattcggccgacctgatacagcattgcggagaaatcatgacctacacccaaggcacattatttaattaacctgtcaataccaatagaattatagatatgaacgataagatacataaagccctcggcatctttctagatgccatgcgtccatttgtaataggtttcctgcaacaacattttccgaatgagccatgggaaggattatatttttccagattgaaagttcccaaacgggccacctggaatcaggctctgaaagcacaaggtgaaaatcaatcatgcatcagcctgattgattacaataacttaacggattttgcactcggttttaagcaagaactgggtatagaattcggaacgccggataaggcaaataagttcatcagttatctgcaagaactgaaagatatccgcaacaagtgtaaccattatcaagttttggataacgaagaaatagacggtgcttatctctatattaaacaggcagccaaactgatgaaaacggatgaactagtcagtgaaatagacaaaattaaggatcaagaacaaccaatggcacagcccgttcaagcaatggctcctccaatgcaaacaaccgtcgtaaccatgcgagaagatgctcctattcctgcatggttcactaacgtatatcctcattacgacattcgcaacggcgtactagatgaatcagtttttgcggccaatctgggagaagtagccttgggtatcggacaggaagtttataacaatccgacgatgttcttcgagaaaacctatatcactgccggacttcgggacattgccaaccgggtggttcgtgcattgaatggtgaagaaagtgagaaccgagtcatctcattgcaaacaggatttggtggtggtaaaacccacaccttgatctcattatatcatataaccaaagctggacgttcattattaaattctgcttatacagcccatctattaaatgaaaacatacgccctgaatacaatgacgcaaaggttgccgtctttaccaacaacacaaccgatgtcgcacaaggacgtactaccgaagaaggtataaccattcataccctatggggcgaattagcctatcaattaggaggagcagaaggctacaataaggtacgtgccaacgatgaaagtcggacagcaccttcttcttctatattcaagcctattctggctcaaaacacaccttctctaatccttattgatgagttggctgattactgtaataaagccaatggaataatggtaggtaaaggcaccctttatacacaaacagtaagttttctgcaaacactgaccgaatcagtcgctgcagtgcctcaatgtgtattgatagccactcttcctgccagtgcaacagaagtagcttcatcagaaattggccaacagatactctcttctttggagaaccgtattgtacgtgtgggtactggtatcaaaccagtagatgatgaagaaatattcgaagtggttcgccgtaggttatttgaaaatgtcggcaatccagatacaatagaacaagttctgacacggtacaaaaatacctaccacaaccgacgttccgacttaccagctgaagcagaccgcatagagtatatcaataaaatgcgtaaagcttacccattccaccccgaactaatagatatgttccgattaaaatggggaaatgaccctcattttcaacgcacacgaggcgtattacgtttgttagcctccattgtcaaggatttatggagtcgccgcggttctttaagcgggtcacaagctctgatacacacttcagatgtcaaccttgccaatttaccaactttaacaggaactatcaccagcctaataggcagccaatgggaaacggtgatgcatgccgatattataggcacctcaagcaatgcttataaaatagataacgaagacccacaaagcaatagctgtaaatacagtttggcacaaggaatagccactacactgttaatgagtagtataggtggatcgcagaacaaaggattaaacatagaacaattaaaactttgtatgcttcgcccatctgcattccagcatagcgaaatcaacaatgccctgaacaaattggagcaggttgcttattacctttattcaaccaatgttggagccaaaacttattggtttcaagcaaagcctaacattaatattctaattaatagtgccaaatcagaaatatcagcagccgatgtcaaagctgaaatactaaaacgtctaaataatcaaataaacagcaacggacaactgcgcatattaatcaacccatcaggtgatgttcccgagcagaaaacattgaccttagtcatattaagtccggactatgctacccaaatcaactcaattaacaagaaagttgaaaattatgtagaacagattgctactaaaaaaggaagcacacagcgcgttttccggaatacaatattctatctgacttgctctgaaagccagcttgggttattacaatctaaactgacagagtacttagcatgtgaaagagtacaacatgaatatagcggacaattggacacagaccaaaaaaaggatattattgacaagaagaatgatgcaaacgaacaagctaatacccagttgatttctgtgtataacatagctatgcgttactctgcaaccgatggtttagaagccttggaattacatgactttgcccgcgatatgcagacgcaaattacggacaaattaatggaagctatcattgaagaagaatggttgatacgctcgattggcattggaacattgaaagcaaaccgcttgtatcctactctcgaaaatcctattaatgtaacgacactgtatgaagcctttctgcaatatgatgacaaacctatgattacaggagcagatgctgtaaccagcaccatccaaaaatattgctacaacggtgaattcaatgtggctttcggagaagaaggaaattattcacgtatctatcatcgtgaaaacatctttggccttgatgtcactgaacgtcaatattggctgatagataagaacgtcatgcctcaagataaggtagaaacggaatctgaagataacaagacaaaatcagaaaacaattcccatacaccaccagataattctccgcataaaccggatgatgtttcatcacaaccagtacgtcattttaaatctatcaaaatttccggtaagattccagtagaccaatggactcaattattctctagtttcattgtgccactaaatcaaaacaatctagagattgaagtttcttttaaggctagttccactcttgctaaaccacttgacgaatcagctcagatttataaaatagtgaaggaatcagttcaacaattaggattaaaattagaagagatagaataataggaataaaatcagacatttagaatccatttaaaaggttactctttcagaatggattctatttttttctattgctgtccgataaaatcgattacatataaaaaatcccgctcgaccattgttatattcaatggtcgagtcttgttttgtcattctaagccccttcaaaagatagacagctgataatcttctttccgatctacgcttaagagcgtttcccagtctttcccgggtgattaaacagactgtagaagtccacataatacataagcgtaatccgtatcatggttgcaagtccggagaaactccatgaacgtatgagtttccttttcattatcataagcagcagattagctataagggtcacccaaatctgtttcttgatggcatttgcactttctccatagaagtatttcaaggggaagttctgctttatctgcttgaacaacagttctatctcccagcgtttacggtaaatttctataatctcgttcggatctgattccatgtcgttcgtgagcaatgaaaacagtttgtactttcgggtatcggcataagtaatgatacgggcatggtgagtcagggtttcgccacccttcagtacttttgagaacgtaacatgttgtatccgtacttccataaatccttctgtagtctggtacatgcactcctccagaacagagtatttcaggtttctcttcatttttgtcacatacagaactcctctcatcggagaaagtaataatctactgccttatggaacatccgtcagcgaatctaccttgaaatagggaactccacctatcaaatccgtcttactggcgaacattactataaccagctagacgaaaaccatcaccagcatgtatggctagccgatgccgaagcttcatacatcaaggacaaatggcggttttccatgactctgtgtaacttgttcaaccaaaaagaatatcgatatacgacttattcggctatccaacaatatacatcatggataaaaatgcgaccaagagaaatcttagtttcaattcaatatcaattataacgtaaagtaaaagcaaagacaaagttaaagcttggtttaactttcggtttaacttagagcctcagaaacacataaactgggtcaacgtaataatctgaggggtaaatccgataaatttatatctttgccggaaagaaaatcagcaaaagttatggaaacca

SEQ ID NO: 3808 - DNA, 56343 bp, Unknown
  gut microbiota DNA sequence
tttttaggaatataatgtttaacctgtcaactttgtcaggaattaatcttcaaactgacaactattttcagtacacttcaaacaaagagtttaccgccaaacgccgaagcgtttcagacaaaacgtcaaagagtttccttccaaacgcaaagacgtttcccccccagttacctccccacactcctgtttcccgaaagcacatataaaaatacccctaaaccgcttccagaatcttctaaacacgcccaatttatgcgtcaataatcccatccagaagacttctgagaagggattaccttgcatacttccctctgaaagaataaatccatcaagacaaaaagacaggaatccagccagaatcctgcacaaaagacatcattcatttccagaaaaagaaaaaagaacaaagaaaaaaaacagaaaaaaatccatcgaaaagcgtatctttacaatccatattacaatcaattcataaacatttatctcatgcagatacgacttgtttcaactagcaagaaacgtttcctcccgctcttgcttctggccgatgaacaggaatccatgatagaccgctacctggaacggggcgacttatacgtgatgtacgacaaactgtttacagaaccggttgccgtggccgtcgtaacggatgagggaaaaggaattcgtgagctgaaaaacctggctgtagctccacactggcaacggaaaggatacggacggcagatggtggaatacctttgccagcgttaccagaatgtgtgtcacacgctgacggtaggcacaggagacagtcatatgaccatttcattttatcagaactgcgggtttgtttactcgcacacggtgcccgacttttttaccctccactatgaccatccaattgtagaggatggaaaggtactgaaagacatgtactatttcagccgcactcttacccagacaaatgaaactgacggatgaatcagaataaaccctgcaaaagtttgctcgttccgcaaaaagtcgcgtcctttgtacaagtaaattcacaaaactatggctgacaattacattgaacgacaatatgaggcatatcaggcacggaaggcggcctgggagaaagaacggaagtacaaaaagaaaaaaccgacggctccggctgaaactccccatcgctcgggggctttcctgcaaaatcaggtgaaaaaggtggtggctgtgcacgacctgtcgggcgtgggtcacgtgtcactgatggcggtcattccggtgctttcgtccatgggctttcaggtgtgtccgctgcccacggcggtgctgtccgcacatacgcagtaccccacatactcgttcctcgacctgaccgacgagatgaagcgcatcatcgagaactgggagaagatgaacgtgcacttcgatactttctacacgggttatctgggttcgccgcaacaggcacagattgtggaggagtttatcctgaagttccgtggggagaacgacatggtggtggtggacccggtgctgggtgacaacggtcacctttacaagggtatcaccgaggagatggtgacagagatgaagaaactgattcacctggcggatgtcatcacgcccaacctgacggagctgtattacctgctggacatgccgtatcaggagcacatcacggacgcggaactgaaacaggcactaaagacgctttctgaccggggcccggccatcgtcattgccacgagcgtaccggtgagcggcgacccgcgttctacgtcggtctatgcctacaaccgctttggcgaccgttactggaaggtaacctgcccctatctgccggcacactatccgggcacgggcgacacgtttacgagtgtcatcacgggagcactgatgcagggcgacagtctgcccattgcgctcgaccgcgccacgcagtttatcttgcagggcatacgggccacattcggctatgagtacaacaacctggagggtatcatgctggagaaggtgctccacaacctcgacatgccgattcaaatcagcagttacgagctggtggaataagcggccacgcgaatcagtacatacgtatctgcccgacggggagttccacttcgccgaagggtatcagggcattgaacagacggatatgccggtagtttccgagggaggcgaccgggatgtccgtttcttttatctgtccggtgtcgagcaggtatcggcgctgggttccggccagcagaggctgtgcgggggtatgccattcgcatccgttccaaagggcgatgttggcgatagaggtatcggtgaggagtccgtggcgcacgatgagtacgtcgtcagccgtatcgcgcagagcgaaggcttcgtcgagcacacgacggtcggcctgcttgtagcgatagtcgatgtcgtccttcgccaccagttgcagactatgtacggggcagacgtggtaaggaaagtattccacacgaatcacgtcgcgggcataggtcaggcggcaacgggtgcgtgcggtataggcttccggacggaggtagtcacacacgtggaggtcgggcacaggaccgaaaaaagcacggcgcgtatcgttcatgcggcggtcgtgcagcgaggcatgccacaccttaccgtcttcaatgcggagcgtttcaataaagaggcacatagactttctgtttcatttcttcatattcgtttcgggcatcgctgcggaaggtgattcctcccccgctcttgaacaccttcgtgccgtcgggctgctgttccaggaaacggatgagcacggcactgtccaggttgcggccgtcaaagtagccggtcacaccggtataaaagccacggtcgtacgtctcggcttcgcggataatctgcacagtgcggggcttgggagctccggtgatggaacctgccggcaggagactgaaaaacaggtcgcccagttgtgaaggatagtcttcgggcagacggccacggatttcagaactcatctggagcaacgggccacggtgggtatgcagctcgtccaggtagcggtagcaggtcacggtgacttcggtggcgaaacggctcaggtcgttgcggataaggtcggtgatggtagcatgctcggctgcttctttcgggtcggccagcaggcgttcacgggcatcaggcaacgtagcatccatcgtacctttcatgggatgggaatagataaagccatcggttatccggacaaagatttcgggcgagaacaccacaaagctatcgtttacccacagtctgtagggagcacgggcatggtcgaacacctgccgcagggtgaggtcggtatcgacgagggtagcacaggtgtagttcaccaagaaggaattgccgccatgcaagtgacggtgtacaatgtcgaatccgcgacggtactcctcaaaactcatcggacaaggctcccaacgaaaagagcggggatgcggagtggcgggcattccttgcggcacgttcgtggctcccggaaaggcaaacagcagttccgaagaaggcagacggtggggttcttccaccaggcatttctcggcgatataatctatcaggaaaaagaacgggcgaccttcgctgccaaagcagttcatgcgggtgatggcttcctcacggccacaaaaagagagggtatcaatcatttcgtttggttttgagggaacagagataaagggttactcccacagctacggcaagcatcatcgctttcagccagagggcatcgaacatcaggaagatgcaatgcagggaggtgagccacaacagactcagggcgagaatcttggcacgcagagggatggcgcgcgactcacggaaatcgcggatataaggtcccagcagcttgtggttcagcaaccactggtaagctctcggcgaactgcggaaaaagagggcagccgaaagcaacagaaagggtgtggtgggcagcacgggcaggaaaataccggccacacccagtgccagcgacaggaatccgatggggaggtaaatgtatttcatggcgcaaaaatacaaggtaaacggcacaccgcaggcaggagtttagttaataacctcaaaatcggagggactgcaaagaagaaagcttgcagaaaaagaaagttttcatcatatttgtaattgttacaatcttgttaaaccattcaactatcaaagaatcatgaaaaaactaatctggactttatgtgtgatggtgtggagcctggcgggctttgcacaggaaaagagttaccaactttccagccacatcctggacattctgcaggggcagcctgcggcgggagtgaaaatcagtctgttgcatcttcagcccgacggaaagacctgggcgctgctggaggaaagactgaccgacgagaacggccgcgtgaaggatttcctggaggaaggcacaaccgaccacaagggcatctaccgcctgacgtatcacgtggcaccctacttcgaacggttgcagcaggattcgttctacccgttcatcgaagtggtgttcgaaatcaaggacggcaagcactaccacgtgccaatcacgctttcgccttacggatattctacgtatagaggaaactgaaaaaagaatgggagccttttcaagctcccatttttcgtgccttgcgggtgcaatatcgcttgcactgggcacagatgtcataacccagcatggctcccaatatgaaatcttcttccggagtgagcaggttcaggggacgtgtcaccatcatgcggatggcttcaatacattccgccttgccgaagaaaagattgatgcgctcgtcgtccaccggctgaatcacaaacttgatgcgctggcttcgcagacgtttcacggcaaagtcttcatatcgcttgttcgtggtgtacaacaccatctgacgcacgcctttcttcagctcatagatgtggttgagaaagactttcagttctacgggattgatatcgggagtcatcatgggctacggatttagaagatagagaaatgaggtcggaaggaatcaagccaaatcggctttgagcatctctgtccaggccgacacgcgggcatcggtccggtcgctttcgttcacgtcgtcgagggccagtcccacaaattttccgtcggcaacggccacggaagaagcgtaggtgtaatcgctgtcggacacggctcccacgaaggtacatccgctgtctttcaggtcttcaaagaggatacccataccgtcgcagaaagtatcggaataggattcggaatcgccgcagccgaagagggcgatggtcttgccggagaggttggcgtttttcagcaccttaataccgtcgtaccagtcgtcctgcaactctccgtcaccccaagtagaggtgcccagaatcagggcttcgtaactctctgccagggcagcatccagcttgctcacatcgtgtacatctgccggggatactcccagcttttccgctatcaggcgggccacagactcggtggtgcctgtggtagaaccataaaaaataccagttttcttcattttctacatgtttgatttgacatcgcaaagaaacggcatccagcgcggatttgaaatacctaaaaattgggattttaaaggcggcatctgtgggttatttactaactttgggcagaaaaacaaaagaccggccctctgccggagataaagtatgagaagaaaggaagaaaaaaataccattatcgagatatgtccggtgcggaacgtgattgcccgcttcggcaacaaatgggctttgctggttattctgattttaagtgaaaacaaggtgctgcgtttcagcgaactcaagaaaatgattcccgacgtatcgtcgcgaatgctgtcgagcacgctccgtacgctggaggctgacgggctggtaagccggaaggtgtatccagaggtaccgcccaaagtagaatacagtctgacggaaaccggactttcgctggttcccttcatcgtccagctgactgaatgggcgcaaaagcacatgaaatccatagtaaaacaccgggaggagtttgaagctgccgaagaagagtagcagcttctttcctcgcggaagaattacttgcttcccggtactggcaacataccgagctgcatcagcatactgaagaggtcgggtacactgtgttcgcggacaatcttgctgtccttcagttcgtagatgttcatggccgtcacacggacaggtttgccggtggcgggcatacccatgaaaggctgggtctgagtaccgctcatcgtgaaacgaatcatcaccttgtcgccttctgcaatgacttcttcggcattccactgcacatcgggcatggcaccgcgcatcatgcgtagcacatccatgtagccttcaaagccgtgcagcggctctggcgaagtgggggcatagaaaatcacttcgggggcgataatggtttcacctatcgagcggtcgcccgtgttgatgaaacggataaactgttgcatgacttgtttgtttttttccaggacggatgcctgttcggaagttacttcatttttcatcatcttacttgtttctttaaagagtcagaccgcggaggtttccggttcaggaaaggcctgccggaagcggtcttctcagcatttacggtacaaacttagcactttcttttctgacacacaagaggttacatttcttctgcttagtaacctttttctcacttttgctggatttcagccggttttatagggaaattttgctgttattttctgcggaagaaaacaagcgacctttcgacatttctttctacctgcactatgaggatagaaaagacgtctcagcacagccaaattagaaaaatgctgtgttttccatttgcttttgattttttgtatatttgtcgcataaaaataagaaacaactatgaaacagactctttatgcatgggccagcatcgtggtgggatgtaccatcctggcggccggattcgtattctttatcaatccctataatattgtgcccggaggagtgtacggggccagcatcgtactccacaacctgttcccgtctatccaggtgggtacgttcggctatatgttcgacataccgctgctcatcctgtcggtgctgttgttgggagcaaagttagggatacgtaccattgtggcggccctgctcactccgttgctgatgaacaccatgtcgcggctggtctaccctacccgcgaagcactggagagtctggacccggcacaactgctgggaggcagcatgaacatgacggaccacctgatgctgacgtgcatcatcggggcagtggtcatcggtgtgggtacgggcatcgtgatacgcagtcaggctaccacgggcggaagtgacatcgtggggatgctgctacagaaatatgcgcacatccgtttctcacgggccattctgctggtggacggggcggtagtgtgcttcggactggtggttatcggtttcggactgggtacggcgagcgactctacgcagccttcgtggcacctgtcgttctattcgctcatttccatcttcatcatctcgcgggtcattgcctacatgattaacggggcgaagaacgacaaattgatttttgtcatcagcgaccatgagttgcaggctcttcaccagtacattctgaaggacctggaccgcacggctacctgtatcaagagttcgggactctacacgggcaaggacaaggagatgattttccttgtagtgagctaccaggaggtgcagggcgtgaaactgaaaatcaaagaggccgatccaagggcatttgtggtggtgacggatgcatacgacacctttggcgaaggatggaaacagcttccttctccacacgagatttatccggagtaaccatgcaatgcttgatgtaaaaaaatcataaatcttcactttgtaatctgttcttaatgaacattagtaacctggaagtaacttacttacattcaactcccttcttgtatgagacaaaagaatcgtccacctttgctgtcgaaatcattaaaacagttacattatgaaacagactcagcaaattgcagaaggcactcatttttcagccttatctacaggctctttcagccagttgaatgactatgtattgccggtagctccgggaatggaaattcaggggaaagtgttcatgggacagacgttgcagaccacaggcgcagaaatctcattccagtcgttcgctccgggaaaggaaaccggtttccttcatacgcaccagacacacgaagaattatatattttcgtgagtggaaagggtgaatttcaggtggacggacaggttttccctgtaggggaaggaagcgtagtgcgcgtggctccagaaggcaaacgttcagtgcgcaacaatggtacggaaccgctgattatgatttgcgtacaatacaaagctcagacattcacagctcaggatgcggccgacggacaactcctgcaggagcccgtgaaatggtaacacactgtaagaaagtaaacaacggggcagactcggacgagtctccccttttttcatatacagaaagcccttcctgaaatcggcccaaccaaaatccgacttttaagacagaaaatccgacattctgaaaaacgtactaccgggatttatgtcatacctttgcataaacaaaaaaaacttgcttatgcacattctttttacgcatttccgtcgtttccgctccggctttatacaggtgtgtttctgcttgggtattttgctgctgggcggatgcgacatgattgaatatcacccgtacgacctcgacattgacggagaaacggacgtgaatcgccggaacattgaacggattgaaacggctacttacagaaaagaggaaatccggtttgccgtaatcagtgacacacagcgctggtacgatgaaacggaggatgccgtggaggccttgaaccggcgcgatgacctggatttcgtgcttcacacgggcgatatgtccgacttcggcctgaaactggaatttgagaaacaacgcgacattctcagcggactgaaggtgcctttcgtctgtctgctgggcaaccatgactgtctggctacgggactcgatgtgttccgcacgatattcggcacggaagatttcgcctttactgccggtaacgtgcgttttctgtgcctgaataccaatgccctggagtttgactactcgtcggcggtacccaatatccagtttatccgcgacgaaggcgaccacgtgcccgaaggagtggaaaaaaccgtggtggccatgcacgcaggtcctttctccgaacagttcaacaacaacatcgccgaatatttccattattacctgaaggaaatgcccgacttgcagttctgtgtctacggtcacgggcacaatgtaagcgtagacgagttcttcgacgacggtatcaagtattacgaatgcagctgcgccaaagaccgttcttatttatttttcaccctcaactcaaacggctatacctatgaagtggtcaatttttaaactgctgctggcaggaggaatggccggaatgacgctcctgcctctttgcgcacaaaacgacagtatcgctccggccgtcaaggaacgccgctgggacaagcgcgagcacctgcgttatgatgaacggtgggaacgcctgaaacccactcacctgaaatggcaatatgccggaggaatgggactcaactcggtgggcgtgggctgggattacggacgccgctgccagtgggaaacggactgtcaggtaggtttccttccggccaagtatgccgagaaattccgtctcacatttaccgtgaagcagaactacattccctggagcatctgcttcaaggagcactggatggctgaacccttctactgtggtctgtacatcaccaccattgcaggcgacgagttctggaagaaggaaccgggacgctatcccaacaaatactataacttcagtaccaagatgcgcccctatatcttcgtgggacagcggttcgggttcagtccccgccacgacctggtgcgccacgtctccctgttctatgagctgagcacctgcgagctgtatctcatcagcaaggtgaccaacaaaagcctctccatgcgcgacatcctgcgcctgtcattcggtgtgaaagtacagctgttcagagacgaatagacacagcctgcaaaaaaagataaaaaaggaacggcagccgttcgccgttccaaagttttcgttacctttgccggaaagtaaacaaaggggtgccccacggatgtgtccgggctgagattataccctacgaacctgatgcggttaataccgacgaagggattgttgattctgacatctatttcctttccccgtccgcgggatgctctctttggtttacacgctaaaacagtacgcttatgaaactattggtaaacaacaaagagacggaacttacacaaggtcatacaattgccgcactggcacagcagctgggacttccgaagcagggagtggccatcgcgctgcacaaccgcatggttccgcgtgcggaatgggaaaacaccgtcctgaacgagggcgacagtctggtcatcatcaaagcagcttgtggaggataaggccatggacatgaatcatttcaagttgcagttcatcacacatttcaccgacacgtattcgtatctcgactcggcccggatggccctcgaagggggatgccgctgggtacagttgcgcatgaagcacgcctcggacgaggagacggaagcggtggccgtagaggtacagaaactgtgccgcacgtacggagccactttcctcatcgacgaccgggtagaactggtgcgcaagctgaaggccgacggagtgcacctgggcaaaaacgacatgccgatagccgaagcacgaaaaatccttggaaaggacttcctcatcggaggtacggccaacacgttcgacgacgtacaggcacactatgaagccggatccgactacatcggttgcggaccgttccgcttcaccaccacaaaagaaaagctcagccccatcctcggactggagggctaccgttccatcgtacagcagatgaaggcggaaggcatccacctgcccatcgtagccatcggcggcatcaccctggaagacatccctgccattatgcagaccggtgtgacgggcattgccctgagcggtaccatcctgcgggcagcgaatccggtggaagagacgaagaaaatcgtaagtcaattaaaaatgaataatgaataacgagaaacgaaaaatttgtggatgtgttcatttttagacagaagaacaaaagaaacatatttttcaaatcctctgattttcaagatttcatcacaaactccaactcacctttgccggtaaagaaattcctactttaccacaaagaataacgagtaaaggaaccaaaaaaagaacgaagctccgaagcgatttcgccccaaaggaagccccaaaacaaaaaaaacggatcaaagaataaagaagcaaaaactccccacagcgatttcgccaaaggcgaagagcgacagcccccaaaaaatcccgtcctcagtttcggaccgaaaagcggagaagcagagcacggcgaaaagaagcgcaggctgtttgagcgaagcgagttcctgcgcttccgacgagcgaagcttcgcagccggtccgaaactgcagacggcggtttttctttttgttacctttttctttttgccgccaaaaagaaaaagtaagagcaagcaataaacaaaatagataaaacaatggaaaaactaatcattgcgggaaaagaattcgaatcccgcctattcttaggaacaggaaaattcaactccaaccaactcatggaagaagccatcctggcttccggcacagaaatggtgaccgtagccatgaaacgtatcgaacttgacaacaaggaagacgacatgctgaagcatatcatccacccccatatccagttgctcccgaacacctcgggcgtgcgcaccgcagaagaagccgtgttcgccgcacagatggcccgcgaagccttcggcaccaactggctgaaactggaaatccatcccgacccgcgctacctgttgccggattctaccgagaccctgaaggctacggaagaactggtgaaactgggattcgtggtattgccttactgccaggccgacccgaccctgtgcaagcgtctggaagaagccggagcagctaccgtgatgccactggctgcccccatcggtacgaacaagggattgcagacacgcgacttcctgcgcatcatcatcgagcagagcaacgtgccggtggtagtggatgccggcatcggtgcaccgagccatgccgctgaagccatggaaatgggtgccgctgcctgcctggtaaataccgccatcgccgtagccggaaatccggtagaaatggccgtagccttcaaggaagctgtcagtgccggacgccgtgcctacgaagccggactgggtattcaggccgataacctcgtggcatctgcctcctctcccctcacttctttcttgaatgaataaatcctgattttctcaaccggtagggactgttccctacccgcaaacaaaccccgatttatatggaaaaagaaaaagaccaaaaagcatacgcccatgcagagaaagcctacatgcagggcacccttttcccctttgtaaaggtaggcatgcagaaagtgaacctcaccccgacggtgaccgtagtagacggcaagaaggtaatgacacctaatgcaccggtgtacgtgtacgacacgagcggcccgttcagcgacccgaacattgaaatcgacctgaagaaaggactgccgcgcatgcgtgagagctggattacctcacgcggcgatgtggaacagttgccgtccatcacttcggaatatggcaagatgcgccgtgacgaccactcgctcgatcacctgcgctttgaacacatcgccctgccttaccgtgccaaggaaggccactgctgtacgcagatgtactacgccaagcagggcatcgtgacaccggaaatggagtacgtagccatccgtgagaacatgaactgcaaggaactgggcatcgacacctacatcacaccggaattcgtgcgcgacgagattgctgccggacgtgccgtactgcctgccaacatcaaccacccggaatcggaaccgatggttatcggccgcaacttcctggtgaaaatcaataccaacatcggcaactcggccactacttcaagcatcgacgaggaagtggacaaggcggtgtggagctgcaaatggggcggcgacacgctgatggacctgtcgacgggtgccaacatccacgaaactcgtgaatggattgtgcgcaactgtccggtgccggtgggtaccgtgcccatctatcaggcactggagaaggtaaacggcaaggtggaagacctgacctgggaaatctaccgcgacacccttatcgagcagtgcgagcagggagtggactacttcaccatccatgccggtatccgtcgtcacaacgtacacctggccgacaagcgtctgtgcggtatcgtgagccgtggcggaagtatcatgagcaagtggtgccttatccacgaccaggaatccttcctctacgaacactttgacgacatctgcgacatcctggctcaatatgacgtagccgtatcattgggcgacggattgcgtccgggctgtatcgccgatgccaacgacgaggctcagtttgccgaactcgacacgatgggtgaactcgtgctccgtgcctgggaaaagaacgtgcaggcctttatcgaaggtccgggacacgtacccttgcacaagattcgcgagaacatggagcgtcagatcagccactgccacaatgcaccgttctacaccctcggcccgctggtgaccgacatcgctccgggttacgaccacatcacttcggccatcggtgccgcacaaatcggctggctgggtacggccatgctgtgctacgtcactccgaaggaacacctgggtctgcccaaccgtgaagatgtacgtacaggcgttatcacctacaagattgccgcccatgcagccgacctagccaaaggtcatccgggcgcacagattcgcgacaatgccctgagcaaggcccgctacgagttccgctggcgcgaccagttccacctgagtctcgaccccgaccgtgcgctggaatacttcaacgagggacgtcacaccgacggcgagtactgcaccatgtgtggtccgaacttctgtgcaatgaaactcagccgcgacctgaaggcaattaataatgaataatacatcaggccctcgtttttaattattaatttttaattattaactatcgaaatgtttagtgacgaattagaaaaaataagctgggaggagacgaccaaggccatctactccagaaccgaggccgacgtgattcgggcactcggaaaatcacggtgcgacgtagacgacttcatggctctcatctcgccggctgccgaaaagttccttgaacccatggcacgcctcagcaagaaatataccgaagaacgtttcggacgcaccatgtcgatgttcatcccgctctacatcaccaactcgtgcaccaactcgtgcgtgtactgcggcttccacatcagcaaccccatggcgcgtaccatcctgacacccgaagagattgaaaacgaatacaaggccatcaagaagctcggcccgttcgaaaacctgctaattgtgacgggtgagaatccggccaaggcgggtgtaccctacattgccaaggcactcgacctagccaaaccgtacttctcgaacctgaaaatcgaggtgatgccgctcaagacggaagaatatgccgaactggttcaccacggactgaacggtgtaatctgtttccaggaaacgtacaacaaggcccgctacaacgtgtaccacccgcgcggcatgaagtcgaagttcgaatggcgtgtcaacgggttcgaccgcatgggccaggccggcgtacactccatcggcatgggtgtgcttatcggactggaggactggcgtacagacgtgaccatgatggcttaccacctgcgctacttgcagaagcattactggaagacgaagtacagcgtgaacttcccgcgcatgcgtccggccgagaacgaaggtttccagcctaacgtcatcatgagtgacaaggagctggcacaggtcactttcgccatgcgcatcttcgaccacgacgtggacatctcctactctacccgcgaaccggccaatatccgcgaccacatggcttcactgggtgtgactaccatgagtgccgagagcaagaccgaaccaggcggatattacacctacccgcaggcactggagcagttccatgtgagcgacgaacgtacagccgtagaaatcgagaaggccctcaaggcattgggacgcgaaccggtatggaaggactgggatgcttcgttcgaccacgtggcacagtcgcacgccaccgccgctacggcccgctgaaaagccctccggaacactctctgaaaaacgcccttacgttttccctgaaacgcaagtacgttttacttcaaacacaagtgcgttttgatggaaacacaaggacgtttttccaaaacgcaagtgcgtttttcaagacaagtataaccctcttcagaaggcatcctgaggccattatcccgacttccggatgcctttctgtctttactcactttattccccttttaaccttatgaaactgaccgaaaaagaagcgtcacgctacaaccgacagattctgctcgacgaaatcggcgagacaggacaactcctgctgaaacaggcccgcatactcatcgtgggagtgggcggactggggtcgcccattgccctctacctggccggtgccggagtgggtaccatcgggctgattgacgacgataccgtgagcgagaccaacctccagcggcaggtgctctacagcgaacctgaaatcggactctccaaggccgaacaggccaagttgcgcctgcaggccctcaactccgacatccgcgtggaagcctggaacgagcggctcaccccgcagaatgccgaatgcctcattgccaactacgacatcgtagtggacggctgcgacaatttccgcacgcgctacctcattaacgacacctgcgtgcggctggacaaggtgtacgtgtacggtgccatccgcgagttcgacgggcaagtctccgtgttcaactaccagggcggtcccgactaccgcaccctcttccccgacgaagaggaaatgctcgccatgccccacccctccaaggccgtgctgggtgtcactccgggcgtagtaggctgcgtggaaaccagcgagacgataaaagtcatcctaggcagtccatacgtgctgagcggaaaactctggcacatcgacctgcgaagtctggaaagttacgtcatttcgctggtatagtttcccgtccgacccgctgaaaatcacggtttccggtgatgtacagctcctcagatagctttacttttgtacaaacgcaaattatcctattattcttatctttagtatgaacaaaagtaaagcaacgacagccctgaaatcgctgctggtttcaggctgtgccctttttgtgtggggcatgacacccgtatttttggcctccactctcacctcgtgcgagaagctggaagaactctttggaggtgatgatgaaggtgatgacgacggagacggaagcagctcgggcaatctgaacggagtgggtactaccgacggagcggctccctatttcaacctggaaactacccgcatcgaagtgcctgccgtaagagacggggaaggcatacaggtgaaatgccagaccaacatcataagcatgcgctatgtgctggagaaattcaagaaattcagtgaaggggaactaaccgagcaggaggactattcgttcatcctggaaaatccggagtattcgttctatggcgaagaatacctgcaatattacaccaactactccagcgaaaaacagaccgacaacctgctgatttatgccaccgacaaagacagtctgctggctaccatccccatcgaacaggcagctgctccccatatcagcgtggccaaggcagatgcagacatcaatgaaatcacgctgacactggaaggacagaacgatgcccgtttctattccacttatatctcaacagacagcatccccttgttcgaagtcattcaggatttgaaaaacggaggctcaggacttccttttgaatacctcttcgaccttcaaagccagcctacgtgtaccttctccgaactgacggaagcaaccaaatactacatctacctgcaaggcggtacggaaccggggcctctgcatggactttcattgtacaccgtcactactgccatgcgcggcaaggaagatgcgctgattatgaaatacgcgttgaacaatctgaacaaccgcacggtgtaccttccgtttgaaggacgggtgaaaggtgtcatcgactggggtgacggggtaaccgaggtgctcgacaagtcatacgtatattcggccgacctgtcacacgtttatgcccaaggtgccgaatcgacggtagaagtagccttcaagggtacggtagaatctctgacaaccaacagcacgaccaaaggagaaatcctcaagagttcactcatcggcatcacacaatggggtacgcccgaactgaaaacactgagactggaggatgttactgcactgacccagctggctgccgacaccaagggagcactgtctgccatcacggacttcacctcctgctttgaagactgtacgggactgaccaacctccccgaagacctgtttgccatggcaaccggtgcccaaacgttcgacagagccttccagggctgtacgggactgacttcacttccgctcaacctcttcgcccagaattccagtgcccgcaactttaacgctaccttctccggctgcacaggactgctctatctgcccgaagacctctttgcaagcaacaaagacatctatgtcatgaacgatgtgttcagcggatgtgaaaacctgaaagagattccggccggactgttccgtaacaatacccgtttaggatacatacaatgtgccttctcaggatgcagctcgctcaccagtctgcccgaaggactgtttgccaactgtccgggcatacagagtgtgtcagaaatcaactccgtcatggatgcctacggtcttttctcgaattgcacctcattgactgaaatcccggaagacttgtttgccagtatgaccaaggttaccagattagatggcatattcaagggatgtacctccctccgcgagattccggaaaagctgtttgcaaacaacacacaggtgatttccatgtgggaagcctttgccggatgcaagagtctgcaacgcattcctgccggactattcgactccatgcgcaccctgcaagcagtccgactcttgttcaagaattgcagttcgctcaccggcgaatcgccctacaccctgataaacggggaaaaggtacatttgtatgagcgcaaggattacccgaatgaactccttgaaatcaccagccacaccagcgcgttcaacaactgcacgaacctgaccgactatgaatccattccaagcaactggagataaacgagtcccgatttttgcataattatccttcccctgccaaagctagataaaaaacacgcttggcaggggatttttcatgcctcaatttccgattctctgttttttatgctaactttgagaatcaaacctttatcaaaaaaactatgttactcagaattttaggttatctctgtcagttgtgtttcattattggcctttattatgggctcaaaagccaggaagcgtttctgcaatacaccgtttgcatactggccatactgattctcttacagcgtatattcattgacttattctggaaaaaagaaaacacttaacactttatccatcatgtacacgaaacaactcactggcatcctgctggtattcctgagcatcttctgtttcaccagctgcaatcacgacgacgtaaactttccaactttcacattcaatgaaaacggagaatgtgagccagcgtctctcacccccatttcttccgcccgcttcgaagaggccgtagtgggatacggctggaagcacgtccacacctacgaaatcaatcccgacggcacttgccagacgcaggattattaccaagacttgacaggtacaggtcctacccaatattacgtggaaagcaactcttccctgaaaaaatacatgtacattgacgcctatccagcatggggattccggactgtcgcttataccttctcggacagcaaccgactgctcagcaaccagaacacagtatttcaggtactttccgtgaacggcaacacaatggaaatacttgaccagctgggaatacaggcaggcggagccgaaatctacggttattccatctaccaacggatgacgaatcaggaactggaagaggtgcagaaaacataccacacagatttgtcggacgtccacgaactgaccgtatcggtacaggaaaatccgctcatcatctccggaaaagaaacggaattcgatgtgctgagcagcaacggtcctttcactttcaaaccagccagagaaggcagttgcgaaatcacttcacaagggaatcatgtcaaggtcaagctgctgagcaacggagtatatctcacatgctacgaccgtctgcgtcattgtgaggtggtcattttctctaccgacgaggaactggaacccgaaggtacggacatctacgacttcacatacacggaaatcaccgtcaatccggaaaagaaactctttgcgcccgatggtcacgaaatctcctacgacctcggcagcatggaagtcaccccgcgcaaggaatacgccggaagtatcctgagccagtatgcccccgtggccttgcttgccgtggacacaaacggacagacacgctatctgcgcatgaacagcggcaaaatcagcttcaaggaccttcttccgcaagaagtgctcgaccaactgacggaaggtacagacggggcttctctcacctacaagctggaactgattacgcccgactgcgaagtgttccaggttctgcctttcaaaatcacctataaaaaatagtgcaagtttcatgaaacttatccgcctgcttcccatattgcttgtcatcgtactctcctgcctgacaagttgccaaaaagaagaaattccgtctgccgacaacgagcggacactcttcatgtacctgccatggtctaccaacctgacgagttatttctaccagaatatcgacgatatggaagacgccatctcccgcagaggactagacaaggagcgggtgctcgtctttctgtccaccagttccacggaagcagaactgtttgaaatcacggtcaataacggtatctgcacccggcagatactaaaactgcatttacgaccgaagagggtctcacgggcattctgaacgacatgaaatcgtttgcttccgccaaaacctactccctgattgtgggttgccacggcatgggatggctgcccgtcgcccaaagcaaggcacgtgccgctacgaaaccccgctattactgggagtactcacacactcccctgacccgctttttcgggggactgacagcagaataccagacggaggtgaccaccctcgccaaaagtctctccaactgcggattgaaaatggaatacatcctgtttgacgactgctacatgtcttcgctggaggcagcctacgacctgcgccacgtgacccgtcacctgatagcctgtcccacggaaatcatggtctacggtatgccttactcccacatcggagaatacctgctggccgagaatcccgactacagcgccatctgtcagactttctatcaattctattccagttacacatacccctacggtaccattgccgtgaccgactgctcccgactggacgaactggctctcctgatgaaagacattcattcccgctattcgctggacgactcacaaacggcctccattcagcgtatggacggctattctcccgtgatattctatgatttcggcgattacgtccgtgccctttgcggcaacgatgcagagcagctgacccagtttgaaaccttgctggaacaagtcgttccctacaaggcacacaccgagaaatatttcacagcagcccgtggtccgcttcccatagagcattattccggcatcaccacctctgcacccagcacaaacagcttggcaagttcctactcgcagacttcgtggtatctggctacgcattgataatgtgctatctctattccagatttgaaccataaaaataagcagccgtagcacctccgtctaccagaaaatcagagccggtgataaaggccccccggttgctcatcaacagttcggccacattcgccacctcgtcggccgtgccgggacgatgcgccggacattgggcgaacatcttcttatagaactccccacgtaccccgttgaactcgtcaagtgccagtggagtgacgataatacctggagaaatggaattcagacgggcacctcgttcaccccatctcactgcctcggacatgacacgcttcacgttgcaacgtttcgccagctggtaggcatggagcgtatcgcggatgtgcgagggttgcagtacctccagactcaacaattcttccgtcggtgtacaagctagctgtgcatcgatttcagcaccaagggccggcaagcggtgtccagattgactggctatcgtaacgcccgttccaccctgccggataactttcccaacttcttccaacaataccgccgtaccgtacaagtcgactttcagaatggtctcgaccgaggcttgcgaaggagacactcctgccgcattgaccagcatggctatctctccatattgctgtgccgtctcaatcagtccgagaatggagacgcgcgacgacaagtccatctccaccggaagcacatcaaatccggcacggttcatcgtatcggccacggcctgcgcattctccatccgcttgtcaccgactacaatcttcattccatatcccatccgccgagctatcgccataccgatttgtccggcacccgtaagcaacattacttctttttccatatcacacacttttaatatttccatccgattccgctacataacggtccactaaatctttcaaagccatacggctctccatttcctgtgtcatagttctatactattaatctgttaatgttatggcaaaaataatccgtaccattttatccgttgttatacaaaacacagaatccctgcatgaaaacacagatttcaagagtaacgaaaaccagaaaccggaatcctttcgtaattttgtcgtcagaagcattaaaaacgatgaaaacatccttattaaacatcgaagccgttacagagtacgacgacatgctcggcgtagaaactctgcatccgctggtcagcgtgattgatctttcacaggccaaaccgatgcaccacatgcggcatacattcagcttttacgtgatttttctgaaagacgaaaagaactgcgacctgatttacggccgccagcgatacgattaccagaaaggctcggtggtctgtctggcacccggacaagtgatcggcatagaagatacgggcgaaacgttccagccgcaaggctatgcgctgtgctttcatcccgacctgattcgcggcaccaacctcggacgcactatcaaggaatacacgttcttctcgtatgaagtgaacgaagccttgcacctctcggaacgggaacgacacaccttcatcgactgcctgcagaacattcaggaggaattgcaacacagtgtggaccggatgagcaaacggctgattgccaaccatatcgagttgttgctcaactattgcctgcgcttctacgaaagacagttcatcacccgtcaggatgctcaccacgacattctaacccgtttcgaaacattcctggaccaatatttcacgggagacaatgccgcacaaaagggattgcccagtgtgaaacactgcgcaagcgaactttgcctgtcaaccaactattttggcgaccttatcaaaaaagaaacaggcagaaccgccctggaatatatacaagacaaaattatcagcatcgccaaagaacagctgcttctcccctcagagtccatcagtcagatagcctatcaactcggtttccagtacccgcagcacttcactcgtgtattcaagaaagccaccggaatgactcccaatgaataccggagcagcaaaacggagtataaataatacaatatttttcatccgccataagaaagaggaagcacagaattcattacatttgcagaaaccaaacccgatatttatgaatcgcagactactatccgtcaccgtgtttctggcgctgatgctgacttccctgctggccggacgccataactaccacgtgacacgaaacgaaataacagccgacctgaatcaggcactggcactgactttactggaaaagaaagagcccattgtgacacaagatacgatacgggcatacaagcagctccggcgtacttcgggcggacaggtactgattgccgtgtccgacgaacggttctgccgacacctgaagaatcggcgactgaaggaaacctctttcctcacgttcgacgtggtggacaaggaatatcagggtggttcgacggatgaacaggccatctacagcgatacactgatgataagaaacggacacgcaggcgagacactggccctgaaaggctatacccgtctgtcggcagcggccgtattcggcatgtccgaccagcgcttgcctgccggactgatggcagcggctatcctctgggccatcggttcgatgctgtacttacggaaaagagagaaagagaatctggtgctgcaacccgtcgaaggatgcagacaaccggctgaagatggtacacaatctgccgaagatttcgggggactgacatattcggatgcagacgaccgtttctacggcgtcgaccacatgcctatccgcttcacccccatgcaacagcaactgatgcggctgttctggcagtcaccttcccactccatttcgaaagaggaaatctgtgcgacactctggcccaagaaagacgatgccaacgatacgctctacacccttatccgccggttgaaacccattgtggaggagcatacgcagctgaaaatcgtggccgacagaggacgaaactattcactggaaatcaacgaattgaaaagctgacagcgaattgtcaggcaaatgtcagcgtcggtttttgacgccttcgtgacagcctcctacttttgttcctgaaatttacacacaggaacaaatgaacacactcagattacttttccagcaggagaccgaaagtcggcttctgctgaccatctcccgatttctggccagcatctttcttcttttattgctggccctccccactctcgcgcaggaagtagaacccaccgtggaactaggcgaagtggaagtcaaagccgaccggattatccacaagaccgacggtctgctactctacccctccgaacagcagaaagcttcttcccgctcaggctacagtctgctccagcaactcaccttaccgaatatccgtgtggacgaggtgggccacagcatctcggccatcgaccagcggggaggcgtacagattcgtatcaacggcatcattgcagacaaggcagagatgctgtcgctcgacccgaaaagcatccgcaagattgacttcatcgacaaccccggcgtgcgctatggcgacggcattgcctacgtcattgacatcactacccgacgggcggacaacggatatactttaggaacctcgctcacccaggcactgactacccgcgacggcgattacacggtgtacggcaaatggaacacaggaaagagtgagctgtcgctgaactacagcttcggctaccgggattttaaaggaatacggacggaggaaaccgcatactatcatctgaacgacggctccatttataccatccagcgcaacgacctcgcttcgcgcaaccggagtctgagcaaccagatgaaactgacctacaacctggccgactccagccgctacgtgtttcaggcttcactgagcggcgacttcagtcacgtgccgggcgatttcagtcagaaacagattgtagacggggcacagacatacaccgccctcgaacagcaacaaagccagagcagcagtccggtgctcgacctctactacttccagcagttcaccccccggcagtcgcttaccctcaatgccgtgggcacatacatcggcacccaatcctccgacagttacgacgaaggttcgccttaccgttacaatgtggacggacgcacctactccctgctgagcgaagccatctatgaaaaccggttgaagccctttaccctttctgccggcctcaactacaaccagaaatacacgaacaatgaatacacgggcgatgtttcttccgtcacccccatgcaccacaaccgcgtgtatctgttctccgaaatcaagggaacgtgggacaagctccgctactcggcaggcatcggaggcagctacctgcactaccgtcagcaagcccattcgtacgattactggagtttctgtccgaaagcagccctgaactacaacttcacccactccctgcaactgagttacaatttccagctgaacgaacgcacctcacgggtggccatgatcagcgatgccgccattcgcaccaaccgcatggaatggaccgtaggtagtccagacctcaagcccaaccgggagacgtatcacaccctccggctgtcgtacaacaacacccgcctgcaagcctatgcgcaaggcttctacaagaaatgtcctcaccccaacatggcggtgtacgaacgcacgtccgacgaccggttcatctatacccagcgcaaccagaaagagattgacgccctgcacgccatggcctatgcaagctactggctgatgccggaaaagctctccgtcacggcctacgggggactgttccgctgcttcaacttcggccaggactacacgcactgctacacgtcctacttcttcacaggggccgtcaacgcctacctgggcaacctctccctccatgcctacgccgacaacggctcccgcttcctggaaggggaaaccaaaggctacagcggaggcgacatcgccatgaaggccgcctacagctacaaagactggcagtttgcccttatctggcaacagccctttcaacacaaatacaaaatgttcgaatcggaagtcctgaaccggaacctccagaaaaccactgccctctacagtcgcgacgcctgtaacctcgtcaacctgaccgtaacgtggcgactgactaaaggacgcaagttccgcgctgtcaaccgctccatccagctgaaggacagtgacacggggattatccgatgaaaaaagaaattctcaggtaagtattccgcttgcctgagaatttttcaatgagctgcacgctgcaaccaccggttacaaccgtttcccaacagtacccccaagaatacgctcacaaagatgcgccaatcatcggcaaggcccatccattgtgtgacgaacagacagagactgcacactacggctgtgaccaccaagctccataacaacggtttcattttcataggcatttgttttgattacaagcgtaaagatacaaaaacttacctaaaaacgactttttgagaaagaaataattatttctgacagacttatttgtctaaaccaccccgataaaatcaagaaactttggcggcacgctcgaaagtaaccggaatggcatacctcactttctccggttttccgctttgccgtcccggtttccatttcggcatcagctttactacccgaagagcctcttcgtccaatgccggattcactccccgcagcaccaccggatgaataatgtttccttcctcatctatcacaaactgcacgatgactcgaggaattacaaccgtttcaggcacaagcgatttgtcatagttcagattcttccgaataaaatccatcaaggccgacatgcccccgggaaactccggcatctcctctacctcgtcatacgcaatatccagatccttttcctctgccacttcctgcaaaggctttgaagaaggctccttgtccgaagcatcccgttcttccaccttgtggccaatccggaattccgccgcaaaataccagtcgtgataattatccccaatatccattttcttcaccacacgatagatgcccggcgtaagcatacggagtgacgtatacaaactggcagaaaagggataaatcttattggatggaagaatacgttcttcaagtgtccaaactgttgctctcggtaaagacagccatttttctccctccttccgaagcactcggtacggcgaccccattgagatgctccgcccgctccggtttacgattctcaccgccacagattccgtattcagcggatacaccgccttctccgtgtacatcttgatgccgaaagtatccgtacacatcggttgagtaaaataagtagctacatcctcttttccgtcgttcactacgattgccgcataattcagcaccttctgccggaactctttctgcaatgcctccgagttcaccatccacgacatatacaacgtgtcattgtcccgaaaaaacgaagtattcaagttttctatgacacggtccttgggatgttccttcccatactggctaattttgtcaagcagtttccgatgctgagccttggatacgagttcaaactccgcgtatgccgtacatgtattacggttgaatgatttgtaaatgcgatacctgccgggacggttcttgtccgtataaaattgaatagtctgccggtctgtaggataatcgggcgtaaacacccacaatacatcgttgattatcggattggtaggctgaggttcccattgctttagtgcttcattgtaatataccagactgtacccttctccactgtcatattcccggttcgcacgactggtaatgaagaccttgactttggaagtcgctacaggataataatcatattctgtatgcatataaagcgaatccgcagaaagaggacggccgacaggaatatcccgtaccaccggttccagcaccatcgccaccggttgaggcggaatgtctgtagaagtttccgtatccggctcctctgctgcaagcgtatcatccgttacttccggactctgtactgctggaggagtctcctttgccagaacatctaccggttgtgccttacgcttgcctgtacaaccaacacacatcacacagaccaccgccacaaacaattgaaaaaatgcatttgttttcatacgctattgggataattaatttgtattctgcacagaaggtttaaacgcaacaggaaaagcaaactttacattccggttcttcccggcttgtctgcccggtttccatttcggcatcagactgacgatacgcaaggcttcttcatccaacgccggatttgtactccgcaacaccacagggttagtggcatttcccttcttatctactactatttgaatgatgacacgctccctcttttcagccttgtcatgccgcaggtttttccggataaactccattaaagcagacataccaccgagaaactccggcatctcctccactacctgataaactgtttgctcatcttcctttcattgtattatcgatttttccgtgaaacaattgtccgttatttatctatccagaactcggcacttactgtaatttcttccctcccgtcatggaatgattgaataatccgatattttccggatgtaattctatagcaactgacaggataactaaaacaataataatcaggagcaaagtttaactgcatacctacatctccaaagccatacattccattcatctttgcacccatccacgaaccgttttcccatttctgcaatgtccagtcaccacaaaaaatcagcgacttacgcttaggattcaataggatagcatacacattcttcgtatcaagcggataatggttctgtatcatattcatcctcacagtagtccccagcgtatcacagttcaggcattgtgcatcggcaggcccaatctgcataacctgtttttttgatgccgtgcgattgcatcccaaactgcatattgccatcatcaccacgaaataaatataccagcttttcatactccacacatttttatttaacctcaaaactgtctgtcaaaagaatgcgttcatcacctctactaaatgatttctgaacacggtatttcccttttggaatgcaatattcattcagtttataacggaagcaatacagcaaaggagccttctctatcataaacgcatcactattccatacaatcgtataggaggtatccttttgctccggcggacaccatttatcatttttccacaaatagaaacgcatatcccgtccgaactccaacagaatgtccgtcggattgcttacaaatatattaatcacgggcacattttctgtatatacttcatattctgtccacagacgggtttctccgttatatgcttcaggtaaatcttttgtataccaaagttgacactgacgtaattcgtatgttactgtatcttgaaatgaagcacaggtatcagcaaccacaatggatgtcatgctgtccgcacctccgataacagctgtagaggtagcctcctgtacaggctgtccaggcttatttacacaggccgccagcaaaatcaatataacacatgcaatctcttttctcatattcattccattttaatgaaaacaattattccttttatctatttcatcagtatcggtttatcacacggtgtatagccgataaccagcacatcagtatccggattaacagtagcagaagaattcagtttatattgaactacaagtgtatctttacctgccttcaataaagtagggacattcatcacctttctaaaagtgtccaatgctgctttccgaaacgaacggttgctgcaagaaatgattttcggttgcacgacatatccgttactgtccactgcatattcaatgcgtagcagacactcttttcctttggccagcaactttaccggatatttgctttccttatgtaaagtcttgataaaccatttataatcacgaaattcatctaaagatttatccagaccaaatattcctttcggagcctccttgcgccatgaagtgccaaacttcttatccagataatcaaaaaccacctgattataagctgtcagcatatgattgggaacacccagataacagtccagtgttccatcttttttcaatggataaaaaacgtcataactcacgccgtactttatccagaaaaagtgtgtgcggattttttgttcctgttcttccggtattaccaggcgcagcttgggatgtcccttgaggatattttctttcgacaactccggcgaacagtcatatttcaaaatataatcataccataaaggaagcaccatacgcagcgtgtcattatgctgcgaagggagggttactaccgtatcacaaggagcgagtcccacatattcagctttcagatgataagttccggcctccagtcccgtcatccggaagcagccggtggaatctgtcagccatccttgaaacggttgttcaaccatgctcaaattggagccaacaagcacagcatgtaccacatcataaggaggacgttgacggacggattcaccatacacccgacccacaatcgtgtattttgcagaatcacccttattatgcgttatatctcccctcaaagttatagtaagattacgatattcgctcgtgtactttccgttgatgaagagcacctcccacggataaatggatttcagcgtttctttgagggcaagagccagcggatgattcccgtcgtttatcatttcctgcgaagaacgcagataaatgaaacgtacgtcacagtctataaagtgaccgtcggctgtcaactggaaatcacttagcgaaaaacgaattcgttctccacggtattcaggaaaccgcttccaaggaaaccgatgcacgatttccccttgtgccttcgtcagattcaatccggctctccggtaattgtggtaagtctgcgtttccagcactttaccgctccgaacggtcagcacccgttctgtttccatgttgcggtcgaacccatcatgcacgtatctcaccacatctcctttcccggcccgaagttccccactgaaccagcgggcttgaattgtccccgccagacaataggccgcaaaaatcggccgcaagtctttcacctcatacattcgtgtatattctttcttgctgacctcatcgtagacatccgcttctacccgttgcaggcaaagatacccatcacgcacctcccagaaagcggtatagccgctataattgcccgtagaccgagtaacattttccggaagaaaatctcccatccgcctgcacagcagggaatcgtatcctatcggctttgccatcaaaacccattcttctccttccagacgaatcacatcgcccgattgccctgtggctttaagcgtcagcatcacaccacacagcagaataagcagcatcattttcttcatacgtatctgattgttaggtaaatctagtttttaaagatacggaaaagaaacggcatttcaaagttgtggaaaggattagaaaaacgaagctccgttttccgagaaatattggttttatttttacgtttcccaaccccgaaccgtatgttttcaaaagcagaaacgtatagttccgcaccgaagaacatacggttctcttacgggaaacatagaaaacgccttgaagaaacgattatgtcctcaaggcgttttccaatatgtaaagttagcaagctattcggcgtcttcctattccgcaaaagccggaacaggcaaatgcatacctgccattaccactccgttttcacgggcatattgcaggtagtatttgcggctttttatggctccggtcttatccatgtcatactgcgcacagatttccggatgatctttctgcaaggcaaacccgtgaaacaagtcaccaattaccagcagtttgcccgccttataaacggtatgtcccggtgtatgtcctatggcctccatagggagcacatttccgggaagcgtatctccaaaagcaaagagatgcagacggtctttataggcattcatcgtggtctctacctgtgcccttttatcagccggcattttcatccaggcatcatattccgcctttgaagcatatacctcagccttcgggaagacaaccttaccgtccttcatcattccgccgatatggtcgccatgaaaatgggtaataaacaagcagtcaatatcttcaggctttacattcaacgatttcaagccctccatcatccggctatcaggagcaccgacaccggtatcaaaaagcatccgcttgccatcacattcaatcaaaaacgtgctgacggaagctggtataccctcttgaagagaaaggctgttcatcagcgcatctgtcgcatccggaaagagagtacgcggcatcaaccgtgagctggcattgtcacgaatccatgtcaccttcatactgtccagcgtcaacgtggccaacaaactatctttctgtaatgttacccgagtacatacggtctttatcgtatctgcattcatttctttctctgttttctgtttattctgccctccgcaaccaaaaaacaagaaggctgacaacacgacggcacccgccatcacataatttttcatacgtatttgttttgtagtttcttcttattgtcccatctctaccttcacttcctgaatgttacgaagctcatcgctgaagttgacaccaatcttgtagaccgtacggctgtccttggcaaagggtgcggcatagcctttctcccgaatctgagccaaagcttcgtccgcgctgccgttcaacttgaattccatgatgtacacatagtcctgcgtctggagcaccaggtcaatccgaccacggttggttcggtattccacctgcacgtagaagcccatcagcttgaagatgatgtagaggatattctgatagtgcacttcgcggtcgcgtgccagttcgtatggaatgtcggcaaacatggtcttcaaccgttcgaaaaaatcatccactttgcccgccattacttcctccacaaagcactgaatctggtagggtgacttgcttacgctcaccgatgcgtagttgggcagcaggaacttgaagaacccttgttccacttcgcggttggggaagcctaacgtgtagttctcgaacatcttgttgtaacccttgatggtgaggtagccactctggtagataaccggaatcgggtcggttgaggccgtatcaatgctgtccagcaccggctggctggtgacgatatgttccagttcttctatcggatagtgatggagcttgagcagttcgacgaggtaggtcggtgttccagtctcaaaccagtagctgccgaaccgtcggttggcaaaggtattcagcaggctgaacggattgtacataccgatggcattttccgtgaaatgatacccgtcgtagtttgttttcagttctgcacaagcttcttcatagctcatgcctgtagctgcggctaattcgtgaatatcctcttcaaaataggtataaatttctttctcactgataccacagatttcggcatactggtcaatcatggaaatgtcacgcaggttgttcaaatcgctgaacacgctgaccttgccgaacttggtcactcccgtgagcagagcaaagcggatgcacccgtccatggatttcaaagctccgtagaaggctttcagggtaccgcggtattcgttctgcaaggcttcattgccgatggcctgtagcatgggcttgtcatattcgtcgatgagaatcaccacgcggcggcctgtctgctcgcaggcacggcggatgatcccctgaaaacgccgggccacaccgatttcactggaagatgctccataaagtacttcccaattctgtacgttttcctccaacacgttggtcagtgattccggcgtatcgtatttctgcgtattcaaatccaggtgtagtaccggatataccgtccagtccttctccagtttctccagtgccagtcccttgaaaagctctttctttccctgtgcgtaggcttcaagggttgacaacagcaggctttttccgaagcgtcgcggacggctcagaaaatagtatttatttgtattaaacaattcatatatctgtgcagttttgtccacatacacataaccatcatgtatcagaccttcaaagttctgtactcctaccggatatagcttgctcataaccactggatttagattctactgcgaatgtagtaattttcagcgaacattcaaacagacaaagaataggaatctgaaaattagatggataatcactcgtcctttacagtcataattactatctttgtatagagtcatattgcgacttcgattcaataactattcagaaaaccgagcaatggaagtacacagaataataaacaacatttttaaggttcttcttaatctactgctcttcatgatggctggggtagcaatcatgaatgtatttatgagcaactgcacgacaggagaaatctgctatcagctactaatagccattctatgtatcgcaacgattttctgcaagaaatacagatatatcggtttgtccatcatcttggtattgatgtttattgcttatcttgtcactaaataataaccgtaatgggaacattaggatgcatccacgacatgatgcggagggacaaagaaaacagggaactccgtcaacgcgaccgggaacgtatgaaggaaacgcgccggcgaatgaccgaatgccggcacacggagatacctcctacactttccgtggaaaagctggagaagataaagaaacagacacaagagaaagaacaagcggatcaaagccgagcctttaaaatcaaactgattctagggttagtcatacttgtccttctgctgttatgcggattcttgctctgaagcttcgtacacgtgtttttcaaatctgcctaacacaaaagttttttcaggctttcagccgaagcgtaaagcaactacccttacctatctcgctttccacggtcaacgtaccgccatgtgcttctacaaaatcgcgtgagatggaaagtccaagtccgctgccctgcaccttagtacccggcacacggaaataatgttcaaaaatgctgttgtgatagcgcgggtcaataccctttccgaaatcgcgtacatacatctcaatttccttgtttccattcacctgtcgtgcgccaatgataacccggctgttttctgaagaataacgaatggcattgctcagcaagttggtcagcacccatgcaatcttttcactgtctacaaagagttttccaatcttgtcttccggatattccacctcaatctgaataccaaacttctctgcctgcacccgattagccttgatagcatattctatcagttcaattggcttggttatcttcggtttcagttgcagtttaccgctttccacctgtgtcatgttcagtaattcacccgtaatgctcagcaaacgttcgctgttttccctgatactgttcgaaagctcctcctgctccggattcagatgtcccacacgtttgtcttccagcaattgcagactcatcatgatggcggaaatcggtgttttcagttcatgcgagatagtagagataaacgtggtttttgccgtatccagttcttgaaactctgtgatgtttttcaacagcaccacattgcccctcttctccattgtcaccccatcttttcccggcatcgtgatgtccatgtacttcacctgaaaataactttccttattgtcggcatagattttcagcggctccttcttcacctttccaccctcttctatcaaccctcttaccagacggcgcagcaagtcgttgctcatggctatttcctgagccgacttccggatgacgttttcccgcttcaggttcagcacattcagtgcctcatgattgataaaaaggatattcatttcattgtccagtccgataatcggttcattaatggagttgatgatagtttccatgtagcgtttggaagccatcaggtcggacaaggtactgttatgatactcgttcagtcgtctggccatccggttaaagttcttcgaaacttccaccagttcttcgcctcctttcaaattcagagtcacatcgtaattatggttggctatttccagaatgccatcggccagctgtttgattggcgagttaatagatgcaggcaacttgatgagcataccgatacctatcaagatgcaaatgcctccgattaccgtaatccatatcaaggcccggttcaatcccggaccggcagccgggctatccggttccgtagccgtcagaatctgcagattagccacagagagtgctaccagcagcacaatcatagataccagcacgcctatcgtaagcgcgatttttgctttaatattcataccattcattttcattgaattttatgcaattataatcaaatctattttcatctcggccaaagcctgcaaaaactttttgtatttccctatctgaaagatggtctgaggcattttaaaggcaggatgccccatacagatggtcgtaatctgtttttctctgcaggtttctatgatggcttcagttatactctccgaaaatacttgcagcacgtctccccccagttccgtcaccagtttgaagtgattcagcaggtagcgttgtgaagccagactgatacgctctgtactctcacggggagtctgcacataaagtaccgtaaaagacgtgctgtagcgggaagccagacggtaagccttgcggataatgtgacgcggagtatgttcattgctgctgatacatgccagaatacgctcccgccgggccggctgtgacactaccggaagcacttcgctttccacttttttctccacgcggaaagccacttccttcaaggccagttcacgaagttgcagaatattctcggtcttgaaaaagtggtgcagggccgtctgaattttctccggacgatatatctttcccgatttgagccgcgcaatcagttcctcggccgtgaggtcaatgttgaccacctcatcggcttcctgcagtacactgtcgggcacccgttccttgacttcgatgccggcaatttcctttacttcatcgttcaggctctcaatatgctgaatgttaatggccgacaccacattgatgcccgcatccagcagttccatcacatcttgccagcgttttttattgcggcatccttccacattcgtatgggccagttcatctaccacaaccagttccggatgaagctgaagaatcgtctccagatccatttcctccagttcctttcctttgtagaaaatcttcttgcgaggaattaccggcaatccttccaactgcgcctctgtgccggcacgcccgtgagtttccacatatcctatctgtacgtcaatgccattgtccatcatctcgtgtgcttcctgcaacatccggtaggtttttcccacaccggctatcatgccaatgtataccttgaatttaccacggcgagaacgacggattaaatccagaaaatgtggtacgttatgctctctttcttccatttttcgtcaaacttttatacaatataattcccagcctcataacctgtctatcaattatcttcccagaatccacgatagaacaacagcagaataccaaaaatctccagacgaccgataaacatcagtactgacaatatccatttggccgcatcgggtaaggcagcccatgagaacacgggaccaaaagcacccaaccccggacctacgttaccaatagccgacacaaccgtactcattgcttccgtcagtcccactccaaagcacatcagcagcgtccagcccacaaaaatacaaaccagatacgtagcaaagaaagtatataccgtagccgatacctgcgaggatattgcttctttattgacacgcaccggcaatacggcacgcggatgaagcatctgcttgaactggttacggatgttctgggcaatgatgagcaaacgcaggttcttgactcctccgcttgtggaacccgtacaacctcccgacagcatggcaaacaggagcagcatccaggtgaattgaggccataggttgtagtcatccgttgcaaacccgcaagaggtatgcgtagtagctacctgaaacaaggctttgcggaatgccgtttccaggtcataataatctgtcacgaacaaagctatggtaatgattcccgtcagtatacccactgatttgaggaaccagtgcagctctctatccctcaacaaattttgatactttccctttagcgccatataatacaacgagaaatttacgccggaaagaatcataaaaatagaaatcacatattcaataaacggagaatgccagtaagacacactatcctgtttggtagagaatccgccggtagccgtggtggcaaaagagtgacatattgcatcaaacaagttcattcctccacacatcagcagaatcgtttccaccagcgtcagacctatataaatcagccacagataacgggccataatcttcgctttgggatgaatcttgtcatgcgtcactccggtagcctccgaaaggaagagctgttggctgctaccactgaaaagtggaagcaacgcgatggtaaacaacacaatacccagtcctccaatccactgcgtcaggctgcgccagaacagcaacccatagggtaatgactcgatgtcatccaagatggtcgctcctgtagtagtgaaaccagacatggtctcaaaaaaagcatctgccacagaaggaatgtatccgctaaagtaaaaaggcaacatccccaatgccgtaaacaacagccacgacacactgacaatgcagtacccgtcacggcgactaatcaggttgtcggttcgtttgcccaccagcaccatacttcctccaagagcaatattgatacccatggtttgtacaaaataaatataatcaggttcttcatacaaaagtgaaaccccggcacacaaagcaaacagtccagcttcgaccaataccagcactcccaaaatataaataataagccgggtatttatcagtccctgtttccggcctttgctacgaggtacatcgtattcaaaaatattatccataatctttttttgttttttcccttgagcaaacaaatgtcatgccgtgaaatcagccataatcataaccctctaaaaatcaagaaaataaattcgcacaaagagaaaatgctctccaagcaaccttctcattttgagaaaagcccatctcatttcgatagagctcatatcaaagtcccccgaataaaaatccccgacactccatgtccggaatgtcaaggatacgaacggactcatccgtttatttcaccgtggggtttgcttcctccaaagccacattcagtttcaatacattgactttttctgttccaaacaagccgaggaatggtttctcaaccatcttgtcgacaagcgccttcacggtctcctcattcatgccacgtgcttcggccacgcgcttcacctgcacgtatgcacaagctggtgtaatgtgcggatctaagccggaaccgctggcagttaccatctcggccggcacatccttacgatccagataaggatgatgtaccaagaaagaatctacccgtgcctccacttctgccagatatgcttcgttggtaggtcctttattggagccagctgacgaatctgccttataatcggcagccgaagggcgcccccagaaataaatatccttggtaaaggcctggcccacattggccgcgcctactactttcccgttcagggtaatcgtttctgcgtttccttttcccgggccgaagaactgcccgaaaacccatagtatcagcacataacatacagagaaaagaatacagaatgcaatggtaatgcgaattgattttataaagtttttcataactgtccgttttattagaaaaataatcctacaaataagtcaattagtttaattccgatgaaaggcgcgataagcccccccactccataaatcagcaggttgcggcgcagcaaggcactcgcgccaatcggtttataagccactcccttcagagccagcggaatcagaatcggaatgatgagggcgttgaatataatggcagaaaggatggcactttcaggactgtgcagccccatgatattcagtggagccagctgtggaacggtcaccatgaacaaagccgggatgatggcaaaatatttggccacgtcgttggcgatagagaaggtagtaagtgtgccacgagtcatcagcaactgcttgccgatttccacaatttcaatcagcttggtagggtcattgtccaaatcgaccatgttgccggcttctttggcagcctgcgtgccgctgttcatggccacacccacattggcctgtgccagtgccggcgcatcgttcgtgccgtcgcccatcatagctaccagcttaccggcagcctgctccttcttgatgtagttcatcttgtcttccggtttggcctcagcaatgaaatcgtccactccggctttttcggcaatgtactttgcagtcagcgggttatcaccggtcaccattaccgttttcacccccatcttgcgcaggcgttcgaagcgttcttcaatgcccggcttgatgatgtcctgcaattctatgacaccggcaatctgcccgttgatactgaccaccaaaggggttccgccattgccagaaatcttccggatgatatcttccgtctcttccggaaattcattaccggcctccagtgctatgcgacgaatggcatcgaaggcacctttgcggatttcggttccatctttcaggtcgataccggaacatttggtttcggcggtaaactgaatcatgcgggctccttcggtaggcaacgtacgcatacgtactcccagttcacgtcccagttcgataatggattttccttcaggggtatcatcggaaacagaagaaagcagacaagcttctacgaacgcatgcttatccagacctgccaccggatagaaggcagtagccttacgattgccgatggtgatggtaccggttttatcgagcagcaatgtatctacgtcgccggccgtttctaccgctttacccgacttggtgattacattggcacgcagagcacgatccatcccggcaataccgatggccgacagcaaccctccgatggtagttggaatcagacacacaaataaagaaaggaaagcagcaatcgtaatcacggtgtgagaatagtcggccatcggcttcagtgtaatgcacacaatcaggaataccagcgtaaatacagccagcaatatggtcagggctatttcattcggtgttttctgacggcttgctccttctaccagcgcaatcatcttgtccagaaaactttcgcccggctgtgtagtcacggtcactttgatacggtctgacaacactttggtacctccggtaacggagctcttgtcgcctccggcttcgcggataaccggagcagactcaccggtaatggcactctcatcaatggaagccagtccctcgataatctcaccgtctgccggaatcacatcgcccgcctcacattcaaaaacatctcctttcttcaactgcgaactgctcacggtctttaccttaccgtcgacaatcagtttggccggagtttcctcacgggtttttcgcagactgtcggcctgcgccttaccacgagcttcggctatggcttcagcaaaattggcaaacagcaaagtgagaaacagaatgacaaacacccagagattgtatacaaatgaaccttgtgaggtatgagtggccgaatagagtgtaacaaccagcatgattaaggtagcaacttctaccgtaaacatgatgggattcttcaccatgattctgggattcagcttgacgaacgactgcttcaagctttccatgacttgttccctctgaaacagggaagtatgattcttatttttcatatcttttttctttcgttgttatcgtatcttcttcaatgatacgtttcagtatttttctcttataaactaaagtgttctgcaattgtactcaaggcatgtgccggaaagaatgacaaggcggctactatgaaaatcactgcaaatgtcatgacaccgaaagtcacggtatctgttttcagtgtgccggcactttccggaatgtatgtcttctgcgccagcaaaccggcgatggctacctgacccacaatcggaatgaagcggctcaggataagcacgatgccacaagagatgttccagaaccaggtattgtcgcccagaccttcaaagccagaaccgttattagctgccactgaagtaaattcatacagcatttcgctcaggccatggaatccgggattgttcagccatcccccttcgctttccacccattcaggtgcatgtacatacaggtaagcagccagtgccgtacccaccagaatcacaaacggatgaagaagggccaccatggaagccactttcatttcacgggcttctaccttatggcagagaaattcaggcgtacgccctaccatcaggccgctgatgaacactgcgatgatgataaaggtgaaatagttcatccaacctacgcctaccccgccaaaccacgtgttaatctgcatattcagcatttcaatcataccggaaaccggcatggtagaatcatgcatgccatttaccgatccgttggaagtcaccgtggtagccacactccacaaaccggtggctccggctcccagacgtacttccttgccctccatggctccgttatcctgtgcaatacccatggcatccatgcgcggatttcctttcatctctgcaggcacgttaacacataccccgatgaggaatgcggccagcatgacacaataaatactgtatcccagtctcctgcgcttcacatagaagccaaaggcaaataccatggccatcggcagaatcaggatagagcaacattccaccatattagaaagatatgtagggttttccagcggatgcgaagagttcaccccataatatccgcctccgttcgtacccagctgcttaataggaatgatagcggcagcaggcccctgcgacacatgctgtgtaaccccttcgagcgtcgttatctccatctttccgtcgaatcccatcggagtgccttgcgttatcagtataaagcccactaccagtgaaagcggcagcaagatacgtgtacagctcagcacaaggtaattccagaagtttccgatagttttggtcgtcttttcacccagcgctttcataatgcctgccatggccgccataccggtggcagctgtaataaactgaaaaagcataatgacaaacaactgcgtgaaataagtcaggttgctttctccgctataatgctgctcgttacagttcaccatgaaagagatgcaggtgttgaaagcctgatgcaccgtctgtccgccatttccatctggattaagcggaagactgccctgaatcaccagcagtatcataccccagataaaccagaacaggttcaccaccagcaaagctttcaagaactgcttccagttcatttcttcttgcggatggatacctgagaatcggaaaatcaggttttctaccggctgcatgaaatccgaccagactttttcacccttatacactctcgccatatattttccaagcggatagcttagcactatcatcagaacaatttgcgctacaacacctaaaatttctgtattcataatacccagaattaatcaatatctactttatcagaatttctccggcttcacaagcacatacatcaaatagccgaacatgatgacactcacaataaataatgcggtatacataaaagtttctcctttcaaattcgttcaaaccagtcaatacatttataaaacaaccagaagcaggcgaggccgcctaacaaacagattaaaaatcccactgtaaatagttccatagttttttctttttttcgataaacaatcagttaaattcacggcatacgtagggcaaatggtatgccacaatttaaaggagattcataatcaactgataatctaattgttataaaaatagtaaaagaaaaaggcacaaaaaaagccttctcaaattgagaaggctcactattattttgaaatatcaaaatgataaaaacattcctatacggaaatatgataagcttctattttacggtaaagcgtggccaggccgattttcagcagacgcgccgcttctgttttgtttcccctggtatattgcagcactttcgtgatatgtttctgttcaatcactgccaattcaaactcttccttaccctgctcttcgtccattccggcacattgcaagtcaatcggcaagtcctgcacggtcacttcttcatcgcagacaatggcactgcgctccatcacgttcttcagttcgcggatattcccccgccactcagctcctttcagtatgtccaccacctcggaagtcatccccttgatttctttcttcaactttgtagagaagcgtttcaggaaagtctctgccagcatttcaatatcttctttccgctcacgcaacggaggcagatgaatctggaacaccgacaagcggaaataaaggtcctcacgaaaatgcccgttctcaatttcctttttcaaatcgcggttagtggccgagatgatacgtacatccaccttcgttggcttggtatctcccaccttaatatattctccggtttcgagcacacgcagcaaacgcgcttgcaggtcgaaggccatttcaccgatttcatccagaaaaaccgtaccgtgatttgccacttcaaacaggccgggcttgtctttcatggctccggtaaaggctccggccttgtaaccaaagagctcactctccagcaagtctttgctgaaagccgaacagttgatggccataataggatactgactgcgagggctcgcgtaatggatagcgtgggagaacacttcctttccggtaccggtttcacccgtgagcagcaccggcacatccgtatcggccactttccgggccagcgcaaccgcctgcttcagtccgttggaacttccgataatcgaatcaaacgaataggatacgggaggagcgacctttcctttctttttttctacctcatccaccgcacgactgattgtcggaataatcttgcggttgtcatctcccttagttatgtaatcaaatgccccgttcttaatggcctgcaccccatccggaatattgccgtgagcggtaagcagaatcacctccgcttccggacgatgtttttttatctcccgaatgaaatcgactccgtttccatcggggagaaacacgtcacaaagcaccacatcaaacggttgtgctttcagcagtttcaatgcactctggcagtcactcgctttccacaccttgtagccttccagctcaatcatgcgcgccagcaggttgcggatgggatcttcatcatcaatcactaaaatctggatcatatcagtacaaataaatcaggaggagccgaaaaataagccctcacctattaaattattgcaaaaatacgaaaatatcgacatccggtccaaacattcacgttttagagtgatagatgtccgaacttttgcagaagtaagccgtaatttgttgaatgataaaaaatgagacatacattttttaaatagcccataaatcattaattatcaaatacataaaaagcatttataatctcttttcaagataccttgacgttttaagcagaacaccgaagcgttttgcatgaaacaccaaggcatttcagataaaacgctccggcatttcacttaaaatgtcaaagcgcttcagtcccctcaaaaataaatattcacaggcattaggaatattacaaagacgttactaactttgcgccacaatttgtgtaaccgcatgaagttaatattgataacaacccctacttattttgtagaggaagacaagatcattactactctgttcgacgagggactggacatactccatctgcgtaaacccgacacggctccggtttatgcggagcgtctgctaaccctcattcccgagaaataccacaagcgtattgtcgtacacgaccatttttatttaaaagaagaatacaaacttaagggcattcacctgagccatcgcaatccgctgattccggataattataccggacacgtaagtgcatcctgccataccttcgacgaggtgatggccgacaagaaaatgtgcgactacgtattcctcagcccgatattcgacagcatttccaaagaaggctatgcatcggccttcacatcggaatccatccgtgaagctgccgagaaaggcataatcgacaaacgggtcattgccctgggaggtgtagacgaaaacaacctgcttcaggtgaaggatttcggcttcgggggagccgctatcttaggaggactgtggaacaagtttgaccccgcttcagactacaattatcaagaacttatcgctcatttcagaaaattgaagcgactggccgactgagtcattcgctaaaattctgccggaaacgtttgtccggcttaaagaaatggcgtacttttgcagaaaataaggcaatattatctatttttacaatgagcgcaacatcaccttttaaggtattctctggtacaaactcgagataccttgcagaaaaaatctgtaacagcctgggctgtgaacttggtaacatgaacattactcatttcgcagacggcgaatttgcagtttcctatgaagaatcaatccgtggacagcatgtattcctggtacagtccactttccctaactcagacaacctgatggaactcctcctgatgattgacgctgccaagcgtgcatcagccaagagtatcattgccgtagttccttacttcggatgggctcgtcaggaccgcaaggacaaaccgcgtgtgtctatcggtgcgaaactggtagccgacttgctgagcgtagcaggtatcgaccgtctgattaccatggaccttcacgctgaccagattcagggattctttgatattccggttgaccacttgtatgcgtctaccatcttcgctccttacatccagtcactgaacctggaagacctggttatcgctactcctgacgtgggtggttcaaaacgtgccagcacatacgctaaatacctggatgtgcctttggtattgtgccacaagacacgcgaaaaagcaaacgtagtagcttccatgcagattatcggtgacgtaaaagacaagaacgtaattctgattgacgacatggtggatacagctggtaccatcaccaaggctgccgacatcatgaaagaagcaggtgcacgctctgtacgcgctatcgcttctcactgtgtaatgtctggcctggcttctgaacgtgtacagaactctcagctggaagaaattgtattcactgacagtattccttactcacagcgctgcgctaaggtaaaacagttgtctatcgccgacatgtttgctgaaactatccgccgcgtgatgtcgaacgaatctatcagttcacagtacgtaatctaaaaaacagtaccgggcattttccgtaaaggaagggtcccgtcaccataaaggatttgcagtccggtttctcatcggcttgcaaatccttttcctttgtcctattcattcatcacttgattcccgtttacccatgaaaattctctggctcgacctgaacagctcgtacgctcacgcctcactggcccttccggccttgcacgcacaagtcatgcacgacccgtccctggaatggggagtggtgtcggctactatcaacgaaaatccgggcatgacagccggagaagtcgtacgtcaggcaccggatattctggcagctacctgctggctgttcaaccacgaagtgctcatgcacgtcatcagtcgggtgaaagccatgctgccccgttgcgtggtggcactgggcggtccggagtttctgggacacaacgaagacttcctgcgcaccaaccgctttgtagactgcgtattccggggagaaggtgaagagacttttccgcaatggctcgcctgctggcagcaaccgaaggaatggacccgtatcacgggactctgctttctggatgcggaaggacaataccatgacaacggcctttcacgtgtaatggctttcgacaagctggtgaatcccgaacaaagtccgttcttcaactggagcaagccgttcgtgcaactggaaactacccgcggctgtttcaacacctgcgcattctgtgtgagcggaggagaaaagccagtccgtacgctttccgtcgaggctatccgcgaacgtgtccgattgattcacgagaaaggcatccgtaacatccgggtactcgaccgtacattcaactaccagagccaccgggccaaagccctgttcgacctcttccgtgagttccccgacatgcgtttccacctggaaatccatccggctttgctttcagaagaactgaaaaaggaactggcttccatgcctaagggactgcttcacctggaagcaggtatccaaagcctgcacgaagaagtgcttaccgtcagccggagagccggcaaactggccgatgcactggagggtctgcgttacctctgcgcactggacaacatggaaacgcacgccgatttgattgcaggactgccgctgtatcacctttcacagattttcgacgacgtacgcacgctggccgaataccgtgcgggagaaatccagctggaatctctgaaactgctgccgggtacggagatgcggcgccgggccgaagagcttggcatctgctattctccccttcccccttacgaagtgctccagacccgtgaaatcacccccgacgaattacagacagcccgccagctatcgcgtctgctcgacggattctacaacgcaccggcctggcaggaaatcacccgccgtctgattgtggaagagcccggctttctgacacgtttcctggatcacctgattcaaatcgggatcatcgaccagcccatgggactggagcgacggggtatcctgctctaccatttctgcaaggagcactaccctcatttcctgaccgccatgagccgggcatggattgaagccggcatgtcactcaagaaggagccggccgaacgggtacgcacaaagcacgtcactccgcccgaagcgtggacggtgtgcacgggtacgtaccgcgacaacctccgcctgtgcaagcttcctgcttccgaagaaggccgctgctactggtacggcttcgaaaccgaaagccagcaactccgccccgtatttgctgctgtaagtcaggaataagcctcccgttccatcaaacaagcaccatcatctttcatccagccagtactgccaagggagtactgcagtactttcagggaagtactcaagtactgcctaagaagtactgaagtactgacagggaagtactggaacctgctctttcctccctgaaaagcactccgcaagagggggaaaatcgcttcggaacattaggaaaattggcgggcaaattataactttgcctgaattttcaactagactatgtatatattccgatcgattcacgaaattatcaataccattgcggcggccaggggactgctcacggaaatgttcgagaaacgaaagatgctgagtttccgctattccgacgcactggcactgctcaaggacgatgaaaaccggttgaaactgctcatagagaaagaagtcatccgccagaacggcaacttcgtggaactggatgcccgcttcctcgactttttcgaactgctcctcgaagcgaacgaggaaatcaacacggccatcatcgacgagaacattgccttcctgcacgaactgatggactactacgagaaggagcagattgcctcgcgcaaggagagctatgtgcgcaacatcaagattaccttccagaagattgcgcgtaccaccatccgcaacatcatgaacctgcagagcagcatcgacaatgcgttcaagcacgaaccgacttaccagataaagattgccaagctggagaacctggacaagaagcggattcacatccagcagctgattgataccaccgaaaacctcatcctgcacgaggaacggcggtttttccagcaggctaccgacgaggaactgaaccgcatcctgctggaactgcgtagcgagctccagctctcggcccacagcctcatccgcgcccagcaagacatcatcaactacctgaaccagattaagagccaggtgattctggtagagaaaatccggaaggtgaagtacctgcaagaccagtttgagctgcgttcgcgaagcaacctctcggaagtgctcgaaagggaacattccgtattggtggaaggcagcgtgccgtcttcgttcaagctgtcactgccctacctgagtaccgacgaggcacgtcctgtcatcctgaaagtgctgcgcaacctgcagtaccgcgagattatccgcagcaacgaggcgggcgccttcagcgaggaggacatggaatcgcaggccatgtaccaggaggtcatcgacctggaggaaaccctgagcgactacatccaggcgcaggcacaggcccgctggaacgatgcgtcggctccggaagaagacctcttccactacctgatgcactacaccttcgcccgcgaagtggacgagcaggaacgcaccaccttgttctgccagatggtgtcgctctacgaaaaccgtctccgcatcagcgaggcattcggcctgtatcaccagtacgaatatgccaaggtgtatccggccaactcgtaacccattcatccctatacatttgacttatggaactgaacatacatatacctgacaatactgcggccttgttcgactgcctccagaagggacagttcatcagttcgaacagctgcaacgaaaccgtacgcgacatgtacgaccagatagacgaccacttcgaagcgctctcggtctacttcgcccaaatcggctacaccctggaacggggcaacgaatacttttacttctcgcgcgtggaaccgcgtaccacactggaacagaaaatcatgcgtgcctactactggattgacgtgctcgacctgttcaagacctacgacgagactttcggtgcaggtttccgcttccagcccgaacagattctggtggaggccaacatcaacgtgatgctgcaaaacaagctcgacgggctgcgcaagcatttctccgacaaggacgtgcgcaaggacgtgctcgacaacctgattcgccagctcaccaaggagtcttttctggagctggagaacgagaagaccaacacctacaaggtgatgagttcctggcactacctggaacgcctgattgaaagtatccaaatttacgacgacactgaaacggaagacaatgagaaacctgaatagaatcatctttatcaacagcgccaacattccctatgccgacgacatttacctggacgggaatgtgcacttcatcggcacgcagggagtgggaaaaagtaccgtactgcgcgccatcctgtttttctacaacgccgacacccagaagctgggtatccccgtagagaagcagagctacacggaatattacttcccctactccaactcctacatcatctacgaggtaaccaccgagcagggagcgttctgcatcctgagcttcaagtcgatgggccgcgtgtgctaccgtttcattgactcgccctaccgcatggagttctttgtcgacgagaaccgcacggcctacagcggcaacgaccgtatccgtgccgccctcgaccagtatggagtggactactcacgcatcatctatacctacgacgaataccgtaacatcctttacggcaacggggcaggtcccgaaatgagccgctattcgctcatggagagcaagcagtaccagaatattccgcgtaccatacagaacgtgctcctcaactcaaaactcgatgcagagttcatcaagaagaccatcatctcgtccatcaacgaagacgagaccgccatcgacctgaacacctacaaggagcacctgaagaacttcgaaacccgtctgcgcgacatcgaagagttccagaaacgcgaaacgcagaaacaggccaaagaaatcacctccctctcggcacaggtgtcacgccagcagaccgccctcgtgcagggttgccgcgaactggccgctacctaccgccttaccgaaagccagttgcccaaggccgaggaacagaagcaccaggctgagaaggcacgtaccgccctcctcacccgccgtcaggagttgcaggaacagtcgcgccagcgctgcgacaagatgcaggaggcactggccatcctgaacaacgagttgcaaaaggcacagcagaaggaaaaggaatatgcccgccgccagatagaagaaatcatggagcgttcggcccgcaaggaggagtggaagaacaagcagcagggattgcaggaagagcagcgcatccttacctcgcactacacagaaatctctaccaagtacaagtcgctcatccagagcctcgacgagcagtggaaccgcatccacgaggccaaaatcaagcagcttgagggactgaacaacacgttcaatgcccgcatcgaagaagcccgccgtcagcacgaagcggctaccgaagcgctttaccaggaatacgaacaactctcccagcaactgcatccggagcgtagcagcaagcagaacgaactgaccgccctcgactaccagatgcagctgtgccgcaaggagactttcttcgaagccgagcaggaggagctgaaacaccgcatccagtcgtacacgggtctgcacatgagcaagaagaaccgcatcaacaacgcccagctcatcatcaaggaactcacgctgaagtgggaagaagagttgcagaagggactgaaggagaaagacgaggcactgatgcagttgcaagccgagcacttgcaactccgcccgcgtatggacgaactggagaccttcctgaaaaacagcaagagcaccctgcaaggctggctcaaagagcacaagaaaggatgggaagaaaacatcggtaagctgtgcgacgagtccatcctctggcagaccaacctctcgccgaagattgtagacgagggtacgtcgttctacggcatctccatctccctgcaagacatcgagcgccacatccgctccatcgacgactatcaggcggaacatgacaagggcatcaagcgactggcggaaattcaggctgaaaccctccgtctgcaacaggagaaagaggccctggaagagcagttgaaagccaaataccagccgcgcatcaaggaacagaaagacgtgatagccgtgcaggaatacgagctggagaaactggaacagcagtaccagaaggatatgctcgacctggacgactggaagaagaaggcggaagccgaacgtactgccaaactccggaaactggaagaggaaaagcaacgcatcgccgcagaactgaaggaaattgacggcaaactgaacaacctgaaccgcgaaaagagcgagaagctgaaccagctgaagcaggaatggaaccgagtgcagcaggacatcgcgcacgagaaggatacacaggccggcagcatccgcctggaggataaggaagaacagcagcgcatcgccacggagaaagccgaatacgagcgccagatgaagcaggaactgcactcgcagggggccgacaccgaacgtctgcaacagattagcagtcagttgcgcgatatcgaccgggaactgcagttcatcaaggagcacgccaccctgctcatcgagtaccagaaggacaagcgcgacctcatcgaccacattccggaatggaagcgtgaacaggaggaacagaaacgccagctcagccaggaaaaggacaacctgcgacgggaaacctcgggtttgcaggagcagattgatgccctgaacaaggaactgcagcaggcagagaaggaagtgacacagcttcaggccaacctggaggcgtacagcaagatttcggcctacgactggtacaagccgcatcgggatattttcaatcccgagaaccccgtcacgctggaaatccacacgccgcgcacctgcctggaactgattgacgaactgggccgcacggacagccagtacatgacgctgcaaaaccgtctgcgcaaggaggtgaatctctttaccggccacttcgacgaggagaataccttcaagttcaagaccaagtttaccgaggactgggagtacatccgctttgccgaggaactgcacgactttgtggaagagaacaaaatcagcgaattcgtccgccgcatcaacaacgagcactccgacatcttcaagcgcatcagcatggatacctcaatgctcacggcttcggaagacgatattcaggacctcatcggtcaggtgaacaagggattccagacgtgcaacttcgtgggcgttatccagtgcatcgaaatgaaggtggaagaaagcagcaaccgtgtggtaaactgtctgcgtgccatccagaagtactacaacgagcatgcctatgacctcacaccgggcaccaacctcttctcgtcggaaaacgagcagctggtaaagcaggaggccatcgccctgctccgcgacttcatcaaggagattcacgcctaccgctacgacagcatccgcctgtacgactcattcgagctgcgtttccgcatcatcgagaacaacaacgacacgggcttcgtagagaagctgtcgaacgtgggttcggaaggtacggacatcctggtgaaagccatgatcaacatcatgttgctgaacgtgttcaaggaaggggcttcgcgcaagttcaaggacttcaagctgcactgtatgatggacgaaatcggtaagctccatccgaacaacgtgaacggtatcctgaagtttgccaacgaccggaacatcatcctcatcaacggatcgcctaccgaactgaaccgcgatgcctacaagcatgtgtacctgcttaccaaaggagcgcagagcaagacacgcatcgcccgacttatttcggaccagaaattataggcttttcaacctttaaaacagggttgaaaaaacgcctttgtgttttaacttaaacgcctttacgttttaggtaaaacgcaagggcgttttactttaaatgcacttgcgtttgaaagcaaacgcttaggcgttttagaagtgcttaccatgattccaaataatagaattttattttacaaatcagaattttattcttatctttgccacatgacaatcgagtgaatctaatgagaatatttacagaacaagctataaaagaatatgcagaagcgcatcctgatgcaaaagtagctttgcaagaatggactaccatagttaaaagaagcgaatggacttgctttgcagacgtaaaaaagacctttaatagcgtagataatataggtaatcaacattatgtattcaatatcaaaggcaatagctacagactgattgtagtgataaaattcactataaagttcgtttatattcgttttataggcactcatgccgagtatgataagatagctgattgttcagttttataattaaacagaatcggcaattaccgatcaaccaagagccatgacaaagatagaaacaaaagctcaatacgattgggcagtaaaaagagttgaggaattacttccactggttacagatgaaacccctctggataatcctcacagtatagagttagaattactttctaatctcgttgcagattattctgaggagcatttcgcactgggagaaccaacgctggttgatgtcctcaaacttcgtatgtatgagatgggacttaatcagaaatctttagcaaaattaatcggagtcagtccttcacgcttgagtgattatatttccggtaaatgtgaaccgaccttgaaagtagcccgcgaaatcagccagaaattgaatattgacgccaatatagtactgggtgtttaatatgagtatagaaaacagaaaaaccgcttaattcaccatggaataagcggttttaagtcggagccgaaagcgggactcgaacccgcgacttactcattacgaatgattatctaagaataatataa

SEQ ID NO: 3809 - DNA, 14258 bp, Unknown
  gut microbiota DNA sequence
aaatttagaaatacactatataaaagaaaagtgaaatataaatacggcttttaactttttaaatatattttttaacgttaaatctatgaataaaaaatcactaaaattagtaagcgcaatgctgtttctatctggacttcctagcggatatatccaaacggcgcttggtacgaccgttgcaggaatccaagtcatacagcagaacggcacatgtacaggtatcgtgacggaccagaacggtgaaaccgttatcggggcatcagttgtagtcaaaggtacaactaacggaaccattagtggattagacggggactttagcatccccagtgtgaagaaaggtgatgttatcatcatcacttatgtagggtatgtaagccaagaaatcgtgtgggacggaaaacccatgaaagtcattctcaaagaagattccaaaaccttggacgaggttgtggtagtaggttacggtaccacatcgaaacgaaaaactacttctgctgtatctcaggtcaaagccgatgatatagccaaggttcctgtgcccaatattacgcagagtttggctggacgtgcacccggtctgattgtcacccagtccggcggtggtgttaatgccaaggcatccatctccatccgtggtggtggaacccctctttatgttatcgacaatatcatttgtgaggaacgtgacttccagaatctaaatcctgaagatatagaccaaatgtctattctgaaagacgcttcagcaactgccgtttacggtgcccgtgccgccaatggtattgtcatggtcactaccaagacgggaaagaccggaaaactgaacgtggactatagttttaactatacactaagccaacccgcagacttgcaggataaagtggattcatacacagctgcaaattatgtgaaccgtggtctggaatatgatgggcgtgcaccacaatatacgcttgaggatttggaacttttccgtaatggaaaggacccgcaaggacatgctaacgtggactggcaggatattaccatgcgtaatttcgctcctgaaatgcgccataacctgacacttacaggaggtagtgaaacaatgaaaatctatacaggtctgggatattataaccaagagtccatctaccgcaccaattccaacaatatgcaacgttacaatttccgtactaatatggaagctactttaaaaaatataggtttaaaagtggctgccggtgtggatgcctatattgtagatttgaacgagcctgccacagctagcggacgtggctattataccacttggtctcacattcagaacaagagaccttgggaaccggcctataaccagttcggacagatatatagtggcacaacagacaatgctttggtcgatatcagtaatgaaggcggctattacaaagagtccaaatcttctgtgcgtggcaatctgaatttggagtgggcagtaccttggatagaaggactgactctaaaagctttgggaagctataccatagccaatgaccgaaataaatcgtggaacaaatcggcccagacttatgactgggaaggcaacccggctaccgccaataaacctagtctgagcaaggaaacctattaccaccgcaacttcaatacccagttcttcgcagactacgcacgtacattcaacaacgttcataccattggcgccactttcggtatggaagcaagcggtcaggactatgacaattcgggactttcgagaaaagaatatatctttgatgtggatcaaatcggttccggtccggttgaaactatggaaaactggtccggtgaaggagtcggttatcgtcgtgccgccttgattggccgtttaaaatatgactatgcagccaagtatatggcggaagcaaacatacgttatgacggaagtgactattttccatctggaaaacgttggggggcattcttttccggttcagtggcatgggctgcatcagaggaaaaattctggagcgactgggggctgaaaaagatttttgaccagttcaagctgcgtgcctcttacggtgaaatcggccaggatttcttggatctgaacggtgactatgtagctgaccgttttgcctatgtatcatcctatacattgtacacacgcggtgcttttctaggtgaaaagtggtatccgagtttctccgaaggcgcactgatcagtcctgacatgacttggtacaccactaaggacttcaatctaggaatcgacttttcctcactgaacagtcgcctttccggttcgctagattacttcgcaaaggtgacaaccggttatttggcaaccccttccaatgtcggttatacttctccgttaggaaagacattgccagtggtgaaatccaatggtgagagtatccgtcgtggatttgagtttgtgctgcaatggaaagaccatattggtgatttcaactatggagtatccgccaacatgacttactatgacgaccgctggaacgtcaatcccaatgaagctgaaacaggcgtgaaaaatccatataagcgtggcacacaagttggtgcatacacgggcatttattataaaaatttgggatattatacagattacttggatatcttgaacaacccaaagcgcaatggttccaccaatttgatggcaggagacctgaaatattatgacttcaacggtgacggaaaaattgatggagacgaccaataccgcatgggtaatggaacaagtccaagggccaattttggtatcaatgtggacatgagctataaaggatggtcattcaatatgttgtggcagggtgccacaaattataacatttatgtggatgctatcctaatgggaggtaacagcaattacctgcctgtcatctacgatttccaaacggatatatggtctcccgacaatcgcaatgcactttatccgcgtcagcatgcgtcagcgggtttcaacggaaacaacaattttgtcggcacagacttttggctggtagatgcgcgctacatcagattaaagaatatgtctatcgggtatgattttaagcacaaactgctgaaaaaagttacttggatgaccaaatgcaacctatctttagccggatataacctgttgacattcagtccagccaagaaatggggatttgatccagaatccggttccagtggaagtggatacacctatcccatctcacgggtctataccgttagtctaaacattggtttctaatcttaatttgtattcaaatgaaaactaaaatgaaaaataaatatgtattgcctatcttactgataggaactgtcgggttacaaggttgcagtgattttctggatactgaaccgacggaaggtttccctgaaacaaccgtttgggaaacgcagggtaccgttgatgcattcgttatcggcaattatggtaacgcatacgggccatacgaaagtttctccacatgggacaaaactttcagtaacaatatggtgaactgccgtgcggcttgccccagcgaagtgcgcggactgatggaaaacaactatggatgggggctgaatgaccgttttggtgccatccgtaattgtaacctgattattgagaaaatggaatcttctactattccggaagcctacaagaaccagtttacagcggaagctaagatgatgagggccatgatttactatgacctggcccgtaagggaggacgttacatttgggtagaccgtgtgctgactgagaaagacgagttcaatctcccgctgactaaagacattgtggaaagctacctgcacgtgctgacagacattcgtgaggcaattatcggtctgccggaaactgccataagcgggcgcctgactaaaaatgcagcctatgccctcctgtcagaagtgtgcctgactgcagcggcatataccaatgatgctgccgcattgcagaaggatgggaaaagtctgtatcaggaagcgatagatgccgtgaacgcgttgaagggtgtgtctcttgaccccaattatgagaatatgttcaacgagaaaggagcctattcatcacctgaaatcattcttgcacattactggagcaaagatgccacagatgtgagcggtacggatatgatcaacctgattccaaatctgctgaacagcaaccttacattgaatggttgcggtcccctgtttaagattgcggacatctttgagtgctggctggatcatacgccaagccaaaatctggtggatgattacttggtaattgaccagactaccggacaagcggtgcgctgggatgaatcttctcagttcgtcaataatacaagaccattaagtcgtgaggaagccattgccaagatcgaacataaggaagaatcagaattcaacggaggaaaatacttcaaagcatttgaggtgacaactccgggcatgagtatcagcgacctaatgtataatcaccgtgataagcgtttcgatgcctctattgtccatgacggttctgtctttttaggtgaaaatatcacaacttatacaagagggaacatgagccgctgggctacccaaaggtatgcatcagaccacgtgcctttgacaaactacagtatgcggaagtacatttatacggaatggagccctcgtccgttttataacgtgatgacggattaccataagattctgttccgttacggacgtgccctgctgaataaggccgaagctcttctccgcttgaataaagtatctgatgctgtagcggtattgaaccagactcgcacgatccatggtggactgcctgcttcgaatgcttccacattgggtgatgcatgggaagactataagatagaacgccgtgttgagttgttttgggaaggtgattggtatttcagtcttttgcgctggggtaagtacgggagagaagcgaacgacggcaaggaaccgggcggtgtcatcaacgagttgatggaaccggctacatttatcgagatcaagactgaccgtaccgctgcttatgtaggcaatgtacaattgtccaatgatgaccgcaagtttgatgtccgttcttatctgttcccgattacgaaatcggtcatccaggcaaattcagctatcagtgatgccgaccagaatcctggttgggaataatagtgtctaattttataaaaagaaagaaaatgaaagaaagaaaatttatagcaataaaatgggtactcctgttggtatgtctgccgttcctgaattcatgcgattgggaggatctgcccacttacgaggaggcggaaatcagcgccgtacaattctactaccgttggcccagcgataatgaaaaagaccctataacccaagaaccagtggtaaaagaggtacgtctgaataccaccagtgaggtaaattccgaatcagccaccattcatgtgactgtgacagtaccagaggctgggggggattttacggaagctgtccgtaatcaggtttctacaaacccactatggggacaagtgactgtatcgacagcagcacgtataactccgatagagggaagtgccgcattaggaagtccggatgactggagcacagaaagaaaattcagcgtgaaagctgccaatggaaataccaagatatggactataaaaatagtccaattgaataaataagagacagcctactgcgctggaattgtttaacataattgtgatgcaatacctgagtttgtgaaaattcgggtattgcttattatttagaatgagaagaaaaggtatcaataattttatttcgctatctttgttttgttaaagaacatattcaataaccttgtaattcgtatatcatgaagctaaccctgactgcaatttttttccttttgctggcatccgccagtatgcaggcccgacaacaggacaccgtgttcgtttccgactacggtatccgtccctatacttatgaaaaccagaccggaaggctgcgtgccgttattgacgattgcaaaaggctgaacgccaaagtgcttgtgttcaaaaaagggcgttacgacttttggccggaggatgccgttcgcaaggaatattttatcaccaacacttctacggaacaggaatgtccctcaaaggtaaagaccatcggactattctttgaagagatgcagggactgaccgttgagggaaatgacgcaacgctgatgtttcatggcaagatgaccatgatagcctttgcacatagcaaacagatgaaattgcggaacctgcatatcgattttgaacggccgggaggctctgaaatcacctacaccagggtagatgacaacggagtggaagtgagcctgcaccgtgattcgcgttatgaaatagagaatggaaagattcatttgtacggtgagggatggtgttcaagccggaaccactgcatagagtatgatccagaaaacaagcacttcttctatagtcatggatggaatacccttgctacagccaaggcggaagaagtggctccgggtattgtacgctttaacactcctgcggacttccgtcccaaggtaggcaatacgctgacggtgcgcgacattatccgtgatcaggtggggatgttcatttacgaaagtcaggacgtaacattggagaatgtgggaatgcactacatgcacggactgggcattgtcagccaatacacccgaaatatcaccatgaggaacgtgacatgcgctcccagggagggaagcggacgtatcttggcctcctcggctgacttcatgcacttttcgggatgcagcggcaagatcagtatcctcggatgtcggtatgctggagcgcaggacgaccctatcaatgtgcatggaaccaacctgcgtgccgtgaaaaaggtggatgaccggactttggaactgcgcttcatgcacggtcagagttacgggtttaatgcctatttcgcaggggatacggtggcctttgtcaaggcatctactatggaacggttcgctatggctacggtcacttcggtgaagcggctgaccgaccgtacggtggaagtagctttggaccgcccggttccccaggcactggagctggatcatgattgtgtagagaacatgagctgcacgcccgaagtggagattcgcaactgccacttcacccgtaccagcacacgcggtacgctgatgactactccccgtaaggtggttatcgcaggcaatacctattacaagaccggcatgagcgctatcctgatagagggagatgcggaaggatggtacgagtccggtcccgtgaaggatgtgctgatagagaataacacctttatagattgcgcctataacggcggacccgaaaatgccgtcatcgccctgcatccatcgaacacggtggtggatgccaaccgtcccgtacaccggaatgtacgcatcatcggcaaccgcttccaacttgccggaaatccggtgctctatgccaagagtacggaaggactggtattcaaggataatgaagtggaactgttgccagacacgaatgctaagcaaaaagaattgtttatcttgaatggctgtaagaaagtagaaattaaggacaacgttttacctcatgctttttccatcaaagatattcggttcgaaaatatgaaaaagaaatacaggaaatgagaacagacatgcgcttatgaacttcataaaaacatcttcccgtctggattctcttgacatgctgagaggccttgacctgtttctgttggtattttttcaaccggtgctgatgtcttttgggcagcagacggatttcccatggatgacttctatcctttaccagtttgaacatgaggtatgggtgggattccgtttttgggatctggtgatgccactgttcctattcatgacaggagtttccatgccgttctcctttgccaagtacagggacatttcagacaggaatgcggtttaccgtaaaattaccaggcgtttcctgctgttgtttttacttggtatggtagtacagggaaatctcctaggacttgactgggaacacatttacttatacaacaataccttgcaggcaatagctgccggctacctgatagcggcactgctgttgctgcactgtacggttcggatgcaggtgttgggtaccgccgtgctcctgctggcgtattggctgccaatgacttttgccggggactttactccggaagggaattttgctagccgtctggatgcaaccatattgggaagattcagggacgatcccacctatacttggatatggagcagcctgacattcggtgggacggtgatgctgggcacgtttgccggacagataatgaaggaagggaaaaacgacagacggaaaactgtaaaacgtctttttgtcacgggactgctactgattgcgggcggttggctgtggggttggcagacaccgatcattaagaggatatggtcatgtagcatgacattgctttctggggggtactgcttcctgctaatgggatttttttactattgggtggactataggggacaccaccgtggtctggaatggctgaaaatatatggtatgaactccattaccgcctacctgctgggagaaaccgtgaatttccgttgtgtggttcattctgtttcttacggtctggaacagtatctgggaacatattatcccgtatggctgacagctgccaattttatatttctgttttttattctcagattcatgtatctgcacagaatattcctgaaaatttaaaatgttgaaaagaatgaagataggaattatatatttgacaacagaagcctacaacaaattctggaaagacttttattgtatatgtgagcaatatttttgtgtggatgcagagaaagagtataaactgttcactgattcacctgaaagtattggttgtgcttcttctgctaatgtatatgttcgtcagatagaagatttgggatggatagtcaatacatcctataaatcggaatacatttgtagtatccacgaagaattgggaaaatacgattatgtgttctatatcaacagaaattttcaatttactgcccccatttatgcagaagaagtattgcctgatgcatccaacggctatctgacggctttatctttcgaccattatttacaggtagatattagaaatatcccaacgactgccagcccgattgtttagcatatattcccattggtcaaaggaagcgatacttccaaggcgttttttatggaggaagaactagagaaatacttcttttgtcagattggtgtagagaaaccattacacaggatttcaataaaaaatcgtggcacgctttcatgatgaatcctatattaactactacatattggataagagacttaaagtagatggcaaaatggtgataagaaagaaaaattatgcgattatccgtgtatattctgaagcttcaaccagggaagcagctgataaaatcggacaaaagataataggtatagtttatagcttggcaaaataatttattaatcttaaaaacttattgaaacatgaaattgaagaaaatgttagccgtagcattgctggcaatgtcggctatgggattccaaattgtcaatgcacagtcgttgtcaccttctagcaaatggcattgggacaagggtactatcgtgattgacactccggaacgtcctgctggtcaggaacacgttttgggtttgacagccgctcctatcaagaccgtacgtgtaggttttgtaggcttgggtatgcgcggtccgtcagcagtaatccgtttctgccaaattcctggggtagaaatcgttgcgctctgtgactatgaagaaaagcgtgccgaagcacagcagcgtcacctccgcaacgcaggtttggctccggctgccatctattatggagaaaagggatatgaggaactctgcaagcgtccggacgtggacatgatttacattgcaacagactggaaacatcatttccctgtcgccaagtgtgcaatggaaaacggcaaacatgcggctattgaagttccttcggctatgaaccttgaacaatgctgggatttgattgatttgtcagaaaaaaaacgtctccattgcttcatccttgaaaactgctgctacgatgactatgaaatgaagtcgttgttaatggttcaggacggtatattcggtgaagtgatccgtgcggaaggtgcctatattcacgagttgtctgaattctggcagtattactggaaagacccgaatgacaatgataaggacaaccttcattggcgtatgaagtacaacatggaaaaccgtggtgacctctatgctactcatggtcttggtcctgtggcacaatgtatgaacattcaccgtggcgaccgattcactaccttgattgccatggatacagaaagcttcgtaggcaaggaatgggtagaaaagaacacaggtaaggaaccgaaggaattccgtaacggtgaccacactactaccttgatgcgtacagccaaaggtaaggtagtggaaatccagcataacgtgatgactccgcaaccatataaccgtttgttcaaactcactggtaccaaggggtatgctaccaagtatccgacagaagaatttgccattgcaggcaatgcactcaaaggtacagatgctccgaagatggacaacatcaacgcccatggtttcttgagcacagaacagaaaaaagcattgatggaaaagtatcgtcacccgattttggacaagtatgcagaaaagggacgccacttggggcatggtggtatggactatgtgatggattcccgcctggtctactgtttgcaacatggtttgccactcgacatggatgtgtatgacatggcagaatggtgtgctttgggcgaacttggtgctatctcaatggacaacaattgcgctgccgttacattcccggactttacccgtggatactggaacgaagtgaagggttatactcacgcttatgctacaccggaacaggaagctgcacaggaatcgtatgcagacgcttacactgctgcccaaaaggaagctactgccaagttgaagctttgggaactttacgatgctgcccaaaaggcagaaggcaaaactaaaaccagtgcaatcaagaaatacgaaagagtagcagccaaacttgacaatcaaattgaaaagattttaaaagctaaaagtaatttttaaaaaatgaaaaagatatttcaattagcaatcatggcatgtacggcattgtctgtacatgccactgactatacccgtggactttccatctggtttgacacccccaacacgttagtcaataaagccatctggttcggcaatacttcagatatgtggaaaggtgagaccaaacccgaatcggccggtgatactgcaaccaatccggatgcaggttgggaatcgcaatcgctccctatcggtaatggtagcttgggtgccaacatcatgggttcggtagaagcggagcgtatcacattcaatgaaaagaccttatggcgtggggggccgaacacctcggcaggagcggcagcctactggaacgtaaacaaacaatcagctcatatcttggatgaaattcgtcaggctttcatcaatggtgatgaaaaaagagcaatgctactgacacaaaagaacttcaacagcgaagtaccttacgaatcgtggaaagaaaaaccattccgtttcggaaactttactactatgggagagttttatatagaaacaggacttagtaccattggcatgagcgactacaagcgtattctgtctttggattcagctttggctatcgtacaattcaataaagacggtgtagcttatgaacgtaattacttcatttcttacccgaacaatgtaatgaccatccgcttcaaggcaaacaagccaggcaagcaaaatctggtattcagctatgaaccgaatccggtttctactggaaagatggaaacaaacggcaacaatgggttggtttatactgcacgtttggacaataaccaaatggaatatgtcattcgtattcatgcaacagccaagggaggtacactttctaaccaaagcggcaagctgagtgtaaacggtgcggatgaagtgatatttctggtaacagccgataccgactatcaaatcaacttcaatccggatttcaatgacccgaaggcatatgtgggcgtgaatccatcagaaactacggctacatggatgaaggatgcggcggcattgggttacgatgctttgtttgatgcacattataaagattatgcttccttattcaatcgtgtatccctgtcattgaacggtagcggaaaaacagacaacattccgactccacaacgcttgaagaattaccgtaagggaaagcctgatttctatctggaagaattgtactaccaattcggacgttacctgctgattgcaagttcacgtccgggcaacctgcctgcaaacctgcaaggtatctggcataataacgtagacggaccctggcgggtggactaccacaacaacatcaacgtacagatgaactattggccggcaggttctaccaatttggcagaatgtaccttgcctttgattgactttatcaagacattggtgaagccgggtgaaaagaccgcacaagcttactttggcgccagaggttggaccgcttccatatcgggaaatattttcggctttacggctccactcgaaagtgaaaacatgtcatggaacttcaatccgatggccggtccatggttggctacccacgtttgggactattacgactatacccgcgacaagcagttcttaaagaaaaccggttatggtcttatcaagagtagcgcccaatttgccgtggactatctttggaagaagccggacggaacttatacagcggctccatccacttcaccggagcatggtccaatagaccaaggggctactttcattcatgccgttgtccgtgaaatccttttgaacgccattgatgcatcgaaaatattgggcgtagataaaaaagaacgcaaacaatgggaagaagtgttggaaaaactcgctccgtatcaaataggccgttatggtcagttgatggaatggtcgaaggatattgatgatccaaaggatgaacaccgccatgtaaaccacttgttcggcttgcatccgggacacaccctttcgcctatcactacgcctgaacttgccaaggcctcgaaagttgtcttggaacatagaggtgatggtgctacaggctggagcatgggatggaaactcaatcaatgggcacgactccatgacggaaatcatgcatacaaactttatggaaaccttctgaaaaatggaacactggacaacctttgggatacacattcccctttccaaatagacggtaactttggtggtacagccggcgttaccgaaatgttgatgcagagtcacatgggattcattcatctgctcccggcccttcctgatgcttggaaagacggtgaagtgaagggaatctgtgcaaaaggtaactttgaagtgaatatacgttggaaaaacagaaaactggaagaggtggtaattctgtccaaaaatggaggaacctgcgaaattaaatatagacatgcaagtattaagttaaagacagcaaagggcaaaacatattgcttgaccaatgaaaacgacgaattagtattggttggttgttaaattaataattcaagggcgggaaatggaaatgctgttttgatgcattctcattactccgtccttttttcaaaagtatttaaagtttgaatctacatgaggaacgctccgtaaagttatatcagctagttacatcttcatcttgatgttgcttagagaaattttattcacatttatttatgaatggaaacaaacagaaaaccataaggaggaagttcaaaaaaaagaatgcttcgtcggaatgttcatggtacctatgccttgaaggtggacatgtccctttattctgaaaaatatcctgaattgggaaaatacagatacggtactatattattccaagaggttggtcatagacagcctgcttgcagaatttaaccaatgttatacggaaggtaggatagacgaaatcaggcagatgttggttgaaaaggaaaagtaacttctagaggtttggataattataaagcgtcatgaagtctctatgaacagatgacactgcgttttacatcccctccctatagtttataacgacataccatcagaccaagccccatatttttttgtgaagttattctcttattcctaaaaaatcgtatctttgtagtcagaaagttgtttcataagtatgaagctgtaaaatat

SEQ ID NO: 3810 - DNA, 21746 bp, Unknown
  gut microbiota DNA sequence
tatatgcagtataagcctatatcactgcattataaacaaaaacatatcaccatgaaaaaacaaatgaaacaaattgccttacctctctttctgggaggtttgatagcatgcagtcctaagactgccgtaaacgaaactgacttgttgggcaactggacagaaatacttcctacttcatccaacttcgtacaaggaatgacactggcaaaggaaggaaaagcctcctccatcggcatggccactctgcaatatgaaagctggcaacttctgccggacggacagctcattctgaacggaaaaagcatcggaaacggacagacaatttcattctcagatacactggccatcctgtctttacaacaagacactctcacccttcggaaaggggccgattatcagataaaatatgtacgccagccggaatcagcacctttagtcggaacagacaaggcttctacgggatacacctggtcggacgtattacaaaaagacatccggatttttgagacaggacaaaaagtactctcttccaccgacagccaggcaacccaagccggcttcttagtgtttgcaactgattcttcaaaggtagaagtgttcttacctgataccaaagtcatactcgaccgccgtgtgcgtcctgacggcattgcagtctggaacgtagaagacgacgacacctatcaggtgcaagcctgtgcagactcctggattgtatccagaagaggacggctactttataacacgcacggaaccgataaaaaaatagaaacctccttcctcaccgaggaaaagacagaaatccctgtggcattctatccgcatgaagccctcgctgaagtctgtctggacggacaatacatgttactctcgcagtaccgcacagcctcaggttacggttacaagaataccattctcgatttgcgtggcaaaggaaaagaagctacactgacacgtagtacagacggaaaaaccttccagctaacagaaaaggactaaaaacagtatcgtatgtggatgaatctacttttattaatcggcggattagctttgattttaataggagccaacggactgaccgacggagcagcctctgcagccaaacgctttcgtatctccgacctggttatcggattgaccattgtagccttcgggacctctgctccagaactggttatcagcgtactctcctcactacaaggaagtgctgaaatggctatcggtaacgtggtaggaagtaatatcttcaatgtgttgatgattatcggatgcaccgctctggtcctccccatacaagtggggcagggcactatgagtaaggaaattccgctggtcattctttctgcactggtactcacctgctttgccaacgactgcatactcgatggaggaagccgggacatcatcagccggatagacggactggtactattaggcttcttcctgatttttatgcgttatacttttgccatcgcccgcaacggaaacgaagatggtggcgaagagcagaaggtgaaggaactgccggcatggaaatcagccctatatattataggaggactggccggattaatttttggcggacaattttttgtagacggtgcctgcggtattgcccgttcattaggtgtcagcgactctatcatcggacttacactggtggccggaggtacctctctgccggaactggcaacttccgtcacggcggccttgaaaaagaatccgggtattgccattggtaacgtcatcggcagcaacctgttcaatgtattctttgtattaggatgtagtgcaagcctgtctcctctccctatgggaaatatcaacaacatcgacatggctgtactggtaggctcttccattctgttctggctggtgggttggttctttaagaagcggaccatcacccgcatagaaggaggactgttagtagtatgttacattgcttacacggcctttcttatttcacaacaataaagaaccttgttataaatattaatcatgaaaagaattcttatccctttggcaggcctttgcttattgacagcctgcaatccgtcgtctaaaaagcaagccggagattccgacattcagacggaactaagtgaagtattccccgagaatccctccagagaaggctatgaaggcttccaatggcagactgtcacgggagccggtttacggctgtgggcacaatgcaacgaaaacctacgtatcgtcaccgacgcttctattccgggtgcacgcatagaacgtatggaaaatggccacaaacaaacttcggacccggttattcagatattggatataccgggcaaggacatccattcacttatcccgttcctgcagtctcacccacgtattttcatggataaaaactgggcggacagcctgacctgcgatttccgtgaagtaaaatccaaccgtgctggagtaacccgctacattctggagcccaccgggaagtcagcgaaaaaactggctgaccgcggccagcacgaacctgtaccctttacttgctatggatggggagtaggcaacagcggaacacgttatttcgaggtattccacacccatccccagaaagcagtcttcgttgaggtgggacaagatatgcctttgtttgatgagcagagcatccagctattcgattccattcaggtactccacggacaacttatcatgggacacgaagcctacagcttcactcccgatgcagacactacggcctattggattgttgacaagtcgggtgaactgaagaaacgctatgaagcagctcttccttccgatgcaaaaccctatacagccataccagccaaactaaaagtccgcatccagggcccttcttccgagggttttgcagctgagtatgcaggcgtaatggaagtaatggaaattaaggaagtgagagaataatacttctcttgacaagaaacagtcttttacacaaaaaaggtgaaaagacttcacagccttttcaccctgcctattaaaaagagagattttattttttatagatgtgttttccttcggttactacctgagaggggttaccggtatagctaatacttccgctgccatacgtttttgccgtaatggaacgagaggcacggcaagacaaatcacccgaaccatatacagccgcatcgactttaacggctttcaggttatctgccgacaaatcaccggacgcattgtcacgaagtacggcttcctggcagctgccttttatgaccatatcgccactggcattgaccgtagccgtcaccacttcctgacattgcaaattaggcaccatcaaatcgccggatgcattgatggtcaaagacgcatgctgacatacggctttgtgaaccgtcatatctccgctggcattgatactggcctgtaacttctggcagttgacttgctgtacatcaatgtcaccactggcattgatttcagactgaaaactactgcactgcaccgtagggcattcaatatcaccgctggcattcgtctgaaaacgtatgtctccctgtgttttcaatcctttgggaatagatatatcaccggaagccatcgtggtaaaacgactgacagagggtgcatatacatctacccagcaacggttctcaccctggatgctggtaccgtcctgataataaaccctcagttcaccttttgactccttcagtaccacatagggcatgacattgtctgaagcatagatttctgcatacggactgccggaagtctgatgatacaccacatcgatggaagaaagtgtagacacttcccgtatatcacccaaagaacgtttttccgtctggtagtttttactcggctgaatagtatgagcagttcctatacagctgaaacaggtcaaggcacaagccaatgtgagtatgttcattctggttttcattattctatctcctttatttttatagttatacattctatttattctgttttcagattttcagtcggattggcccgtgccgctttccataccatcccgaaggctaccaaccacactaccagacatacgataaggatacatccggcaaacaggtaccacgtgaggtctatcttgacagcaaacaattgcaaaagctgttcacctaccttccaggcgcacaaagcacctatcactacagccggaagagctatcttcaataaatcaagcaggaagattttctgcacgtcggccatggaagctccgtgaataaaacggatggcaatctccgaacggcggcgtgacacttcatcgcgcacatacgccaccagtcctgtcagagcaataatcaggatacacaagcccgcaaagagtacactgttgcgtacatgcaacacggcattataaagatttcccatctcgagcgacaagctatataccttcaactgttgggaggaaatggtacggtcgattacttgctgtacttctttcatcgcttcaggtgacatccggttcaaggctacatacaaataactcgaaggtttatttcgatagaacatcaccgtaggacgctcgtcatactcttccatcacttgagagcctaaatgaatatcttcatacaccccacaaacaatagcaatggttccatgatccgcgtgttcggtaatatataccgtcttcccaatgggagagcccgtccatccggccaatgtttccatgcgttccacgaaccgacggctgaccattacctgctgcgacaaagtatccgtcagtgtaggagtaaatacattaccttcgacaaccggaatctggaaagccttgtgataatcgggacctacataatacatgtcggcaatgttcatgtattcttctcctgtgtcgggattgtacacattatttccactacaatgatccgacaggagctggtaaccccaggtaaccgcctttacctccggcagttttttcaactcctgcacacagcgttcccgttccaccatctcggtgcccgacaagttggtatacaaagtgttccggtattcaaatccagggttgaaattcatcaaagtgttatactccaaccctatgaccgtcagcaggcagacaaagaatgtggtcaacgcaaactgcaagcacagcagtcccagtttccacctccgtttgttttccgtgtaacgacgataagcgtaagtcaccggaatacgggtgtaaagataacccggcatcactccgcaaagcagaattactccggccgtcactgccagacaaacccatacagtggacaaggggaaaagcgactccagactatgtcctatctgttcctgcaagaaatcctgcaagccgaaaataatcaatacagcaagtgccagactaatcagtccgtgcagcaaagattccgaaagaatcatccggtaaatgtcgccacttcctgccccatagcaacgataggtggcaattcccttggcacggctcaccatggacgaaacaaccaacagaatatagttcaacacagccaccagcagcatgataatcgcaaaactcagaaagacgatgttcatgatgcggttataatcagacgaggtaaatatttcggctaccggacggagagagagctcaaaacccgtaccagactgagccatctcttccgtcacatgattcacttccagcatacgctccatgccttccttcaagtcatccggagtagttccttcgcgcaggcggacataggtcttgtagcggtcatttcctaaccagttgctcgttccatcataagccacctgcccgatggtcggcagggcaatgagtacatccatctgcggaaggtgggtattctcaggaaaagcctcgaacaccccgactacggtcacatgaaattcgggatattgtttccacgacaatgttttcccgataatctgttcgcctgccacctccagcagtttggaagagatataggcattgttggccttttccaaccccgtataaggctcctcgcccatcagcaatttccgcggaaagacccgaaagaaagtactgtcgcagaaataagcctgtccatccagttctttatggtcttccgtcgtcagcgtcatcgacccaattcccgtaaaacgggtggccacttccaccgccggacaatagcgctgcaaccccggtccgatggcaccaggagtctgcgcgtgctctctccagtcggtgtctttctgtttgtagcgttcttccacccggtaggtttctttcaaccccggcagaaagttatcgtacgaccgttcgaaaatgacctccgccagcatgaccagaccgatggccagtcccacgctcaggcagacaatcttgaccacattggcctctccttttcgaaacagtcctttccatgcacgtttcataaggtactatttttacatttctgcaatagaagctacaatctgtccgtcgaacaaattaattacacgactggcaaaaccggcatcgcgctggctgtgtgtcaccatcacaatagttgtcccttccttattgagttcggtcaacagttccatcacttcctgtccgttcttggaatccaggttaccggtcggctcgtcggccagaataatcttcggtccggaaaccacagcacgggcaatggccacacgttgctgttgaccacccgacaactgctgcggataatgctttgcacgatggctgatgttcatccgttgcatgatttcattcacccgacgcttccgttcgtcagccggaatcttcaaataagtcaacgggagttcaatgttctcaaacacgttcagttcgtcaatcaggttaaagctttggaacacgaaaccgatgtttcccttgcgcacattcgtacggtctttttctttcagactgcctacttcctttccatccagaaaataacttccggaagtcggattatccaacagccccataatatttaataaggtagactttccacaaccggaaggtcccataattgctacaaattctttgtctcttacctccaagcttactttattcagtgccagtgtctctacttccgtggtgcgaaaagtttttgtcaggttttcaatcttaatcataatcgtattgttttatagagtttgtattttacatttcggattttcatttccatcaaattctatacaaagtccatgccagcacgttaagcacctggttatcaacacaaatcagatttacataaaaaaacaggtgtctaatttttagacacctgctgtatgattttttgacaatagtcaaacgtatatacacgaaaacgagaaataataatcatgattcggcagtaagaatttttctgtacgctcttgcataaaacgaaaaacttcaaggcaaattctctgtttcacactgtgaaatacaaaaaccacagtgtgggatacatatttcacactgtgggatacaaatcccgcactgtgaaacagagaattctttgaagcgtttcaggaaatattttaaaggatattgaaaaatatcatgccttgacacactttatcaccacatgccggtcaccatccagtgtcgtggcaaacaaatacacgtctcctccttctttcagcttccacttttttcggagttctgccaccgaagtcgggaagttacgtaccgtgagattggccttatccactccctgcaacaactgtttcagttcttttttcccaaaacctgacacctccagtacccggaaacgacgccccggaaaatcaactaatgcatcggaagtataaagatgactgtttgcatgtaattttttgacaccgaatcgtgcacccaacaaccggtaaggccccgccttcagcaaggaagcgcccggttcataaagataattttctacctcgtcagtcaacggacattgtgcttctttctcctgtgaataagtgaagacaaacggttccgctaaaaagttattaacagcctgttcacaacttatccacacctctccagagccttctgaaggggattttgtctctttttgtagcacaaccaacaactctttacactcgttattcacagctactacgtgaatctgacggatgtatttcaactcccgtaaagaagaaaaaatatctagcatgggtgaaagtttcaccactacggtccggcctttttctactagcaacggctccagtttctgcacatcgggttcgcagtcggcaatggccactgtttttcctccctgactgtcgcgacgggcagggtccaagaacaggcaatccaccggttccatcttttgcaggtattccacgccgtcggcacaatgcactgttacctgtggcaaaccaagcaacggaaaattatggcgggccagttcacacaacacttcctgacgttccacgtaatccaccttccgaaagttccgtgccaggaaagaacagtcaactcccaatcctcccgtcaaatcggtcatcgtatcaccttgcagccacgaggccttgtagcgggccgtaatttccgaagagcactgctccatggacaagtgagccggatattgcactccttccgtctgtgcccaaaggggaacctttttctcggcaatctgccagccggcaatctgcactactgctgccgccatatctacctgcggatacttacgagcctgcaaagctaatgtacgtacatcttccgtacgatgtgcacagataaactgccatgtgtcaggtgaaagtattgccatttctctattctttactatctgtaaacaagggggtatttttcttttgcttagataaagacataaaaaaaggagttccgctgaactccaacctttgttaaccttaaatctaatactatgaaaaacacgttgcaaaggtacagactttctggaattatgcaagtattgtgcacgtttacacatgttttataacatagattaaggaataaataaacttttttgatcaatctaaaacatttcacttcgtcatttaacctttaattgcaacatcccagcattaatgcctggagatgtagctttcaccttaatatatccttcctttttgccagactgcactattaatgtcaacattccattaaaaacatgcatctggggtaaatggaataaatccaaacaagtaggatctccattagcggctgcacgaaatcgtccttcaccatctacttgaaaatacacgagtcgcccatcctgcggacataaacgaccatccttatcaactattttaagagtcacataagccaaatctttcccgtccgacaccaaagactctcgctttgtagacaattctatatgatgaggtcttcctgccgtatgtatcattttttctgctacgggctctccggcttgattgtaagcgaccactttgacttctccgggttcatagatggcatgaggccacatcaagcggaaacggttctccggagtttctccgtgtttggtttgtttgccgaaactttttccgtttatgaataactcggcggaaggatagctggtatatacaaacacaggcacttcggttccttcatgcccttcccagttccaatggggaagaatatgtaaggtctccgcttttttgttccatacactgcgatacagataatagcggtctttgggaatggaagccaggtcgatgatgccgaacatggaactgtggttgggccatgaatctttatcatacggactaggttctcctaaataatcaaaaccagtccaaacaaattgtcccagtgtccagtcgtggtcttctgccagtgccaggtcaatatcggggatattagaccatacacaagcttccaaatcataagaagaacattgatgatcatcataaagtacactaaatcccttttgtacgggtaatttatatactcctctcgaactcacagtggaagacgtttcagatcccaaaataagattttgcggcaaacgctgatatgcttcctcataacgagaagtacgataattcaacccaggaatatcaatcattgcagcaaatccattatctaaaacacagctcacctggtccattccgcaggtgaccggccgggtaggatcttctctgtggcatatatcctgcaggaatttagccacccgatacccttcagggctacattgggtgggcacttcgttaccgatgctccacataatcacgctgggatggttgcggtagtgccggagcatattgaccatgtctttttcggcccattcttggaaatagcggtgatagccgtttttacatttggctatatcccattcgtcaaaaggttcaatcatcatcatgaaacccatttcatcgcacagttccaccagttccggagcaggcatgttatgggcagtccggatagcgtcgcagcccatatccttcaggagtgaaagctggtggcggagagctgatttgttgactgcagctcccaaggggcccaggtcatgatggttgcataccccttgaaacttccggtgctgtccgttcaggtaaaaacctttatcggccacaaactcgatggaacggatgccgaagcgggttgtataggtatccgtcagtttcccttcacaatagattttggatacggcctgatacaatgccggagattcaggcgaccataaggacggattcgctacaaggaaattttgtgtgaaaggctgtccgtggttgatgtggcctttattttccttggatgcgaccactttcccttccggggaaagaatgtccgtaactacggtcagttcttttgtgccggctccttcaatctgagtgcgcaggcatacagaggcaaaatccttgcctacgtggggagtcgtaatctgcgtaccccagacaggcacatgtatcttttcggtagataacacgtgcacgttccggtacagtccggctcccggataccagcgtgaagactggggcttgttctccagtcttacggccagcatgttttccttaccgtctgcatggaccacatcagtcacatcacagtaaaatgagttgtaaccgtaaggccagaagcagacttcttttccattgacatatacacgtgcttcgctcattgccccgtcgaagaccaaggtggtatgctttccttggggagccttgaatgtagtccgataccagccggttcccacataaggcagccctccggtacgtccggtttttaacgaagtttttttttccagattctgtacgacagtcacattttgcaaatcattgtttctatcaaacggaccataaatagcccaatcatgagggacggaaactgtctcccattttgtatcatcatacgtaaccaactgagctccaacgacatcttcttttataaacttccagtgctcttccaataaacattcagtacgctgagcatacccaaatatccaattagcacaggccaatatcatggccatccattttaacctcatactcacaatttaatcaattaattcaatctttactttttgatctttgaccataatatagaagataccattctccagcaaacgtttcccatcttcattcacaaatcctaaatctcgttccagatttatatcgaacgtaaagattctactttcccccgcagggatttcttttttctcaaaatatttcaactcctttaccggacgagttatcgaagaaaaaggatcagcaacaaaccataacagggtctctttcccatcataattccccacatttttcacttcgatttctgccctcaatgtatctccacgtcgtattttactagacgacaacttcaaagttccatattcaaatttagtatagcttaatccatgtccgaatgaatataatggttcgcttgtaatattctgatatttaccttgatgtgttcttccacttttacgatgattataataaataggaatttgacctgttgtataggggaaagttataggtaatttccctgatgggttatatctgccggaaagaatacctgcaacagcaattccagccgtaatacctggttgccatatttccaacatagcatcagccaaaggctctatacgtgacaaatccaaaggacgtccgcttgaaagtaatacgaccaatggttttcccgtttttttcaagttctcaagcaactcctcttgtatccgtggaagtgctataacagaacgggatgcattttctccactccaagttttcttttcacccaaacaagctattattatatctgcctgttccgcgactctaatagcttcagcaaaacctctctgttcattaccatcgaagccacatccctcggcaaacaatatattctttgctagaaatcctttttctttcttcacgccatcaaggatagatatcacatctttctcatctccatgtgcagaccatgagcccaacagatgcaaacgattattagccattggtccaataaaagcaatcttctgttcttttttcaaagggagtacacctttatcattcttcaatagtaccatcgactcttgagcaagctgttcagccacattcaaacttgacggcaataagaaacgcttgtcatccggcaatatctcggtatatggattttcgaacagccctaactcaaatttcaaccgtaatattctcccaacagcatcatcaattgcctccatagagacttttccttcctttaccagtttacccaaatgtttttgataacaattgtctgtcatatccatctctagtccagcagaaaaagcataccatgcagcttctttttcatttgccgcaagtccttgtgtaatcaactgttttactgcatcccagtctgacaccacaaatccacgatgtttccaacgtttctttaaaatttctgtcaaagtataatagttggctgatgcaggaattccactaatattattaaacgcactcatcacagttgcagcaccagcttttatgcctacctcaaaaggaggcaaataagtatcccaaagagtctgttttgaaatttctgttggaacataatcacgcccagcttcagaagctccatagcccacataatgctttaaacaagctgcaactctattttttgctgataatgtatccccttggtatcctctgactgaagcagctgcaaaaacaccattcacataaggatcttccccataaccttcagagactcttccccagcgcccgtcacgtgctacatccaccatgggagagaatgtccagtttactccagatgtaaacgcttcctgagccgctaccccacatgcatcctctacgagttctggattccaagaggcagcctgtccaagcgaaattggataaatggtacggaacccatgaattacatcataaccaaacaaaataggaattcccaagcgagactcttttacagcctttttttgtactgaatttctcaaatccgaggtcgtttcaaaataaatcagtgaaccaatctctgcaggaatgttctttacagcctctccaatattgtttacattattattccttcccaatgtatattgatttagttgatatatcttctcttctaacgtcatacgcgataataaatcattcactcttatatcaacaggaatagaaggatttttatataacgagctatcttttatataagacagatctgtgattttatcaggatggcagacagcttcgtgtgctgcccgttgtgctatatcacgatactcatcagaaacattttcaggtacaaacttattgcctattacattctttccggtcaatacttcaaaccaagtacatgcagcaatataacgtccgacatttacatccaaatgatatccgtcacgattcaaatgatctcctataaaagaggtacgggcattttgtatagctgttccggaaggaattatccgataaaaatccacaagcttatcggctttctttaccgtttccacaatagctttatacattgttatctgattgttatcatatttcttgaacccagtattcctgcaatctttagcataagcccaagtctgatgaaaaacaatcttacaacgcttatctatcctttccttgacatattcatacaattctggaagatatgtttcatacgtttcgtacattcctgagaaaggactagcctgttgcaaactcacgtaatcccatttttcatcggccaatgccctagaaatactcatattacaataatgaactttcttaccatcaagcccaattttacgataatcatacgcagccgcgtctttcctaatattgtctacatgacgttctaaagagcagccaccaataaaaaggtttcctattacaagttcataaccttctgcctctcccaattcatgcagatactgctctaccgcatcttgtgaaaaactgttccctattgaaagaatcttaattatcttagaattttctgtaatattttttgaataaccattctctaccaataatatgcaaaagcataaaacggtacttaataaaacttttatacttttcatcatttaatatattttttcttttgataataatcatgcatgatgtaccatgcctttttacgtaatccctgatcggaaagcaatccttttctattccatccactctgattagtcggatgaaaacggaaaggagaacgaaaatcaaacaatatccatggagaaactccacaaagattcggaatatgattaaacatctcaatattatctttatacaacttagcctgatattcttcactccatgaagaagccacttcttcatctccatgttgaccatacaaggcttctccaccaaattccgaaataataagcggcttgtctggaacaacatcccatactgcttcttcagggcttagaggccacggatgataccatcccatatatttattcacagccaccacgtctagatttgctgtaaaagggtcatccatctcgaaatgacgggtattcttattgaaataaacaaggtcaaatgccgccacataaagcctactgcaatccatcgaacgccccattttcagtaatgataacaaaaacgcgtttctagcatctgaaggtttagtttcattcgccacaccccaaaaacataccgcacagcgattcttatccctatttatcatctctctaagcatggtccgagccttatccaaagtacctctgtcctcaaaatctattccctgccaaataggaatctcctgccataagataatccccatcttttcagccattcgtactatatactcattttgcggataatgtgccaaccgaatcatatttacccccaaagccttagcctcattcaaaagcattgaagcatcagcctctgagaaagctcttcccatacgttgtggtatctcttcatgaaaagatacactacgcataaaaacaggatttccattaaccaaaatactcgttccattcacagttatctgtctaaatcctatttcttcctctattttattttcttcagaagttatcacaaccttatatagtcgtgccttttcaggttcccataattccaatttgcgtacttttaacgaggcccgacctacaccttcctcatttgtctggagtgtacgttcaatattcaattctgggatttcaatccgtacgtcacgaactccttttgcagataaagtaacagtagcatgtatcaaatctttttgcacactatccaatcgtacaaaataatcacggataaacaaacgtggagtagtcaccagcataacgtcacgtgttattcctccgtaattccaccaatcaaacgccatcgctggaatagcatcaaccgaacgggtattgttcacttccacaaccaaaaaattatcaccttctaataatacatctgtaacctccacctgaaatggagtaaatcctccctcatgagaagcaacttcttttccattcaaatagacacgacatcgataacttactgcaccaaaatacaagaactgtctcttatcaggagaaaggtttgccacaaaatgacgtccataccaaactgtaccttcataatattttagttctgatgattgtgaattccagtctccaggcacattcaacctaatcccgttttcaaatgaatattcataaaattcttctttagtttgaggaactctatttttataaacttccatacgacgtccctgatcatataaatccactatgacattccattttccattcaataaatggaaatctctcccatagacatttatcatagcttgttctgaagctcccaagcaaatagaaaaagtaatgaaaaacaagctaaagaatattttcttcattcccatatcatttattatttactttcaacaaatccatcatccacttccatgctttacttgtctgttcaggatacgcataatgtcccgtattttgcgctaaaaccaatgtttttggagcttttataatgttgtacgcagaatatactgaagtaggaggacaagttgtatcattatatccaaaggtatagaatcctgggacttttatctgacgagcaaaattcaccacatcataataacttgcggtgtatattcgtgccgaagtacggttcttttcatctttcaggaaatgaggccatccccctgctcttccatgtaaatatccgaccatatcacacaatgccggataataagacacaagtcctttgacccgattatccaaggctgctgtaattatagacaaagcacctccttgacttcccccgaatgttcccaaattctctccatcaaattcaggcaatgaatacaagaaatcaatagctctcacacaccccatatagacacgtttataataatatctgtctctgtcgtcaagattaaaagaatgataatttctcagagcacccatataaagatttgtatataccggaccttccatatttaccggaataccatgtatcccaatctccaaaattataactcctttttcagccctttctacttctccaagatatgcccttacgccagccccaggaagtttcaataccgccggatatctgccttgcgcctttgggatacacaatattccataaattcttgaagcataagaataattaccgaaacttacatgatatacattaactttagatgtacacctttcaggcattaatgtcattttcggattcattggttcttttgatgcttccatcttagccttctcccagaactcccaaaagtcttcaggataatttacagttggagttattttttcaggttcaaacccaacagtagccatgccttcatacttacgtccttcaacttcggcctgtaccttacaacgcaagaagcctgaagttttcatagtacctaattccaattctgtttcaccggactttaagattttctttccctcggctattggaggcatcatgtctggtgaaatagaataacttatttctgttttatccaaaagagagccgttcacaaacaccataatcttaaccttagccttttctcctattttatatacccaagaatcatggtttggaacaacctttatatttaccattctttccgcaggctgtccgaaagctgtcataaacagactcaataagacaaacagccatacatcacgtaatttactaatcatattatttccttattttatatttatacattacaaaagagttttttttaggcagttctatttctaaaacgccattatgtttcacaagagaatcttgtgttttgccatcccctaatacaagagtgcattcaatatgttcgccctcttttaaccatgtttctattttacctatattgtcctcattattctcacgaaataaaagaaaatacccctcaccatttcccttcaacgattgaaatcctgtccatgacgttccggaaggttcttcaccaactggtaggattattccggaatgaaaatcataactgatatccttatatgcctctacaagactactcaatccataggcttcttcaggaagatttgctgcttccatccaagccaaaggctgtcctgccatagaaattgcaaacagataatcaaaagaataatgagaaggtgcaaatatatcatcaccatacttatcagaatttctccatttattcaggaattctatctgtagtttttcggttggaacatatttggatagcatccataaatttctcaaagtccaatacggataataattgccccaatccgtgtaacggttttccaggaaaatatttccgtattcattaaataaatgatatcctcctcttcttccggctgtaacatccaaattgaatatatcctcccatactttctcaaacaaacaccggagattttcctctgctctctttgtgggaatattcacaccgtcaattttaaaaactcttatcccgtatttccggtataattcggttatggcctgtgcatctttttcccattcggcaaaatcattctgtacactcggattaaaccacaaacaaatttctactccaaacttacgtcccttttcaactatcggttttaatccgtgaggatattttttagggtccggtttccaataatcagggttgtcccatatattcttgaaagaaccttttgccaaagctgaattaggacttttcccaacctgccatccgtcatctatttgaaaatgcgtaaagcctaaacgagcagccttttctatctctgacaaacaaaactcttcgttcaccttggtgtcctggcttctgtccccccatgtattcatcatcaccatctcatcacgtcctttcgtcaaaacccttacattcttctgatatttccttaacaccttcaaggcatccaattcagtaccgtcataaacgcctaaaacacaactgtatgtacgtgtccatttttcaggtgaaatatctttttctgttattccaatacctgttaccataaaatggccgaattccgcaataaaatcagcacctttatatgccaattgaactcccgaacaaggagcttctttcaaaacaaaaaatcccgatttactctcgccgttttcagcaaacaatatatttccacgatatgataatttcctataaggaataaagtctcttgtccatactaaattattattccagtctgtcacatcagtaaactcaactgtctttgtatgccaatgctgtcctttgaatgcaaatcgatcaagaattgcggtcacctgagacgatttcatatctttagtagattcaatattcttattatccgcaacgtttccttgcttttcaccgaaaacgctgtttacagttccacgcagataagtatcacacccaatgaccggacaattatcataaaccctgtacacacgttgcacatccaactcacctaacgagaaagaaaccgtcactttcagaaaagccggattgattatagtctccttaacccattcagtagaaagttttccattgctggccgcatcagtattacgggtaataatcaaatcaggctgattggaataagtattttcacaccatccggacagtttattctccaatctgagtgttttcaggtttccaccgttccaaaggaaagttctttcaacacattggtttcctatatatagagtatcattttttaacaaaccataacaattttcagaagaagcataaacaagtacattattatgtaaaaagccgcaaaataaagcgacaaaaactatgcatttttttcgtttcattatataacaatattaatatttataaataacgatattctatatttatttaatacctatgaattttattctaatgcacttggcttttccaataatttgtttggtaaattgaaacgttgattatctggcagttccgatttaactcctgccccttccttcatcattttcttcaactcctgtaagtgatgctgatagatttcgcgtggtaaaacgccatattgacgacacaatgcagccgccatacctacaacttcacccatcatacctgttgtacgcattacacgaactgttcccaaacctacatgagtagtactgatattacgtccggccataaataaattgttcacattacgcgaatacagacagcgataaggtactgcataaggatgaataaacagatgcttcgtagcagccttgaactcctgttccgggaaaagttccgagttcttagggtcagggaaatgcaagtctatactccaggtagttgtaaatgaagcatcctcatggaacactcccttgtctatatcatcctgtttcaagatataatcacccataagacggcgtgattcacgttttccggctatataagctacccaatcaagagacaaattgcgatatttttccttttctttccattcattcttcaagaaactccagtttgaataaactaccaacaagccataatcccttataagttcagcttcatctatctggtttttattcatacctgtttcccaagtccactcacccatctttactttctcacaattattctcgttaaactccattccgtatttgaatttagggaaaaccgtttttttaccattatcctttgaataccactgtattgaagcacccatagtcagactgtcagccttttcaggagccaatgattctccgaattcacttcttgattccctgcccatgcggaaatcagctccagctaaataaccgatagtaccgtctccagtacagtctgaaaacaaagcggcctttaaacaaatttcttcccctgtctctatatgtttgattacaacagaagaaatcccagtaccattcatctgtacagacacagccctatagttggcatataacgtaacgttcttctcagcttctataaaattcttctttttatcatcttcataatactctgccggctgtgcatttcctcttttagaatgaccaaactcacgtaacattctgcccaatccttcattaggtccaatctctgcatacccaccaagatgtacacgaacctcagcactgttgttcccgcctaaaaccggacgatcattaaccaaagcgactttgcaccccatacgtgcagctgtaacaaccgcacacattccggcaattcctccacctacaactaccagatcatacgaagaagtttctttaggaaacgcaggcaaaccaagcattttttttctaaaatctgccaattcatttccttccataggtggaacaagatctttctgtgtagtaaagaaaacggcatcaatacgtccgtcaaaacctgtcatgtctttcagtaccacagttgcttcaccactttttacattaacttttccggcatactgccatgtccatttttcgccttcacatcccaacactgtaggcaatgttttaccggctacctgtatcttaaagcatcccggtccctttcctttataccacggagatgtccagttatacgtacgtacatatacatgataagttcccttttcccggaaatttaattttgtcttagcatcctcaacgggcactcccattccatgtgccagcaaatatggagaccccatctgatccataaactgctgatcaactttccatcctcctttttcgctgaaactttcagcttcaagtaaaattggatttgaataagctaattgaaaataaaatccaacccaaaaacaaagaatataccgtaacatactatttaactataacatcccttaattttaaccatcctttagatgtcacattcttagatacagaaagtttaataccaattgtaggatcttctttctccatatcaataataccaattgcccatgtataatttccagtaggtatattttctatttttgtattaaatatatattccttttcgttacctaaaatccaatcacacgcttctggtttatcatcaacaaacataaatttaacattctccgtttttgtatctaataaagcaaaagctactttatatttattcttccactgtggcatatttgttggacaatacccccatccaatattcttccaataat

SEQ ID NO: 3811 - DNA, 7373 bp, Unknown
  gut microbiota DNA sequence
tccttccttttccccttgctttcctttgtttccttaccgcttatccggacggccttcagaaatgcgcctggagacgttttctccacaaaggagagtcattcttcaccggaactttcagatacgcttaaaacgaacgaaaatttgcttgggaagaaacctgtttcggggaacatgggcctgaatcatcgggcttataacttctattcctgtaattttaagaattaaatcgattggagataattcattttatctgttaaaagttttgttgatgcttgtagatcaaagaaaaagaattacatttgcagtgtactaataagctaatacactaatataatttatttacaacatgaacacgtctatgataaaaatcgaagggttaaccttcagttatggaaagaaagcctccgtttttcaagatttctcattggaaatggaggctggaaaggtaattggtcttttgggaaagaatgggaccggtaaatctactttactttatttgatgagtggcttgttacgtccacaaaacggttctgtctggatgaaagggagggacgtacaaaaacgcctgccggtaaccctggaggatatgtatttggttccggaagaattcactttacccaatttaagcttacagcagtttgtgaaagtgaatgcaccgttttatccccgtttcagccaggagttgttgcggacatgcttggccgattttgatttgaatgaagatattcatctaggagagttgtccatgggacagaagaaaaaggcttatatgtgtttcgcgctggcagccaatacctccttgcttctgatggatgaaccgaccaatggattggatatcccttccaaaagtcaattccggaaagtaatagcttcaggtatgacggaagagaagtcggtagtggtatctactcatcaggtacgggatattgaccgtttgctggatcaggtggtagtgattgacggaaatgaagtgttattgaaccgctcggtagtagacattacagataaactgttgtttgcggagcagggcatgaatgaaccgacagatgacgttcttttcgtgcagccctctgtgcatggaaacagtgtgatatggcccaatcttgcaggagaagagagcccgttgaacctggaacttctgtttaatgctctgctgacggaacgtgagaaaatacaagcgatttttaatgaaaaataaatgacacgacatgatggagacaacttttagtatgacacgcgtacagcatatcatgcgacgcgatttgatagaaaactggaaaagtaacctttatggtttgctgggtatttttgcagcctgctttttcccgatgttgggctttttatggtcggcagaacactggacggaagaaggctatcctgaagtttattcttttgagcgattttgcggcaatatgttggggataattggtatggtggttagtgtggcaatgatatattatgcttctcgaatcatgaaatgcatggataataaggaaaaacgtatttcttatttattactgccagctacgaaattggagaagttcttctctcgtgctttgttcgtgacagtaggcactgtgttgatgattctggttgccttgctggctttggaacttacccattatctgttgttgcctttgtttgatttaccgactgtgtatagccagccgatgttggtggaagtattttctatgaaatgggctcatgcttcggtagacgcaacaggagagtctgtttattcctggtggctgatgcagctacttgtgtggatattctgcttatggaatcattcactttttatcttgggaggaagtttttggtacaaacatcctttcctgaaaacgataggggcttgtttggctgtaactatcttaggaggaattttgtttgcgagctcagtagatagtggaatatggtcttttcttattcggagagtagatgaaaattatccacattctccccagaccgtaaatggattgctgaccatcatttcagttgtctttcttctgtttactgtgtttaactggtggctgtcatatcggctgtttactcgttcggaagttgttaaacgaaaactgtggcgcctatgacttttaaagagaataaaccgatttatttgcagatagcagaccgtatcatggatgagatccttcaggatgtgtatgaggaaggcggacgtatcctgtcggtacgagaatatgcaggaatcgtggaggtgaatgcgaatacggtagttcgtacgtatgattatctgcagactcagggtattatttacaataagcggggtttgggatattttgtggcaactgaagctgctcagaagattattgagcttcggaaggctactttcctccagcaagtattacccgatgtattcaaggaaatgtatttgctgcatatcccgatggaaactttatctgaactatttgagaactataagaaagaacggatgaagtctcaggaataaacaatagaagataataatgaaaacggagctgaagtaagaggaatagattcctttgcttcagctccgttttattgtatgattctgcgacttataaagtcactgtatgcataatcttttccaatgcaccggcattgtctcgtacataatttccggcttttttcccagctttatccaaggcttcatagttgttcaggaaattgtccataatcttcttgaaatcctccgctccttgtatttcaaagccacccttgcattgaagcaacccttgagcttcacggaaccgtttgttgttggggccgaaaatgactggcataccatatacggcagcttccagtacattgtgaatacctaccccgaatccacctccgatataggcaatttctccgtagcggtaaatggaagacagtaaaccgaaacagtcaatcagcaggcaatcggcttctttcactctttcttccgtagcctgtgtgtagcgtactacagtacggttcagtttaccggtgatttccttcaaatggctttcatcaatcacgtgtggtgcaatgattagctttacctccggatgcgtattgagataaggaatgaaaatatcctcatccggtccccaggaacttccggctacaaaagcagtatggtttcctttgaatttctctaccaatggaagttctttagcctgacggcagatttccaatacccggtcaaaacgcgtatcacctactacagtggtgttagtaataccgatggtgcggagtaattgtacagacgcttcatcctgtacgaacagatgagtaaatgtgttcagtacttttcggtaacttttgccataccagcggaagaaaatctgttctttccggaagatggaagatacgctgtaaaccggaatatttcgccgttgaagttcattcaagtagttctgccagaattcatacttgatgaagaaggccatataaggctgagccagatccagaaaacgctttacgttgtccggtgtgtccagcggaagatagcagacaatgtcagcccctttatagttctttcgcacttcatatccggaaggagaaaaaaatgtctggagaatcttgtactgcggataggttttccgaatttcttctatcagcgggcgtccttgttcaaactcccctaaagaagctgcgtgaaaccacaggtatttttctccgcggataatctgtttttgcagaatatcaaaagattctttttctcctttgaccatcagggctactttcttattaaaaagtgcagccagtctgactgcacttgtataaagagcgatgataagattataaatcatgtcttagcttatttgagaacctctactgcacggcgcatgcgagccactgtttcttcttttcctaatacagccgagatgtcaaacatgtgaggacctttgccttctccaaccagtgtcagtcggaaagcattcatgatattacccaagtggtaacctttatcttcaatccatttcataactacttcttcctggtgagccagtgagaaatcgtccaatgattccagtagtgcagccagttcggtcatgcgttcggcagaatcttctttccagcgttttttcactgtcttttcatcatattctgtcggagctacgaagaagaacttgcaagtatcccacaattccttgataaagcttacacggcctttcatcagtccgactacagtaactaccttgtccatcggagcttcgatgccatgttccttcagaatcggcataaacaactgtgcgatttcttcgtcactcttcatcaggatatattcatggttgaaccatttccctttttcatagtcgaatttcgcaccagctttgctgcaacgatgcaagtcgaacaatttgatgagttcatccattgacataatttcctggtcgttacctggattccatcccagcaaagccaggaagttgataaccgcttccggcagatagcctgattcacggtatccagaagagacttctcctgttttcgggtcgtgccattccaatgggaatacaggaaatcccaaacggtcaccgtcgcgcttgctcagtttaccgtttccgtccggtttcaacagcaagggtaggtgagcgaattcaggcattgtatcttcccaaccgaaagcacggtacagcaatacgtgcaacggagctgaaggtaaccattcttccccacgaatcacatgtgatacctccatcaggtggtcgtcaacgatgttcgccaagtggtaagtaggcagttcatcagctgatttgtataacactttatcatcgaggatagaagagttgataactacctctccacgaatcaggtcgtgtacatgtacgtcttcgttcggctcaatcttgaaacgaactacatattgtttgccttctgcaatcaacttgtccacttcttctttcggaagagtcaaagagttgcgcatggaagtacgtgtagaagcatcatactggaaattcggaatttcctgacgtttagcttccagttcttccggtgtatcaaaagcgatgtaagcctttccgttatcgagcaacacctgtacatatttcttgtaaatgtcacggcgttccgactggcggtacggaccatagtttcctccaaagctgacaccctcgtcaaactggatgcctaaccatttgaatgactcgataatgtattcctcagcacccggaacgaaacggtgtgagtcagtatcttcaatacggaaaatcagttccccgccatgctgacgagcaaacagataattgtacaaagcggtacgtacgccgccgatatgcaatgcaccagtgggacttggtgcaaaacggactcttacttttctttctgacattgtggtttttatctaaaaatacgccgcaaaattaatctaattttcccgtttttttcttattttgcacgcaaaatatctttttaacatgaaaagtttacaaactgagaaacagttttcttataaaggactgttatataaactggccattttcgtggtaacagtgtgtgtaattgtgtatttcctgccacgagaaggacgttttaattatcaatttgacattaataaaccctggaagtatgggctgcttcaggcttcgttcgattttcctatctacaaggatgatgcggaagtgcagcgggaacaggatagtatcatgcgcttgtatagtccgtattatcagatggacaagacggtggccgaccggatgattcagcagttcaagaaagcgtataccgacagtttacatcgtattatccccgctccagcatatcagcatcatattgaacgattgctgaagttagtgtacgagaaaggagtctttgcaccaaatgattgggaaaagttgcgtaaagacagtgtacgttccatccaattggtagacaagaatacggcaaaccaagtggatgtgagcgacctttatagttttaaaacggcatacgaaacattgatttattcagatacggtacattatcatcgactgttactacagcggtgcaatctgaatgaatatattgcgcctaacctttcgtatgatgcttctaaatcagaggctgcaaagcaggatttgctttccgatttgtcatgggctaacggttttgtaatgaacggacagaaaatcatagaccgtggagaaattatcgacagccatacgtataatatcctgaaatcattggagaaagagtggaacaaacgtagtgaaacggtaacagaaaagcgtcttactttgctcgggcaaacactttttgtggcgttactgataggttgcttcatgatttatctggatttgttccggaatgactattataagaagcaccggacattggccctgctttttgtcatcattgtagctttcccggtgttgtcttctgtgatggtagagcatgcatttatgagtgtttacattgtgccgtttgccatgatacctctgattattcgtatctttctggattcacgaacggcgtttgtggcccatatcataacgattctgctttgttcgatttgccttcgtacacctcacgagtttatattgttgcaaacagcagctggtatggccggtatctatagtctgagggagctctctcagcgttcacaattgctgcgcagtgcgctgattgtggcttgtacgtatgcattgatgtatctggcactcgatttgatacacgtcagcgatgtggcgcagctgagtacacacatgtatgtcaattttatcattaacggcatgttgttgctgtttacttatcccttattatttattttggaaaagatgttcggttttacctcgaatgttacgttggtagagttatccaatatcaataataaattgatgcgtgagatgtcggaagtggcacctggcacgttccagcattcccttcagttggcgaatctgactgctgcggctgccaaccggattggagccaacagccagctggtacgtacgggggctatgtatcacgacattgggaaaatgctgaaccctgctttctttaccgaaaatcagtcgggtgtgaatcctcatgaccagttgagctacaagcagagcgcacagattgtaatcagtcacgtgaccgatggcatgagactggccgacaagcacgatctaccacaggtaataaaagattttatctgtactcaccatggaaaaggtttgaccaagtatttctatatttcatatcagaacgaacaccccggtgaagaagttgacaaggaagctttccggtatccgggtcccaatccttttacgaaggaacaggctattctgatgatggcagattctgtagaagcagcttcacgaagtctggctgagtacacagaagaaagcatctcagctttggtagaaaagattattgacagtcaggtacaggacggttatttcaaggaatgtccgattacatttaaagacattgctaccgtg

SEQ ID NO: 3812 - DNA, 7115 bp, Unknown
  gut microbiota DNA sequence
ttaaagacaaggcattctttttgtacagactgactaaaatttatgcctaaacaataaatccctcaggtttttacgttgacccgagactgacatcggaaactcttttcccattgtctataggctataaatagaaaaaagccgtaaccaaatagttacagctttttatctcggcacgggaagagaggctcgaactcccgacactcggttttggagaccgatgctctaccaactgagctattcccgtgtttgcggttgcaaaagtagtacaaatttcggaaactgcaagggatttcgaaaaatatttttccagaatccctctacagtaaagataagtcattgaacatctgacgataatacgccgcttttttttcaagctttaaagggtaagcccgactggaagacggcatccgatagagggtcagctcccggtctctgaagtgaaacatactcccccctcctaccggaggctcttttgcttccatctgctcgcaaaacacatccgtcgctttctgaccggtagtcaccaccgcccgacaggaaggaagctgctgaagaagcagcccaatatccgtgggcgaaaccacctctaaaaacttgtcagaagcattatcctgcaatctgcgcacacacgaagccgtatcatacagagcaatccctttttcacgcagaaaagcaatgatgcgttctttatcaaatatcttttcaggactgagaaaataatccttgtcatcaaagaaaataaagccgaatatacgccacatatcattctgcaggttgggatagaagaaatccatactccagcgtttcttctgcggaggaaaactacccagcatcagcaagactgcattctccggaagaaaaggctccagcggatgatgctccactccagaaagcaaatgctcgtccaacgtcatgcttttggtttaggttccttctttgccagcaatacgatgttatagacatattccgtcatccagctttcagaatagcctaatgcatgctgatactgacgaatgtttccgcaagtcttacgtacgccatcatccttccagtctacttttgtcagaatgtcatgcacagctttttctgtcatgttacgaagcatcttcttaaatacccctggcatacggaacttccattgcatcaggttaccgatcaccatcatcaaatcctgactgaatccctggaacatgaaaagatagttctttatatcgttcacattgcggcagttgcgcttgatagaaccatcaatctccttgaagaaagtttcaggcagaccataaatatccatcagcatcttgcggcagcgtgtacgctctgcgataccaagtttgttattctgcgtaggaactttcaatgtgcgtttgaatacagccaaatccggcaggaagttaatgttactgatacccagctgagctgccattactgcctgataatacacacgaatcagcgtcatgaagtcttccattccgcccacacgtaccgtttcatcagcaccttctgctgttttcttgcctaatagttttgaaaatatactcatacttgtactttttattgttttttgatttgcaaagatacgaaaatagttaccaacattctaaatcctgctcaatatctttcatctgctctttgtgaaagactggacttttgatgcctttccgcttctgtgccaagtaatcatcgagcaagcgaaaagcatatttgccaagtaaggatattgcaatcaggttacaaatggacattaaagccatagtaacatcagccaagttccataccagattcagacttgccaatgagccaaacaaaaccatccctccaaccaacatacggtataaaactaccggccactgtcgagaggtgaaaaagcggatattagcttctccgtaataatagtttcctaaaatgctgctgtatgcgaaaaaaagagtagcaatggcaacgtagatgcctccaatattaccaacctcactggtcagcgccgcttgggtcaactgaataccatccaggccactgccaatataatcctcaccgaacaaaatgataaaagctgtacaggaacaaataagcagagtatctgtaaacactcccagagcctgaataaatccttgtttagcgggatgggttacatgagccgttgccgcagcattgggggcagatcccataccagcctcattgctgaaaagtccccgtttaatcccttgcatcagagccgttcctattccgccaccaacggcctgatgccagccaaaagcattaccgacaatttgttcaacaactgctgggatacggtcaatgttagccaatacaacaaacaaagccaatgcaatataaccgacagccatgacaggaacaatgacactactgatagctgcaatacgatgtacacctccaaaaatgatgacaagggttaataccgaaatgacaattcctgagttcaaaggctctatagaaaaagcactttgcaaggcagcactcatagtattactttgcaccgaattgaatgcaagaccaaacgtgaccgtaatcagtacagcaaaaagtactcccatccaacgtttcttcaatccacgctccatgtaataggcagggcctccgacataggaatgttttcctttgactttaaaaagttgggctaacgtagattctacaaaggcactgctggaacccagcagcgcaataatccacatccagaaaatcgctcctggtccacctaccgtaagggccgttgccacaccagccagattgccggttccaacacggcttgccagcgaaatggtaaaagcctgaaaagaagagatatgtttctcgtgtccgtttatcttaacagtcgaatcacccagtaaccggatcatctcacccaacatacggaactgtacgaaacgagtcttaacactgaaccagatggcacatcccagcaacatgattatcaggacataagtccacaagacattattggcttcatttatgatattcgtgaatagatccatgaagtttattaatcagatttgagtttaaaataaaatgtatgctccctgaataccggttccaccaggtcaaaacgaataaaatctgccagtaagccaatcaccagcttccgcggaagccctgaaagcctgacacacttattcaacgtcaattcgccgtgctgccccaccagatttaatatagactgttctttctctgtataagtcactaccacttcttctttattgtgaaaccacacgttcaagtggaccggagtggccaagattgtttcatctttaatgcgcaagtaagccttgggccgattgtcttcatcgagggcatagacaggcttctccttgctttcgggaacataaacctccagcacatctttgccttccaccttatataaccggttatcaagttgtagggaaggcttacaatacattgtagctgcagcttctatcatgtaaagctcctcttccgaacgtattcctgctatttttccgttatcttttactcctataagcaatcttccccctccggtattggcaaaagccgacaaactcttcgctattttccgggcatcggaaatggcaaacttgaaatcctgatgcacatgttcaccttcagtaatgagttgttgtatataatccgcgtctgtagtctgtttcattaccggaacaactcaatcacaatgtttatgcgtcatgatgtcgagcaccagcttgtcggtctcgttcatgccttcagaaccgattttcgtcagattacggatactgaaatccacattgtcttcaatgataccttctactgaagtcacacactttccttccatggccaggatagcagagaacacagcggtagataccccactggtcagtttcaaagcacagcttggcttggctccgtcgcaaatcatacctgtcagattagcaatcatgttctgcacggcataagctacttgcttatactcccctcccatcaggtaagtaattccgcaactgcttcctgtagccgccacgacacaaccgcacaaagccgacagacgtcccagattctgcttgatataaatagctgtcagatgactaagcaccaaggcacgaatcagttcttcttctgtcttatgattctcttccgcaaaaactacgaccggaagcgtagcagcaattccctgatttccgctaccggaattactcatcaccggaatcatggctcctgccatacgggcatcgcatgcagcagatgtgtacgaaaggatatgcgtgaatgtattgcttcccatgatactctgttcgctgcggctaccctgcaaggtttttcccagctcatgtccgtaatttcctttaaacgaacgttccgctgcttgtaagttcaggcgtttggcctccagaataaagcgaatctcatccagcggagttgtagtagcaaagtcgtacaccttgctcaggttcaattccacttcttctgtatcggcttcagctcctgccttggttctatgatcgaataaaacctgaccgtttcgctctgcatacacaaagtttgtatgccctccgctgataatagccgtagcctcatctccatcggccgaacaaaccacttcaatatacaatttctcttcgataccgtccttcagttctatcttaatgccttgaccggctatcatctgttttccttcttccacactctcgggagtgatgtctttcaggacttccagtccatattccgacttacccttcaaggcccccagtgcaatagcaattggcaaaccaatcatgcccgtaccgggaatacctactcccatggcatttttcaaaatgttagcactcagacgtgcggtaatcgtttccggacacttccccaatacttccgtagccttggccacgcaaagagccacagccaccggttccgtacaaccgatggctgggaccacctcccgctgaatgagtgcgatgatacgctctctttctgcttgtgcaatcatactgattatcttttatagttcttcaatcctgtttgcaggaattccacatatttctgaatatcctcatcgtacgaataagacttgttcaacggcattccttcgttgtcgagcagcacatagaaaggttgtgcgttagctccgaacttggagcgctgcaagtagctccacttatcgcctaccgtacgcaatgtacgttccgtaccgttttccatcaccttcaccggttctggcaatttggtcttttcatccacatacagcgtaatcaatacgtagtcctcgttcaacagtttacttactgtaggatctgtccatacagccagttccatcttacggcagttcacacaaccatagcctgtgaagtcaatcatcaccggttttccctgctgacgggcatattccattccggcatcaaagtcattgaacttcgcatgcacttcattcttatataaattgaaatcctgtgtctgcataggaggagcaaaagcactcacagccttcaacggagcaccccataaacccggcaccatatatacggcaaatgccagagaagcaagtgccataaagaaacggggcacacttacctttgtatcgtcatcatcgtgcgggaacttgatttttcccagcagatacatacccagcaacgcaaaaatcacaatccacaatgccaagaaggtttcacgatccaacagacgccaaccgtaagccaaatcggctacagaaaggaacttcaatgcaaatgccagttccaggaatcccagtgtcactttaatgacattcatccagcctcccgatttcggcatggacttcagccatgacgggaagagtgcaaacagggtgaacggcaaagccaacgcaatggcaaatcccagcattccgatggccggcgccacaatactttcagaagtagatacttctaccagcaagaaaccgataatcggaccggtgcaagagaaagaaaccagtgacagcgtgaaagccatcaggaaaatactcaacaatccggtagtctgttcagccttgctgtctaccgcattgctccacttcgacggaagggtaatttcaaatgctccaaagaaagaagcagcaaaaaccaccagcatcaggaagaacaagatattaaataccgcactcgtagataagtcattcaaggcactggcaccgaaaatcaaagtaatagccaaacctaaagtaacataaatcactacgatagaagccccatacgtccaggcatcccgaataccctttcgtttatccttggtacgtttcaggaagaaacttaccgtcatcggaataatcggccatacacaaggagtaaacaatgccagcagtccgcctacaaatccggcgaaaaagatataaatccatgaatgagactcattgttcacgttttcaccgaatgaacttaattccttaataaccggtttccagtagtcagcagcttcacccgcagccgtatcttcaccaatacgaagcggaaccaaatccaccgatgccgtatctgctaacgccaggtcctctgtcgttgccaccacttcttcagccgtttgctttccagcagcttcccccttgaaagaaaactctacattagtaggaggcaaacagttttcatcattacaagcaccatattgcagataaccgctcacttcatatttcccgcctttcaacttgattttctgcacaaaggtagccgtaccttcaaagaaacgaacctgcattccgaatatcgggtccatcttgtcaatttccttaccagcaggtttcagttttccaaccacctctgccccttcaagcttatccgtattgaaagtagccgaaataggacctccttcaggcaggtcagtagaatatacatgccatcccttttccatttttccggtaaatacaatttccacctcatcagcagaaaccgatttccattcagtcttaaactttaccggttcctgtatctgagcgaataccggcaagcataaaatggccatgaaaagccagctaagtagaattttcttactcataaatataccttagatgatgtaataaaactattatcttgtaaaaagtcgtgcaaagataacgattttttcgtagggaatatatagcaaactgttattcgacattgttttttactttaaatatgcaaatagtcagtaacgcactttatccggaaacaaga

SEQ ID NO: 3813 - DNA, 46112 bp, Unknown
  gut microbiota DNA sequence
aaagtatgcaatttccaatcatttttattcttttgatgtatgtacaccaataaggaaatctggcgtgttacttatcctattttttttttttttttggcgcagaatgtgataaatgtgaccgataagcctttttagggcgtgtgggtgaagtcgctttgggagcagctgccatgggcggattgctctacatttgtgtctataccatagctttcggttttagtgttggttcgcagattctgatagctcgtcgtaatggagaaggaaactatcgggcagtaggccctattatgtggcagggaacgactttcagtttcggtatggcggtttgtttgctgatactgatgtatttttctgctgctccgttgattcggttgcttattacttcggattctatttacggggcgacttatgaatttttcacctggcgtatctggggattcctttttgcctttgtgaatgtgatgtttcgcgggctttatatcggtattacgcgtacaaaagtgttgactatgaatgcagtcgtaatggctttggtgaatgtggtgcttgattacgccttggtattcggagaattaggtctgccagaaatgggggtacgtggtgccgctttggcttctgtcattgctgaggcttcttcactgctcttctttttgctttatacctattataaggtggacttgaaaaaatacggactgaatcgttttggacagttcgatttaagtatggtgctacgcatccttcgcatatcttgtttcacgatggtacagtattttctggctatggccatctggtttgtcttttttatggctcttgaacgactcgggcagcggcaactggcggtggccaatatcgtgcgaagtgtgtatgtagtgttgctgattcctgtacaggcactttctactaccgccaatacgttggtgagtaatctgattggtgccggcggttcatcaggggtagtcacgttattgcataaaatatcccggatgtcgtttttgattatggtagtgtgcgtaggcttgtgcgtggcgtttcccggaagtatcttgtcggtttatacaaatgaagaagccttgctggtggagtctgtttcggctttgtatgtggtgtgcggggctatgctgattgcttcgctggccaatgtgtacttcaatggcatatcaggaacgggcaatacgcaggcggcgttggtattggaagtgtttgtacaagttttctatgcactttatatcattgtggtgggcatggttatccaggcatcggtagacgtatgcttcaccacggaagtgatttattacgtattgatgttaggttccagtctcatttatctgaaaaaagcaaaatggcagaacaaaaagatttgagcatactgattttttttgtaattttgcacgctggaaatttttgataataaataaaaaagcaacatatatgttcgataatttaagtgaaagactagaacggtcgtttaagatattgaaaggtgaaggtaaaatcaccgaaatcaatgtggccgaaaccttgaaggatgtacgtcgtgcattgctggatgcggacgtgaattataaagtagcaaagaactttacagatacggtaaaggaaaaagcactgggacagaatgtattgacagctgtcaagcctagtcagttgatggtgaagattgtacacgatgaactgactaccttgatgggaggagatactgccgaaatcgaattgaaaggtcgtccggctgttatcttgatgtcaggtttgcagggttctggtaagactaccttctctggtaagctggcccgcatgatgaaatcaaagaagaaccgtaaacctttgctggtagcgtgtgacgtgtatcgtccggctgcaattgagcagttgaaagtgctcggccagcaggtagaagttcctgtatatagcgaattggacagcaaagaccctgtacagattgccttgaatgccattcaagaagcgaaagcaaaagggtatgatctggtaattgtcgatacggctggtcgtttggcaatagacgaacagatgatgaacgagattgaagccatcaagaaagctatcaatccggatgctacattgtttgtagttgatgccatgaccggacaggatgcggtaaatacagcgcgtgagtttaatgaacgtctggatttcactggtgtagtattgaccaagttagatggtgatacacgtggtggtgcggccctgtctatccgtacagtggtaaacaagccgattatgttcgtgggtaccggtgagaaactggatgccgtagatcagttccacccggcccgtatggccgaccgtatcctgggtatgggtgatatcgtgtcattggtagaacgtgcacaggaacagtatgatgaagaagaagcgaaacgccttcagaagaagattcagaaaaaccagttcgatttcaatgacttcctgactcagattcaccagattaagaagatgggtaacttgaaggaactggcttccatgattccgggtgtaggaaaagccattaaggatattgatatcgacgacaatgcattcaagagcattgaggctattatttattcaatgactccggaagaacgtactcatccggaaattctgaacggaacacgtcgtacacgtatcgctaaaggtagtggaacaagcattcaggaagtaaaccgtttgttgaagcagtttgaccagactcgtaagatgatgaagatggtaactggcagcaagatggctggtatgatgcagaagatgaaaaagaaataatcgcgcagattaagatagtaagaagcggacagtaggaggcttgaaagaagcaatctgctgtccgcttgttttttattcatacaataaatatttttcacgtaaggaacggtaagcttgcaagtccttctcccatgcctggcgtatttcggattccgtttttccctgaagtatatccttgcgtacctgtgaggtacccatcagcaggtcaaaccattgggaacggctgaagaaacgcttttcggcatccggatattgcttctgatagagctgataaaactgcaggaggtattttagggaaaagccttgaggtagctctttttttgtacgcaagtcaaggccgaagcaggcctgattctgatgaagcggatgcttgtcgaacccttttaaagagcgtggagtaaactgaaactggaaaaaatcctttagtgccggagaaccgatgacttggaaaggataagtagttcctctgccgatgcttacggaagttccttcaaaaggacagagtgaggggtagagcgcaatggaaagatcgtttggtaaattgggagaaggttttaccggaagcgagtaaggctgtccgtgtttccatccttccactcgaattacttgcaaacgacattgcaggcctttacctaaccagccttctccattaatcattccggctatttcgcctaaggtacatccatgaagcagggggatgggaagcatacctacaaagcttttgtatgccttttctcgtaccggaccgtccacgtagtcacaaggattggggcggtccagcacaatcagttctttctggttctcggcacaagcctgcatcacgtaataaagcgtactgatgtaagtatagaagcgggcacctacgtcttgtatgtcgaacactaccacatctgtgccagtcagctgtgacggtagcggtttcttgttttttccataaagtgaaaggatgggcaccctcgtgcgggtatcttttccgttttgaatgtattctccggcatctgcatcccctcgaaatccatgttcaggagcaaatacccgtacgatttttactagactgaccaaggtatccagtaagtgggttttcccacaaagagaagtatggtttactaccagagaaacccgttttccttcaagtaagggaagcagtttttctagctggtcagctccgttgcgcacggtggcatgtccttgcagggccataaaacagcttatacatgcacccaaaatgtatttcaaaaagattcttttcgtgtaactcatggaatttttgtagatttgtgatactttttacaaatatagccacatttatttatgaatccacttgcattgattgacaaatattatccggaagataatgagttaaaacatattttgctggtgcacagccgttcggtagcagacaaggccttggatatggcacgcaagcatccggaactgaatctggacttgacttttatagaagaagcggcgatgcttcatgatattggtatttttatgacggacgcagatggcattttctgctttggtaaatatccctatatctgtcatgggtatttaggttcggagttggtggctcgtgagggttatccgcgtcatgcgctggtgtgtgagcgtcatacaggtgccggactttccctcaaggcgattatggaacgtgaccttccggtgcctcaccgtgaaatgattccaatcagcctggaagagcagattatctgttttgccgataagttttattcaaagaccaaattggataaggaaaagagcgtggagaaggcccgaaagagtattgaaaagcatggggaagaggggttggcacgttttgatgcctggtgtaaactctttttgtagaactaaaaatacattaaaaaggaaagcgttgacgtttatttgtcggataatgcttacttttgcaccgcatattgcgtaaaaagacggtgatgacatcatttagaagaactacatatttactgctatctctgtttgtttttggctttttctgctcattctatgccgaagcacagcgtgtgagaggaaaacgtatgcggggaggagagaagaccgattcccttcatcgggactcgctggcgctggattcgctgggaatggactcgctggccgcagataccacaaagaaaaaagaaccgctggatgcgccggtcatttatgaggcaagcgattcgattgtctttacgaaagagggctatgcacatctttatggagaaggtaaagtgaattaccagaacattgagctgacctctgcggtgattacgatgaatatggacagcagtaccgtctatgccacgggagtgaccgatacggcaggagtggaaacgggttcaccgattttcaaggatggagaaacaccgtatgaatctaaaatcatgcgctataacttcaagaccaagaagggtttcatcaatagcattgtcacacagcaaggtgaaggatatgtcaccagtgaggaaggaaagaaaggggcaaacgatgaaatttacatgcgtcatggtaaatatactacttgcgacaatcacgaacatcctcatttttatttgaaactttccatggcaaaggtacgtccgaagaaaaacgtagtattcggacctgcacagctcgtggtagaggatgtgcctcttcctattgccgtaccttttggtttcttcccgttcaatagtagctattcttccggttttatcatgccgacgtatggtgatgaaatgaaccgtggtttttatctgcgcgacggtggttattattttgccatcagcgaccagatggacttgaaagtattgggagaagtctttacgaagggttcttggggattatcggctgcatctaactataacaagcgttataaattcagtggctcgttcaatgccagctatctggtgacaaaaacgggtgagaaaaacatgcccgactattctgtgtcgaaagacttccgtatccagtggagtcaccggcaggatgctaaggccaatccgaacagttcgttctcggccagtgtgaactttgctaccagtagttacgaccgttccagtttgagcagtttgtataacccgcagcagtattctcagaataccaaggcttccagtgtgagctactcacgtaactttccggaaatcggattgaacatctctggagcattcaatatcacacagaacacgcgtgactcttctttgagcatgacgcttccggacgtaaatatctcattgaatcgtatttatccgttcaagcgtaaaaaatcggcaggagatgagcgctggtacgaaaagatttcattgcagtacaccggaagtattaccaactccatcagtacaaaggataatctgttgtttaagacacctttgacacagtgggagaacggtatgcagcacaagattccggtttcggcaactttcaacttgttcaagtatatcaacatcgttccttcgttcaattacacggaacgctggtatttgcgaaaagtaaagcagagctatgatgcgagtcctacctcgcgtgatcatgtgaagcgagatactatcaacggcttcaaccgtttgtacgattacaacctgtctttacagatgaataccaagttgtatggtatgtacaagcctttgttcatgaagagcaaggagcttcagattcgtcacgtctttacaccgaccgtcagctatacctatacaccggactttggaaaatcacgttacggctattacgacacctatacttatacggatgaagacggtgaggtgcgtaccgtagagtattctccttatgaaggagctgtatacggctatccgggaaagaatatgtcacagaacatcagcttctcaattgataacaatatcgagatgaagatgaagtcggacaaggatactaccggctacaagaaaatcagcttgattgaccagttaggggcttctctttcttacgacgtagccaataaaaagtggagtgacttgagcatgaaccttcgtttgaagctgaccaagagctatacatttaatatgaatgcctcattcgctacgtatgcataccagttcgatgaaaatggtaatgtagtggtgggcgaccgcacagaatggtcttatggacgtttcggacgtttccagggatacagtggttcattctcttataccttgaacaacgatactttcaagaaactcttcggtaagaaagaagaggataaaaagaacaaggacaataaaggtaaggaagaaaatgaagacgaggagacagaggaagaaacggaagaacagaataacaactccaacatgcgaaagacggagaaagcttctgtcgattcagacggttacctggctttcaaattgccttggagtgtcagcttgagctatagctacagtattcgtgaggaccgttcgaaggacattaacatcaagaccatgcgttatccgtattcattgacgcattcattgaacgtgtcgggtaacttcaagattggtagccgttggaacatgacttattctaccggatacgactttacctccaaggagatgtctatgacaaccttgaacattacccgtgacttgcactgctttaatatgagttgcggattggtgttcggtccgtttacttcttataacttctctatccgtgccaactccagtatgctgaccgatgccctgaagtgggatcagcgaagcaatacgggtagtgcggttacttggtattaatcctttaggaattcttcggcccgggccagcgtgtccggtttgccgatgtctatcagttgcaagtcttctttgatgcatcctccgagctggagttgccggcaggtgtgcagataaaaatccatgatgggaaatttgcccttccatgcctctccatccatgtaatgaaatagttccggtgaaattacatggatgccgctgaacgcatattcgcggtattggcccggttcgtacacaaaaccttccggcttggtttgcaacgtgtctttatgaatccagccctgcagacggttgtccgtatcgaacaacaggtagcgcgaagttttgcgcgggctgaccagcagtgtagccagattctgacttttccgatgaaaatcataaacctctttcaggtcggcattcgacaggatgtccacattgtgtaccaaaaacggttccgttcctgtaaagaaggttgccgcctttttgataccgcctcctgtatcgagcaatctgtcacgttcatcgctgatatgaatggtcagtccaaaattctggttagctttcagaaaatcgataatctgttctccgaaatggtgaatgttgatgaccagttcggtaaatcctgcttctttcagtttgagaatcacatgttccagcatgggacgtccggccaccggaactaaggccttgggcatgtggtcggtcagcggtttgagccgggtacccagtccggcagcaaatatcatggctttcatttggctttcagtaattggtctatttgttgttcccgatgaatcaagtgtacattaattttaaatttttcatgcaagtgcactgctgtgtgttgggcagagtacacagagcggtgctgccctccggtacatccgaagcaaatcatcaggtgcgagaatccacgttccaggaaacgctgcacgtgggcatccaccagagcgtcggtatgacgaaggaattctgtaatctctccgtccttctctaaaaactcgatgaccggtgtgttcagtcctgtaagcgatttgtactgctcgtagcgtccggggttgtgtacggcgcggcagtcgaacacgtatcctccaccatttccactttcgtctgccggaatccctttccggtaagagaaactcattaccgtgaccgtcaggttacggcggttgcgtgcagcggcaaactgtttcagttctgtcatgcgctgtaatacctcgcagagataaggatattccggaaaaccctcctgcaataactggcgcagattctcaatagcgaaaggaatgctttcgatgaaatgagtctttttctcgaagtagccgcggaagccgtaagctcccagtacttgtagcgtgcggaacaatacgacatgacgtagacgggacaggaatacttccttttctatctgtttgtaggggcgtagggcttccaagtactcgtcaatcagttcctggcgcaggctgtccggatagttggccttggcttgccagaggaaagaagccacgtcataatacagtggtcctttccgtcctccctggaagtcaatcaggtaaggctctccgtccttcaccatgatattacggctctggaagtcacgatacatgaataccggttggggttccatgctctctatcagtgtctggcaaagggtttcgaaatcgtcttctaacaaatcttctctgaattccactcccgtagctttcagaaaacagtatttaaagtagttcaagtcccacagaatgcttctgtgattgaactctaccgctggatagcatttcccgaaatctagtccttgtgccccttcaaactgtatacggggcagtaaccggatgacttttttcagcaagtccttttccgttgagccaaactctccggtttctcttccgtgtgcgataagctgaaacagggaatctgttcctaaatcatcctgcaggtaacagagtccgtcattggaaacggcatgcaccgccggtaccggaagatgctgtgcctgaaaatggcgtgacaagtagatgaaggcctcgttttcttcgcgtgaagtaccgcataccccgataagagtcggagtacccttcaggcggtagtagcttctgttggaaccggctcccggcaatgcttccatgctttctggagcatggccggtgaactggctgtatagggtttcaagagtttgagtcatgtgtctgtttgttaagattactgattgagtttttctgccaggtattgtcccgtataggaggccgcacatttggtcacttcttccggtgtgccagctgccacgagatttccccccatgtcgccaccttccggaccgaggtcaatcacatggtcggcgcatttgatgacatccatgttgtgttcgatgatgaccagcgtatgtccccgactgatgagggcatcgaaagcttccaacagtttctttatgtcatggaaatgcaagcctgtggtcggttcgtcgaacacgaagatggtaggctgcgccttttcgatgctgaggaagtacgccagtttcacgcgctggttttctcctcccgagagggtagacgaagactgtcccagcttgatataacccagtcccacatcctgtagcgggcgcaacttcttgacaatcttcttttggttgtgttccgtaaagaactcgatggcctggttgaccgtcatttccagtatgtcgtaaatgttttttccttcaaacttcacttccagcgtgtcgttcttgaagcgcttgccgtggcacgactcacattccaacaccaggtcggccatgaactgcatttctaccgttaccgtaccttctcccttgcattcttcgcaacgtccgccttccgtgttgaatgagaaatagcctgcactgtatcccatctgcttggccagcggctggtcggcaaacagtttgcggatttcgtcataggccttgacgtaagttaccggattacttcgggaagactttccgatagggttctggtccacaaactcgatgtcattcacttgacggatgtctccttccaatgagatgaattcgcccgggcgttcactcgattcactgtattcccgcttcagagccttgtagaaaatgtcgcgtaccagcgtactctttccggaaccgctgacccccgtcaccaccgtcatcacgttaagcgggaagcgcacgtcgatgcctttcaggttattctcgcgtgctcccttgatttcgatataattgttccacggacgatggctggcaggcaggtcgatggtctcttctcctaacaggtatttcacggtatagctgtcgcttcccttctgtaagtctttcatgtcgccctcatacaccacttgtccgcccagtcgtccggctttcggaccaatatcgatgatataatctgctgcacggataatttcttcgtcatgttccactaccactaccgtgtttcccaattgctgcaactggcgcagcaccttgataaggcgagtagtgtcacgactgtgcagaccgatacttggttcgtcaagaatatacaatgaccctaccagactgcttcctaacgaggtggccaggttgattcgctgactttcacctcccgaaagcgagttgctcaatcggttcagcgtcaagtaacccagtcccacatccgacaggaatgtcagacggttcttgatttcacttagcaggcgttgtgccacgagggtgtcgtgcgcatctagtgtgagcgtacggaaaaactcctgcagctgggtaatcggcatttctaccagttccgagatattctttccacccactcgtacgtagctggcctcctttttcagtcggcttccgtgacaggtagggcaagtcgtttttccccggtagcgtgccagcatcacgcgatactgtatcttatattggttttcctccagcatcttgaagaaagagtcgatgcagaccttctctcttggtccgtgccagaggtaatctttctgttcctgtgtcagttcataatagggagcaaagatggggaaatcatgagccggagcttcccgaaggaactcgttcagccattctcccattttctcgcccctccagcaaagcacggcaccatcgtacacactcagtgcacggttgggcaccaccaggtgttcatcgataccgataatctttccgaatccttcgcacgtagggcaggctcccagcggagagttgaacgaaaacatctggtcgttcggttcttcaaacttgatgccgtcggcttcaaacttcgtgctgaatacatgcaggcgggtgtcatccgacaaatagaaacgaagcatacacgtgccgtcaccttcgtacatggccgtctcggcagaatccgtcagtcggctgatggcatccttgctgtcatcgcagctcatgcggtccactaacagatacaccttatcgttctcatcgtaggtataatcttcaatgcgtaccatctcgccgtccacttccagtcgggtaaagccctgcttcatatccatgtccagctgttctgccacacttcttccgtcacggggaaggataggtgtcagtacggtgtagcgtgtgcccttcgggtaagacagcatgcagttcacgatgtcttccacactgtccttctttaccagttgcccgcttacgggagaatacgttttccctacccgtgcgaaaagcaggcgtaggtattcataaatctccgtcgaggtacccacggtagaacgcgggttgcggctcgtcactttctgttcaatggcgatggcaggtggaatccctttgataaagtcacattccggtttgctcatacgtccgagaaactggcgggcgtaagaagacagactttctacatagcgtctttgcccttcggcatacagcgtatcgaatgccagcgacgactttcccgaaccagacagtccggtaatgactaccagcttgttgcgtggaatacgtacgtcgatatttttcaggttattcacccgggcaccttttatggtaataaaatcattttctgacatgtatcttttcttgttagatgaacatgcgaagttacgaaaaatagctggaattatcaaagcgaatactttcggagggaaagaagtcttttacgtttctcagcgcggaaccatatgttttccttatgcgaaacgtacggttccgcatcgggaaacgtagggttcacagaatggaaacgtagaaagtgtgctgaggtttgttggatattgcatcataatttccgtaaaaccatttgtttgttcaagaaaaaaagttatttttgctgtaccactttaatggtacagtgtaacgatttttaatttaaaggttatggtagaattgagaggtgtttcatttgggtatcagtccgataaaaatgtattggacaatttgaatctccgtttgaaggaagggagattctatggtctgttgggaatgaacggctcaggcaagaccacgcttttgaaactgattgctggtaagcttttcgctcacgacggtgagatttatgtagacggtcgcaactcccggaaaagggaggtagaaactttgagggaagtattcatgctgccagctgactttatttttccggatatgaggctggaacactttcttgccatttattccaaattctatcctaagtttcgtgcagaagtgctggatgactgtctgaccaattttgaaatacagtgggatattgaacatttggacaaattgtcgttgggagagaagcacaaagtggcattcagtattgccttgtcgctgggaacgaaagttctattattggatgaggccgccaatggaatggatattccggcacgaaagatgtttcgtaagctgctgatgaagcatgttcgtgaagatcagatagtggttttgtctacacacattgtgcaggacattgaaaatctgttgaccgatgtgattgtgttaagaaaggatgctcctgtgtatgcggcttctttggaggaaatcgctagtcggtattcgttcggaatccaaagtaatgaagaaggagtgctatatgcagaagcttgtaccgaaggttaccatgtaatcactcataagcaggaaaacatggatacggaagtatctttggaactgctgtttaatgcattaatcaagggaggaggaaggatatgaaaagttttgcaatgaaagaaatgtggaagtttagtcagtttcagttaaaggaaatgtttggctatggaaaaaagaaagcctttatccagcttttgtttttacgctcttttagtatctgtgtgttttgtgccttggtgtcaggagagagtttgaaagaatgcttgtcactcatagagcaattgctgatactcctatcttattattttacgttctggagcctggtggaagatatgcggaatgacagaggtctgataaataagttcatgcttccggtcacattggcagaaaaatatgtaagtttgtttttcagtacttttttgataggtacggtgatgttgttgggatgtgcgatattatcgaatatctttatgcaactggctattccattgctttttacagaggaaacgaacggaccggttcttctctttttgggaggaggctatggacttaagcaacttatgctgcaggtggtgattgctttttatgtagccctgtggactttggtggttatgttgaggaaacaatacagcaaaacccggttctggctgatagttgttttatgtgttttgtcttatgtgttgccagtattgtgtatgtatggattaggtgctcctaaaagtatcattaaatacacatggtcgattgtttctgtggtttggagcatagtagctgttatcatgacctataaaggttttagaaagttggagtttagatagtaagatggtagatttcaagcaagaccgagccatttatctgcaaatggcagaacgaatctgcgacgagatactggctggaaagtatcattcagatgatcgcatacccagtgtgcgggaacaggccgttatgttcgaagtcaacaccaataccgtggtgaagacttacgacctgctgttgcagtgggggattatctacacccggcgagggctggggtattttgtgactgttgatgccctggagaagataaaacagacccgaagcctgaagtttatgacagaaaatctgccggaattgttcagtcagatgaaattgctggatatttccattgatacggtggtcaggaagtgggaagagtttaaggatggggagaagctatgaatgggcttcttccaccacccatttttcaatgttgcgtgtacgatggctgaagtttactcccagtttgtagacttttctcgtatccgtggcaaaaggcagtgcatattgtttgtcattgatttgtttcagggcttcttccgcacttccgtccagcttgaactccatgacgtaaatatactgcgctgtttttactatcagatcaatgcgtccttctgaggtatggtattctgcctgggtataaaagcctaacagtttgaatataatgaacaatacgttctgataatgtaattccagatcgcgtattaattcataaggagtgtctgtaaagaagctttgcaggcgtttcataaatgcatctattttgccgtcccgtacctcttttacaaaacacattaattcaaaagagggattgccggaaggcatatatgcatagcagggaagtaagaagcgtgtaaacccttctgccacttctttgttggggaatcccagtttatatactttaaattctttgtcataccctttaatcgtaaggtatccgctttggtagaggatgggtacgggattagtttccattgtgtcaatactgcccaatgaatcggcagttgctatttcttcggtaagccgctgcaaattatatttactatgctttattaattctacgaggaaagtcggcgtaccggtctcaaaccaatagcttccaaattcacggcttttcatagcattgagcagactgaaaggattatagatgtcttccgagcggtatgcaaaatgatatccgtcataccattctttcaattggtgacaagtttcagcataagtttgtgtgttattgtcggccaataactggatgtcctctgcaaatacttctgataactccttttctgtgattccacacaaattgttatacatagcctgtagagaaatgtcttccaggttattcaggtcgctgaatacgcttactttactgaatttggttacgcctgtcagaagagcaaaccgaagatatttgtcgcaggttttcaataccccgtagaaagccttcagggtgttgcgatagttgcaaagaagagtttcgttaccgatggcctgtaacatcggtttatcgtattcgtccactaatacgactacatttttgctagtggtacggctgattttttctatcaggtaggcaaaacgttcttctggagcccgatcttttttttcgtctccatagattgcttcccaactttccagatgttggttaagtatagcataaagagaggcttcattctcgtatcgtcgtgcattcaggtcaagatgcagcactggatatgctgtccattctttttccagttgttccatggcaagaccctgaaacagttcttttttaccggagaaataggcttcaagcgtggagatgagcaggctttttccgaatcgtctgggacggctcagaaaataatatttaccactgtttgccagctggtaaattaattcagttttgtctacatagcagtaatgatttttacgtatctcttcaaaactttgtatgcctaccggataaatcttgctcatggttctatgattgtgtgattcagataatgcaaatataagtttttctttatagataggctttgattggtgggaagaaatcgtgcgaaatatagtattcactataaactctagtagaatctgtgatatttaaagaatgtataaagtaaatctgttgtgtttaaatataataaaaaacaagtccgctcatagtggtaaatctgatattctgagttttcttaaaaatgcgaatctatcaatcacacttgtacatggacatcaatacaaaaatattcagagataatttccttcaatattaccgtccgctctgtctgtttgcacttcattatctgaaagatatagatgatgcggaagatacggtgcaggactgttttatggaattgtggaaacggaaagagaaaggatttgaagtgagtggtcttaaatcttatctgtactctatggtgagaaaccgctgtatagacatcttgaagaaggattcacttattgatggcaatgtgcagccatcagaccttgaggaaatcctgtcggacgaagagtgtgaagaatggtcttatgaggaggctcgtatctggactgctatagaggccttaccagaaaaatgcaaggaggtgttcttgctggctaagagggatggtatgaaatatgaagaaatagccgtaaggctgcatatctctgtcaatacagtaaaaaaccaggtgagcaaagcacttaaaacgttgaaggaaggtgtgagaaaggtgtacctgttctttttcggataattttttggtttcggcatagtagtttttatggttcattcagtcttagctaaaaatacattcagtcatgaaagataaagaagaaagaaaactccagtttgtccttcggtattacgaagatgggaaactggatacaagaaaggccttgaagaaaataacagggatagcgcatcaaaataaagtaagcggattttgggcttgtttttcaggaatcgctgcggctatccttatctgtgtggtgagctataccttgttaagccggaaggagcatcataccgtattaattacggcagatgcgatggtgacaagatatttcctgccagacagcacgctagctatactttccaaaggggcgactttggaatatgatgccgataaatatggacaagctaaccgtgaagtaaatatgtcgggaaaaatctattttagtgtccgaagaaatgcgctgtctccttttattgccaccactgaatacgctcaggtgaaagtacttggaaccgagtttgaagtggatgaatatagaaaggatactgctactcgcgtgtatgtaaagtccggtaaagttgtgtttaaaggaaggtatggaaaaaatggaattgtctttacaaaagacatgtgtggcatgctgacacatggcgatgaaatgcctgtagcggtgcatgctgtttctccaaatccttcggcttgggctataggaaaattcatttacaggaatacacctattgatgaggtgctgaaagagctttctttctattatggcacacaactgtatgcgtcggaacatgaaaggacaattaccggtgaattcaagacggacgacttaggcgaaatcatcgcattgattgaaaagacactggatataagaataatacagaaagagcgatgaaaagaatcatatccttattgtttttagctttcttggtggatgcttcttccctatatgcgcagcatcgggttaccctggaagacatgatggggcaggtgaaacaggtgtaccctgtcagctttgtgtatgatgcgtctatcaggcttgatattccgtatactggcaagaaacttggtatggtcagtctggaaagtacccttgaaaccctatttcatcatacgaatatcaagtgggaaatagatggcagtcatgtcatccttaaaaagctgttgacttatacgttaagcggatacgtctatcaggacaatggagaaactgtggtaaatgcaaccgtatgggacatgacttcgaatgtgggtacgctgactaacgagcacgggttttatagccttacgttaagtgagggaaggcataaaatccggttttcgcacattggcagtggagagcatctggaaaatgttacgttaggcggaaacaaatcaaagaatataactctgaaatctgattaccagttaaatgaagtggtggtgacggctgatttgaactcgcctcttcataccactcagactggaaaagtctcgcttacagcgaaggactttgtaaatggaaacaactttatgagctcgcccgatgtggtaaagaaacttcaaggcttgtcgggagtggccggcgggacggagcttatctccgggttgtacgtacatggtggaaacaatgatgataatttgtttcttctggatggtacttccttgtatcaggtgaatcatgccggagggttgttttcagcattcaatacagacattatcaagaatatagatttttataaaagtggttttcctgcccgttatggcggacggctctcttcggtggttgatgtgcgtacgaatgacggcgacatgaaggaatatcatggcagttttacgcttggacttttagagggcaggatacagtttgaaggaccgatagtgaaggaccatacgtcgttcaatgtcgccatgcgccgcacgtggatggacttgcttaccgccccggctattgccattatgaataccagtcgccggaacaagcaaaatgtgagatatgcttttcatgacatcaatgcgaaagtgactcatgtattctccgaaaagagtcgtgcggatatcagcctttattcagggaatgacctttttaagttcagacataaagaatatctgtttgacccagaacctaccaatatagacaagttcaatctgcaatggggtaattttaccgcatctgccaattggaaatacattttctcgcacaacatgttcgtcaatattacaggagtttatactcataatcgttctaggttcgattatttgagtgaagaacgcttgggatatatcgaaggaacgaagggtggaattgtaaaagagcagaacaatcattccaccatcaatgacttcggttatcggatggagtttgattatcgtccaaactcctggaatcacatccgttttggctccaattatatacgccatttgtttgtgccccagaattattattcgaagtatgacagtacatcgcaagatgagttgatcgagaaagtggatagccggtacaagagcaatgagtttacgctttatgcagaggacgagatgacgttatgtaaaggtgtgaaactgaatggagggctgcattacacgttgtttggtatatcgggtacgaaatatcattcgatagaaccacgtgcggcaatcaatttcaggttgtgtgataaagccagcctgaaagtctcgtacaccgaaatgagtcagttcatgcatcagctttcggccacctacttgaatttgccgactgactattgggtgccttccacagcacgcatcactcccatgaaagcacgtcaatacgcagcgggggtatatacccgattgccgtataacatccggtggagtgtggaagggttttataaaaccatggacaacctgatagaatatgatggcaatagtggcatgcttaatccgatggcagaccgatgggaggaagaggtacgtacagggaaaggaaaagcttacgggatggaaactgacatccgttacagtaacggaaagacttcggtcgatgcttcctatacactttcgtggagcaagaggtttttccctgacttccattcttcatggtatccggataagtttgacaaccggcaccggttttctgtcaatatcgggcataagtttaatgaaagaattgacgtatacgtctcatggaattatcatagtgggaatcgcatgaccattccgacacagcaggtagatgctcccgttattccgggagtagagaaggcaaatgaagggatgatgatttatgagatgcccaacaatgtttcccttccggcctatcatagactggatttggggattaatttccgcaaaaccacgaaaagaggtttcgaacgtatctggaatatcagtttgtataatgcgtattgccggatgaatccgctctatgctactgtccggcaaaatccggacggtacgtttgtgggaaaagctcatggagtgtttcctatcataccctctttcagttatacacttaaattttaaatccgtatgatatatcgacttttatttatagccttattaatttctgtgctaccatcttgtacgcatgagttcagtctgaatgaggtggatgccgagcgcaaaatcgttcttttctgtatgccttctacattaggcgatacgacactgatacaggtggcacgaagcagggtgattcataatcagggaacaaacacagacagcaagcctttccttgtatttaggttgaacggagaagagaaagagattcactacacggaagtttctaccggtttgcttccggctcagtcgtattatgtagtgggaaaactaaaagaagacgacctgattagtatggaagtggcttatcctgatctgccagttgccaagtcgcaaacggtgataccgcaggcgtttccactggataagtcggaagttgtattgacggatggggaatacggcaggaaaatacagttccgtattgcttttacagactctgccggagcagaggattattatggaatgagagtcataaaaaagaccagcaaagcgtttttacaacctgaaaactcagattcggataccataaaatatacttctgtagaccttaacctggataacgaacctttattttcggaaaagacaggatttgatgacattttcgatatatcgaaagaatattaccgtaatctgtatatctgggatgacagcaagataaacgggaaaaattatacgttgaaggtagatacctattatgatgccgggtatgaaaatgaagaacggaaagaaactatcgagtttaaaatctatttgtacaaattgtcgaaagaaatgtacacttacctgaagtcgctcaatcgtataaataataatgacttgggaggatacgggcttgctcccatccgtagccactataccaatgtggaaaacggaatcggtcttttaggaggatgtaatgtgtatgaaagtgaatggataagcaatccgaaagagtgagaagaattttatttacaaactaaaatatagacttatgaagaaaaaaattttatttacgctggtaatgacggtatcattattgtgtgtaggtgtacaagcgcaagagttcagatatggactttcaggagggtataactataattccacgaaagaaagtatttccagatctggttttcatgccggattgaaaggggaatatgccttccgtgaggctgcaaaagggctgtatgcagatatgggactgatgatttcctcatacggttggaaaagtgttccttattatgtaatgaatgagagaacttacgaatatgaaagtacgccttattatcttcatcttcctatccatttaggctataagttgaaagtcgggagaaatgtcagtttgtttttggatgccggaccttatttcaatgtcggtttgtttggtcaaatgaagcaaattgccagtcttccgggagaaccggatattgtcacagtgtcctcacataatatgtttaaggagggagtgatgccgcgctttgactggggagtaggctttcgtgccggggtagagatagcccgccatgtacagattgccatcggatacgactggggcatgaccaaaacttatcagcataatcccgataccaagttccggacttttgtagcttcattaacgtattatttttagtcagaatgaaaaataaactaactttgaggtgattgctttttaatctttaagttatgaaatcggtagtggtttttcttatggctttgggactatcctgtatgcagatttttggacaagaaagtatcaaaaaagatacgataaagcttggtgcagggttgaaaaaagatgtgggtgggaaattcttgtcgattaacccatccacggatagagtgaagataaaagaccatgaagtaaatcaagaaatacaatctgattcacccgtagattttgattttaggcaggaaaggcctttttatattccaacctattatgtgaatccttctcccatgtttatgggtgactataatgcattcgggcagttttctccctatttttatggcaggggaatgcagactaccattccaggcatcggtcgggtgaaccagatgatgtttatataccaaagggaaatcaatgatttcttggatatatatgtaggagtgaatgcggcaaaatatactttcccctatagtgtcggtcagtcgtttggtgtgtcaggaggcatgacacttcatccggcagatgattttcatcttacggtgtttggtgcttatagtccggataacaggtataatctcaaccgtacgtattatggagccaccgttggttacgattttacaaaccgttttggagtggaggttggtgtacaaaggtattatgatgtgcgacaaggatggaagactgcaccgatggtcgttccatcctataagtttcgtaagtttaaactaggcatagatgtgggaggcctgttttatgaagcagtgagaagtgcaattgaacgataagtgtctttttattcttaattaaacaattatggattgctgaaaggataatttatgagaagagtggggtgaagtttggtgtataatatctacttttgaggactattcttaaaaataatatcttataatgaagtctgtcaatctatatggagttgtcataggtaccatcatcatggcaagttgtgtgaatcacaagatggtaaatattgaaggcgtatgtagcaactgcatggatgggacgccaatagaattgtattatcttcagaatgattcggtgattaatgtcgctagtgatactttgctccatggaaaatttaatttcagcattgaacctaattttgaagtggcatattatctttcagtaaatgacacgttgaatccattaaaaggaatgttctttgccgaaaagggaacggtaaagatagcatttgattcggtatatcatgtaacaggaacacctatgaacgacttgtacaatacttaccttacagaaacacgcagaatagaaaaattaggagagatggaatatcgcagaagcatagaaggaaaagataatccggatacttcggtgtatgattctttggctcaggtctacacagagtataaagtgaagtttcagcttgataatatacacaatattgtaggcaagaccacatttatcaatgaaataggttctgtgtatgaccctcatttcctggaaacctatcccactttgccggaagaagtgaaagctgacaagaaagtgcaatggtattatgaacttcgcctggatatggacagaaaacagaaagagttagatgccaggattggtaaaaagataagggatatggaatttccggatgccaatgggataacaagaaggctttcttcgtttattcctaaaaatgggtatctgtatattgatttatggtcttctgcctgtgctccctgtattgcggaatttcccgaactggaaaaaacttacagccagtataaggagaaaggattggatatacttttgatttcgatagacaagagtatggatgattttcaggcggccatgaagaaatatcaaatcaagtttacttctttgattgatacaactgaaggagaaaaggtaaaagagaattttcctttctcaggtataccgcatggtattctgattaatagcaatggcgagattgtggcaaaccagcttcacaatatgctgttgaaacaaagattagaggaactgataagatagacgtcttaaatgcctataaatgaaatgtaaaaaaattatagcaggtctcttcatatatgtaggttttgcatcatctgtattcagtcagacaaccggaaagatagtagatgccaatcagcatccagtagaaggtgctaccatcgtcatgcagctaccggattcaacctatttaggtgcaaccatatctgcagccgacggtacatttacgcttgaaccggaaccggagaattatcagcttatcattcagcatttgctttataagaccaggcaggtgaagggtcaggcacgtgatgccggtgtcattactttggaatcgaaggactacaatctggaggaagtggtaatcgagggagaacgcccgtttgtaaccgtggaacagggaaaactgaattatgacatttcggccatctcagaaaagcatattgtaaacaatgcttacgaggctatctgtaagttgccgggtgtgcaggacaggaacggtaaactctcgctggtgggagcaaaggacgtaacggttatcctgaacggaaaagcaagtacactgacacaggaacagctgattgagatgctgaagaatacttccgcttcgcaggtacagacagccgaagtgatgtataatacaccgcccgaatatcatgtgcgcggggctgccatcaatattgtgactgctaaggcagacgacaataccattcagagtgaactgtcgaccagctacagcaaccagtatttcagcagttacagcggcaatgtaaacttcctgatgacgaagggaaagtcatcgctgaatgtctcttacaatccgggttattcgcatataatgacggtgatggacctggcatcccaacatacctatgacggaaaagtatatgacatcacgcagacacagaaaatcaatacaaagggctggaagcataatatctatgctgagtacggctatcagataaacgaggataatgagttgagcgtgggttacaacggtgccctttctgataatggtaaaggtacgattgatgtaaacgggaacttccagaacagccacaatgacaagttgcaggacagccgtctgcacaatgtctttgcccgctattcttccggattcggacttgaccttggggtggattatacggactataccatgaatgacaagaatcgtctggaaagtaaactgacagacaatacccgtcagttgcttgattatacttcggaccagaaaatccgcaagttctctgtatatgccgaccagagccacgctctcgccaatgactggactttgaaatacggtgtccgttatgattatacggacaataagaacgcccagttcttcaatcagactgaaggaaaggatgatgtgggcaattcttcctcacgtctttatgagcagattaccaacttttatggaggcttcgacaaagagtttgaaaacggtctgtctctttctctctcggcaaccggtgagtattattccatcggaaattatcataaatgggcggtctatccgcaggccagtctgacctattcgccgtcggagaaacatacgtttatgttgggggtatcatcggaaaaagattaccctacctattgggatatgcagaccagtaccacttatatgaacgcttatgaagagctccagactattgagggactgcggcctgctaatgtgtatagtgtaaatgccaattatctcttcctgcagaagtacatgttgtcgttgttctacgagcgtaccaatgattatttcacgatggatatgtatcaggcaaaagaccgtctggcgcttgtgtatcgcacgcagaactgggactattaccagtccttcggtatgagcgccaacgttccgttcaatatcggtgagtggttgtcttctcaggtgaatgcgacggtggtcaatgaccgtaaccgttgcgataacttttgggatattcctttcgaccgtaagaaatgggcctgtatgcttgctatgcagaatcatttttcggtaggttccaacctcggatttgatctggatgcgatgtaccgttcaagcatgatttccggtatcagcgatacgaaaccggtctttacggtcaatgtaggagcgcagtggaacttcctgaaggataaggccagtctgagcctgaactgtgctgacttgtttgataccatgcgtatgaaggtgagaaaccgctatgcaggacagcacatcgacttgaatatggggcagtacagccgtaccgtttcagtgaaatttgtctaccgttttggtggcagcatcagtaaggagaagaaagaggtggattcttcacgtttcggaagataatacacaaacatgatggaatatttagcattgacttaactctatgaaaaagctatttttatatgttataggcagcttaatcatactgcctgtttacagtcagcatttgattaaaggaacaatcatcgattcggaaaatgcggtgatgccgatggtgaatgtcgcctttttgaatcaggcagacagtacactcgtcaccggagcagtatccgactcttgcggggtatatggcatatcgcttgctggaggtaactatatcatccgctattcttatctgggttatgagacattgtgtcggaatatacaagtcaatgcgaatctcacattgccggtagttaaaatggaactggcacagaccgagcttgaaggagtggaggttactgcctaccgaaaacctttcaaattggatagggaaggtattacggctgatgtgcctaatacgattcttgccagacagactacattggatgatttgctttgcaagatacccggtattcagaaacgtggtgaagacattgaagtgattggtagaggtctccctgcctattatatcaatggccgtgaagtgacagaccagactgaactggataatctggctatcgaccagattcagtctgtcagactggtgacgaatacgggggtacgttatcactctgagcagcgtgcggtgattgaaatcaagaccaaacgcctgggcgaaggacttgcctttaatgtcagcggtaatctgctgcaggggaattatcttagtcagaattacaagatgaacggaagttacaattacaagaactgggacttctttctctcttataattatgaccggggaaagaaggattcgaatcttgacgtttaccagcagactcaaagtgatacaatctggaatctgaccgatttgacccggaaacaaatcttcaacgaaagccatgcctatacgggaggggtttcttatcatttctctccggagtcggaaatcggcctgaaatatgaaggtaaatacagtgaaggtagtacgttctctaaggatacgctttccatgataccggacaaagggacttcaacctttatcaggaatctcagcgatgtgtccgacaagtccgtcagcaaccatctgaatctgtattatacaaacgactggaagaatggctggaagatgaacgcattcggtgattatcttcataagaccgaccgaagccgtggcaatatccgtgaatgggaaagcgacggtgtggaaacgtctatggattattatcgtaaagcggactgggatttgtttgctgccaaattaaatttgtcgtatgaaaccgggaaagccggaactttcagcttcggttatgatttcagccacacaaccggaacggactatatagagtatgtccgtgcgttgaataatggtagtacaagtaatacggaaatgaaaaattcgctctacctgtcgtacgattacacatggaacaatctgtcgctgggagctggattgcgttacgaacatatacggagcgatttgagggaaaacaatagcaacaagaatcagaaccagacttatcataacttcctgccctctgtttcgttaagctacaataccgagaacctgcaacagtcgcttacatattccgttcatacggagcgtccgccttttggtgtaatgaacgacaatgcggtgtacacagatcggtttacttatcaaaaaggaaatctttacctgaaacaggctttgactcatgacctgaactatatgctgttttataagtttctgttctttaacctgaattatactcatacccataatccgctgataacagctttctacagtatgccgggaaattcagcagttacggtcagctacatggataattttgacagaatgcataatctgacggggatggtaaacgtgcaatatccggtgaagtggtggctgccctcacttacgcttacctgtttgaagaccttcttcagttatccagggccgaacgaaagtgtcctaaaagccggccgcccgctggtgatggtgaacttcaacaacagtttcacacttccatccggattcctgttgtctgctgattttaattatggttccagaggatattatcagttgtacgaggcgaagagttatacctccttcaacctgagtctgaaaaaatcgttcctgaaagacaagcttcaactttcactggatgcttatgacattttcaataagaacaatacgcgtgcttctgctcgtctgaatgatattatcatgcacagtgtcggaaaggaggaaacccgaaaagtcggtttcacgattacttatcgcttccgcaccgaaaagaagatgaataatcagagtgcagctgagacggaaatgtcacgattgaatatggataatcagtaaagacggctgaatgaacactctccaacgatatatggtgttgaattctcttttgctggtggtgatacctgtgatgggccagcaaaaggaagacaaggaaattaagctgaatgaagaaacggtaaaactcattcagtttgatttccttccaggggatatggagaattacaacaagcctttggaagccccgttggaaaagaaatggatggagtacaagaatccttttgatgaaggaattccccgaagtctgacagacagtcttatggcaaagaaaccgaagggatatatccgcatgtgtccttattccatttggacaaaacggggagaagatccggtgtatgatgtgactgtggaaggtcgtccgcctgaacttatcatgaacgagggaccggacgtcagtaaaaaacttcagacagattacgggcattctctcaagccctcaacgggcagaacgtatgatatgctgaataactccactcccattgaagtaggaaaaattttcaagaaatatataaagccgttgctacctgcaaaaaagagtaaatagtttcttatagattcttcagtttccttccgtatattccttaaaatagagttaaatttacctcgacacgtacgtgacgaggtcttgacacgtacgtgctgatgtctcgtcacgttcgtgtcgagatattgacagctacgtgtcaaggtatttttgaataggagtttctcttttatataaggcggtttagaagatttatgacggcccagttacttctattaggactggtgtagaggcaaatcgtagattttgaggaagttatagtgataatcattcagtaatcattatatttgtgagaatttgcatggttggtttatatagaaggatataatcgtactatgcattttcggtttgcagataaaagctgaatgaaacttaaaacataatacaatgaaaaaaagagtatggatggcaattatttgcctttgtttgtccgcaggactgcctgcacaagattcattaaaggtaaatacgaaacaaattggtgtggaggatattgtagatgtgctgaatgtgatgcgtgtaaagatgttccattttgacctgatgccgttcctgacagatacgtatgaagtacaagtatatgtggaggaacatgagaaagggaaaacatccaaacgtatcgagctgtttcggatggggaaaaataaggagctgctgaaagattcctggagatacaaggatttgccggaggacacagaagtgtggaataaaatcacagacctgtctttattcctgacaagcagaaatgactctacaactttgcttactattaaagttccgaatgcgatgactgcgaatgtggcattgaagttgcatccgttaggaaaagaaaaggtgtatttttacgaagccagaccttatatcttacggaataatccgaatgcagacagcctgaacatacctttaatcttatacggctctggctgggtagatgaacaatacggatttatgcgcttctgtggggaaagagaaattgacgggaatgataagaccggaatgattttgtcgaacgtaccacattattatgtggtgggagtggagttgcataaggcagccaagtaaaggaaattttgatttcttgaatataggatgcggttcggcaatacttgtgctcaaaagcaggcttttggcttggtattgctctcacctttcactatctttgcggcttaatcggacatttgtccggaaagtgaaaaggatatgataaaatttacggatatgaagactaaactattgatgttgcttgtccttttgggaagcctgtggacgagcaacttgtatgctcagacacgttatcccaaacgggagtttcgcggagcctggatacagtgtgtaaacggacagttccaggggatgcctacggagaaaatgaagaaggtgctggtgagccagttggacaacttgcagaaggctggtatcaatgccatcatttttcaggtgagggcagaggcggatgccttgtataaatctccttacgaaccatggagccgtttcttgaccggtgtgcagggaaaagctccttcgcctatgtgggaccctttgcagtttatgattgaggaatgccacaagcggaacatggaacttcatgcgtggattaatccgtatcgtgccaagacgaaaggcacaggtgctttgtcgcccatgcatccctacagcaagaatccggaactgtttgtgcagtatgccggccaactgtattttgatccggggctgccggagtccagaaaatacatctgcaagattgtacgcgacattgtgacccgctatgatgtggatgccattcacatggacgactatttctatccttatccgaatccgggagaggagtttccggataatgtcagctttgcagcatacggtcgcggatttacttgtcgggcagactggcgtcgggataatgtgaacgtgttgattaaggaaattcatgaaaccgtacgcgaatgtaaaccgtgggtgaagtttggtgtatcaccgttcggtatttatcgtaacaagaagaatgacccgaacggaagtgagacaaacggcttgcagaactacgatgacttgtatgccgacgtgcttttgtgggtaaacaatggctgggtagattacaatatcccgcagatttattgggaaatcggacatccggcagccgattatgatacactgattcgctggtgggcacgccattcggcagctcgtccgctgtatatcggtcaggatgtgatacgcacggtatcgaaagcagatttgatgaatccgaaccagagccagattccggcaaagtataatttgcagcgttcattgcctaccgtacagggaagctgtcagtggtatgcggcggcagtggtagagaacaagggaaattaccgggatatgctggtgaaagaatatcacaagtatccggcattgcttccggcttctccgtttatggacgacaaggctccgggcaaagtgcgtaagctgaaaccggtatggaccgcagacggatacatcttgttctggacggcaccgaaggcaaagaccgagatggacaaggcttatcattatgtggtgtaccgcttcggaagcaaggagaaggtgaacctgaacgatccttcacacattgtagcgattacgcacgatgaattctataagttgccgtatgaagatggaaaaacgaaatatcgttacgtagtgactgcactcgaccgtctgcacaatgagtcgaaatcggtatcaaagaagatcaagctgtaaatatcagtctgatagaaaatagaaagggcaggaagaaaggtttgtggttttcttcctgcccttttttatggatttccctataagttatttgatattttttcgaatcttgctaagataggcatgcatgccttctgcatctttccggctgataatatctaacagttcgtttagctccgtacggatattttctacctgagccggagtgcgtggattgaacaagatttcctgtagcagaaaatcatcttcgctcagcacaccttgcgcaatggccatgtggcgcttgaaggtagtacccggtgcatcttggtgtttcatgacggctgcaaacacaaaggtagatacgaacgggatggacaaggagtaagccacagtttcgtcgtgctcctcgaaggtgtattcaaagatgttcagcttcaggtgctggtaaaggtccttgaagaaaatctttcccaggtggtcaccttccttgatgatgatggcattctccgtactcagtttgtcgaggttggcaaatgtaggaccgaacatcgggtgggtagatacataacggaagccgcagttttcataaaactcctttaatccggttttcacggaagcgatgtcgctgatgatacagtccttcggcagtaccggaaggacctgatggaaagcatcgagtgtgtattttaccgtggcagcattgatgaccagctccggcttgaattcgctgatttcttccagcttggtgaagcggtagcagttgtacataaagcgcaggcgttggggattcacatcgtatacggcgacttcatgttcaaaactcaatacatcggtaaagaaggagcccattttcccggctcctaaaatcaatattttcatgctttgtttctgttatttgttgatgatttccatttgctggcgcacgctttcttcgtgaatcagctcgaatacttgtttgacgaaatcggaatccatgccgcaaagtgagccttgtgcgccacgcttgtccagaatttcgttgtaacgtccggtctgcaggatggtcatgttatgttcctttttgaaggtaccgatttcacggcacacacgcatacgtttggcgagtatgtccatcaggtcgttgtcacattcgtcaatctgccggcggagctcgttcaggttttctgtcgtctgatgctcagaacggattacgagtaggttcaggatgtagtctagaatatcgggagtaacctgctgtgcggcatcgctccatgcacattccggattgcagtgtgattcgataatgagtccgtcgaagcctaagtccatggcctgctggcacagcggagcaatcagttcacgttttccgccgatatggctcgggtcgcagataataggcaggttcgggatacggcggcgcagttcgataggaatgtgccactgcggcaggttgcggtaaattttcttgtcgtatgaagagaatccacgatgaatggcaccgatacgtttcagtccggcattgttgatgcgttccaatgcaccaatccatagttctagatcagggtttaccggattcttcacatagacgggaatatccacgcctttcagtgcatcggcaatttcctgtacggcaaacgggttggcagtagtacgggcaccaatccatacgatgtctacatcagctttcaggcattcgtacacatgcttggcggtagctacttccgtggctacgtacatgccggtttccttcttcacttctttcagccaggaaagtccttccacgccgataccctcgaaacctcccggtttggtgcggggtttccagattccggcacggaatatcttgatacctttgtcagacagtgacttggctgtagtcataacttgttcttctgtttcggcactgcaagggcctgcaatgatcaacgggcgttcctgagaaacaccttccagttcaatagggagtaaatctaactgttccatggtagtatttgatttttgtaatgttatttattcatgatggcctggattcgttttaacgcctcctccagttgaggctctttggcgcagagtgaaatacggatataccgttttccgttgctgccgaaaatgaatcccggagtgatgaacacgcgggcttcgtgcaagactttctcggtcagttcttctacgtcggcatagtggtctggaatgcgtccccacaagaacatacctacttgttccgggtcgaaggtacatcccaaggtatgcataatttcttcagccagtttccggcggcgtgcgtaagtctggatattggcttcttcgtgccattctgcgctgttgtggtaagcctgtgcggctgccagctgcaaggggcggaaagtaccggaatcaatgttgctcttgattttcagaatccactgtacgaaagtggcattggttgccagcatacctacgcgccatcccggcatgttgtggctcttgctcatggagttgaactcgatacagcattctttggctcccggcacgttcaggatactgataggtttacggttcagaatgaaactgtacggattgtcgttgacgatgacaatctggtgacggtgtgcaaaatccaccagcttctcgtaaagctccatggtggcattggcaccggtcggcatgttgggatagttggtccacatgatttttacccgacttaaatccatcttttccagctcttcgaaatccggttgccagtgattgtcttcccgcaggttgtagttcacgatttcacttcccaaaatcttgttcagtgaagtgtaggtagggtatccggggtttggaaccagcacctggtcaccggggttcaccagtgcaagtgtgacgtgaaggataccttccttcgaaccgataagcggctggatttccgttgccgggtccaggtctacatcataccatcttttataccagtcggccatggctttgcgcagttccggtattcccaccgtaggctggtagccgtgtgcgtccggcttgcgggcattctcacacaacacgttgatggtctcttctgaaggcggcatgtccgggcttccgattcctaagctgatgacattctttccttcggcattcatccgtgccacttctttgagtttccggctaaagtagtattcgctgacgtggctcagtcggctggccggctctatcttataaggttgattctccttctgcatattctcctaaaattttaagtgctttggttaatggcattactgcatcaatggattgtttgtatctcaaatagtcgttgaacatcacgtctacgtagaacaggtattcccattcccgcccgatgatgggcaacgactgtatttttgtcaagttaatgtgatagaacgaaaagatggacaacacttgtgacaagcttccttcattatgaggcagggagaaaacaatgttggccttgttgattttggaacggtctttcagttcgtcggccatccagggatcgcatatcaccagaaagcgggtgaaattatgcttgttggtttcaatgccttcctgcaggattttcatgccgtaaagctcggctgcatatttggagcagatggcagcatgtccttttaatcccttttccttgatgtcgcgtgcgctgcctgcggtatcttccgtttctaccaccttcagttgtggatggtgttgcaggaaatcccggcattgtgccagtgctaccgggtgggagtttacctctgtcagtgtactccagtcttctccgggcagacacatgatgctgtggctgattcgtaatttgtgttctccaataatcgtagctccactgtctctgagcaattcgtaattgtgaaggagacttccggcaatcgtattctcaatggcaatcattccgatgatgctgctgtcttttttcaggttatcgaacacctcttcgaatgtgttgcagcaaatcagttcgatttcttcatccttgaaaaacttatgggctgcaatgtcgtgatacgagcccggaactccttgtatggctatcttcttcatcttttgtgtaactataaaaaaagtcccgctccatcgaagcgggactttgtattatcatttcattcttgttttctctattaacgtatgcatgcaaactcccgcttcacttcattgctaaagtaaaagaaataaaagtaaaagaagaagtatgatgcaaatgttctcatttgtttgttattttgttgttatttctgctgcaaatgtaatacttttctttaaaaaacaaatgttccgacaaactttttcttcttatttttaaaaaatagcctcagaatggcggatatgaatgtattttcttacctttgttgtacagagatatttcatttgtaaaacagccaaaataaataagaacatgaactataattttgatgaagtgattgaccgtcgcggcacatgcagcgagaaagtagacggtatggtaaacgtatggggaaagtctgatttgattccgatgtgggtggccgatatggattttgccacacctccgtttatcttggaagccattcgcaaacgttgcgaacatccggtgttgggatataccttccgttcagacgattactatcagtctattatcggatgggtaaagaaacgttatggcatgtcggtagagaaggaagaaatcaattttgtaccgggcattgtaccgggtttgggaatggctatcaactgtttcacaaagccgggcgacaagattatgattatgcctccggtgtaccatccttttgcctggctggtgacacgcaacaaccgtcgcctggtggaatgcccgctgaaggaagtggacggacattatcgtatggatttggatttgattcgccgttccataaagggagtgcgggtattgattctgtgtaatcctcacaacccgggaggagtggtttggaagaaagaagaattgcaggaactggccgaaatctgtgctgatgacaatgtgattgtcttttcggatgaaattcatgccgacttgactttaccgccttatcagcatctgccttttgccatggtgtcagaaaaagcccgcaacaactccgttactttcatggcacccagcaagactttcaatatgccgggagtagccgcttcgcataccattatttacaatgaaggacttcgttcacgttttgtgacttacctggatgcaggagaactgaatgcgggacatgtatttgcctggcctgccgtaaccgctgcttacactgaaggagaggagtggctgaaacagtgtctggcttatattcagggaaatattgactatgcagatgcctatacaaaagcacatactcctaagattaaggtgatgcgtccgcaggcttcttacctgatttggctggattgtcgcgaactgggattgtcgcacgaagcattgaatgctttcttcgtcgacaaagccggactggcattgaacgatggagagatgttcggtaaggaaggagcaggctttatgcgaatgaatgtaggttgtccgcgtgtgacacttgaaaaggccttacagcaattgaaagcagcttacgaagcactttaatgcatttattatatataaaaagaacgggtgcggaatttcattgaatgaatgttctgcacccgttctttttgagaagtatcgtttagtagattccggtttgcagattgctcttttcaaagttattgaaattgccggaaatcaggttctctttttcaggagccagctcgatggcctttttcatgtcttctgctgcaccggccttgtcgcccatcagcaggtgaacgcgtcctctttcctggtacagttgcgcttcctgcggaatcagttcaatagcttcctgataattctcgagtgccttgtccagttgtttttcctctatcagcaagccacctttcagcaaatacgctttcacgttgaacgggttcaaagctataacttgttccacgcatgcttctccttcctgattttctcccataccgatgtggatggtagctttcaggagaagcgcttcctcttcttccggattcagtttcagtacctgctccaagtcattgagcgcatctttcgcctggcgcatttcccacagcacttcggcacgcagaagataagcttctgtgaaactctcgttttgtacgatggccttagtcagcatgacaatggcttgcaagtcatttttcaagccacgtgctgcacgagcggctaagtagtaagcctgggcattcttttcatccagggcgatggctttctggctggctttctccataccttcatagtcctcttgtatatagcatacgctggccagagacagcaaggcctgtacgtttgtctcatcttgggcaatcagccggtcaagggtgatacgtgcatcctccgtacggttggcctgaagatatgcactggccagtaaacccagcgtttccttttcttcttgatgtgccactgcttcttcaaaacatttgatggcgtagggcagcttgcccatgttgcgggcacggatgccgtcatatttcaggatgtcgaaattcttcttgtcttgtttctcttgttcgtttgcatcggatttactttttccgaataaagatgataataatcccatgataaactgatttaatgttttttctgtggcaaagataggcagaaaaaagaaagaaatttgtatgtttgtaccgtattttactttaaaagatgaaactatgaagaggctaatgtttttggtggcagcggttttggcttgccattccatgcaggcacaatatttctgcacgacagagggtacagaactgcactatgtgaattacgatgaaatcggtcagagcacatcggatgaaaccatgaccgtaagtaaggtagagaaagtggacggaaagcttcaggctgcctactatgataagattgtcactacaaaggcaaagaacaatactagctataccttgttcaactggagctacgatggagccaatacggtatgtacggaagatttgatgtacggtccgtatgtggattctgattccgaccctgctaaatacaacgaggctgcccgtttaggtttgctggagaagctcaagtttaaaggcgataattcatttactatcaaagacggtgccaaaggtggggaaagtattcctgaccgctcttatcaggtagttcgtaatatgttgaagaatgaagtgaatgtgtctggtgcagcttacatgggaaatgaaaccatcagcactacagccggaaagtttgactgtgtgaagatttcttacctgcagcgtacaaagattgtgctgaaaaccactacactgcgcgtgactgaatggtatgccaaaggagtgggactggtgaaatcggaagcatacgacaccaaaggcaacttagacagcaagacattgctggtgaagattgtaaagaaataaatcaagcaatttgtcgataaaattccggcccggaatctgttcttgagaaagaaggattccgggccgttttttatatgatttcgatgccttgttcggcacacagtttcagacttaaatctttcagtttgaatttctggatttttccgcttcctgtcatggggaattcctttacgaagaaaatgtatttgggaattttgtagcgggctatttttccctgacaaaactcacgtacatcaaattcgttcatggtgtatccttcgtgcaggatgatgaaagctcccactgcctcgccgtattttttggaaggaactccggccacctgcacatccttgatgcccggcatcttgtagaggaattcttcgatttcgcgcgggtaaatattttctcctccgcgaataatcatgtccttgatgcggcccgtaatgcgatagtttccgttttcatcttttactcccaagtcaccggaatgtaggaatccgttggcgtcaatcacctcggctgtggcttccgggtttttgtagtaacctttcatggtgttgtaccctcggttacacatttcgccttgtacacctaccgggcattcttctccggtatttgggtcgattactttcacttccgtgaactcaaagtcatgtcctacagtggtgtaacgtacttccggatcgtcgtcaatgcggctgtgggtcatacccggtgaggcctctgtcagtccgtatacactggtgacgcgcataaacattttttcttccacctgtttcatcagttccacagggcagagagagccggccatgatacccgtgcgcaggctcgacaagtcgaacatggggaacatggggtgatgcagttcggcaatgaacatggtcggtacaccgtagagagccgtacagcgttccttgtgtatggaagccagtacgagcaacggatcgaagcgttctatcatgacctgtgtgcagccatgcgtcaggcagttcatggtggccagtaccacaccgaagcaatggaaaagcggaacacatacgcacaacttatcatcggccgtgaacttcatgtgctcaccggttagaaatccgttgttggcaatattataatgggtaagcatgacccctttcgggaatcccgtagtaccggaagtatactgcatgttcaccgtatcatggcagcttaccagtttcttggcgttaatcagttcctcatcgtcaatgttgcttcctaacagcagaatctctgccgtgttatacataccccggtatttctcctgaccgatgtacaccacattgcgcatgtgagggaagcgtttgctcttcatgtggccccgttcgaagagtttcagttcgggcagcatggtgtaggtcatttccacgaagttgctgtccttttctccgtctacaatacacagagtatgcatgtcggagttttcgcagaggtactccagttccgcctgcttgtagttcgtgttgaccgtaacggccacggcaccaattttggcacaggcatacagaaatgtcagccagtcgggcacattgcgggcccagatgcccacgtgagtatcttttttcacgccgatggccagcaaacctttggccatgtggtccacacgctcgttaaactgtttccacgtaaaacgcaagttgcggtcggaatatacaatgtattctttgtccggagtcacttccgcccaatgctccagccagtcgcctaatgttttttcagaaagttgtaacatgtcgttgaagatttgtgtgagacttataccggagtgtagactacggccagaatttgtgcagcctgtccttcggctgtgtgtacatggtgcggtacgatggaatcataataaatggtatctccctctttcaggcgatagttactttttccataactgatttccagttcccctttcagtaccatgataaactcttctccttcatgtgccgacagaaagaagtctttttcgtcgttggcgtcgatgtcgatgatgaacggttccatgtgacggtccaccttgctttttgacaatgaatgataatgcatgtgctggcgggcatgcgtagcgttgtttgaaaatccgatggtatcgtccgcctcacctttgcggcagataaccggtccggcttcactggtctggtcgtccaggaaagtgcccagacgtactcccaatgcacgtgctattttaatcagcggagccagcgaaggaatgtcaatgttttcctcaatgcgacttacctgttccacggtcagccctgcgcgttctgccagttcctgtatacttatttcttgattggttcggagcgattttattttttctccgatgatgtttgtgcaatccatagttcttctcttttatgttgatttacaataaaagcgcaagggtgtacgctttgttcttcataattcgcaaagttaataaagtttctgtataaacataccgaaaagtaataaaaagcattttctttcggcccttttcgcactttctgatattctttttgcagacaggtttcttgtcgaatgtgtctgtattttaattttttgtactatctttgagccgaaatataatttagaatgagtatgaagaagcttatttttgcattgacattgatgggacttttaggcggccatgcaccacttacagcctctcagccggttcctgatgcagccggatatattgtcaaggtaggcgatacggctcccgactttgaaatgaagctgacggacggacgcaaggtgaaattgtcagaacttaagggaaaggtagtcatgttgcagtttaccgcaagctggtgtggagtctgccgtaaggaaatgccctttattgaaaaagacatctggcagaaacataaggacaatgcttcctttgcgctttatggaattgaccgtgacgagccgctggaacgagtgaaagcctttgccaagcagacaggagtgacttatccgttaggacttgacccgggagcagatatttttgccaaatatgcggaacgcaatgccggaatcacccgtaacgtgctgatagataaagagggtaaaatcgtgatgatgactcgcttgtataatgaagaggagtttgcttccctttgtaagaagatagatgaactgctgaagtgatgaagaagttcttatgtttgattttatgtggcttgctgtgctttccttcgggaatgacgggaaagaagaagggacattatgaaccgctgtttggaaagaaatatgcgtcgtatgcggtaacttccagttccttgaaaggagccactttctatcttgtcagcggacatgggggaccggatcctggctgcattggtaaataccgcggaaaagaattgcatgaagatgagtatgcttacgacatcattctccgcttgggacgcgagttgatgaaacgtggggccaaagtgcattttatcattcaggatgcaaaggatggaatccgtgaccaggctatactgaataacagcaagcgggaaacttgcatgggaaaggctattccattgaatcaggtagcccgcctgcaacagcgttgtgatgcggtgaaccgcatgtaccggaaggataagagcagctacaagcgtgccgtatttatccatgtagacagtcgggctcggaacaaccagactgacgtgtatttctatcatgcaccgggcagttcaaaaggaaaacagctggcgagggaaatacagcggactttccgttccaagtatgaccgccatcagcccaaccgcggatttgatggtacggtgagcgaacgtaacctgttcgtacttcgcaacacgactccggtagctgttttcctggaagttggaaatatccagaatgcgcaggatcagaaacgtctggtcattgccgacaatcgtcaggctttagccaactggataaccttagctattgagaaggattaccggaaaagataatctcataagtcataaaaaaagtcaggcacttcagcggttgcctgactttttttatatctgtgaaagctgattggttatcgatttttggccttcagcactttctgtacattctggattatttccggattagcaaggtccttcttgccaatcagcgtgaaggcaaagttgtctgccatgatttcttccggatgaatgagatagttggtgttctttcctacttgtgtgtagaaatcttccgcttcatccagtgcataaatgattgtttttccagccttctgaataggaacaaaatcaccgttcaaaggtacaagtcccactttcaggtagtcgaagagcgtttttccgtcataaggtctgtcggtataaatcaccatggtgcagtattgcttctgtccgccgatggtaaacgtgccgtaactgtcatatcggctgatgtccggattggaaatacgaatttctgccaaatcggacgggaagataatttctttttcaatcaccgtgaatccgatgaccttgtaaatgtctttcttgaagttggaattctgtcgtgtcagcaggtgaaacaactcatgggccacaaggtatttcaaatctgcatccgaagcttccttcaacgcatactcaccgatggcaatccagtttacgcgggtgtaggcctctgcattaccttcttctttctgggtagtttttacaaagatgatttctttcgggaaatcgaggttgtaactttgtttcttgatttctgcatccagacttttcattgccttgctgatacgctctttttcagtgtcactccagttgagtgtctgttccatggcaaactgcaacagctgtgatttgcgtccttgcggtttttgaagacgcacgtcaatgtcaaactggttccagtcgcgcgtatagtcatccagttccgtaatcagcatttgtccttcggcacgagtggcaaagcggaagatggagtttgaaaacttgttactctgcgcccaagctgcgatagtggtaaaagccaggcaaaatatgaaagaaagtgagtgttttagtgtcatagttttgttttttagttacctgttattttattctcagtggtaaatataacgtatttttctgtatttttcctcgctttttatcaagaaaaagaaagaaaaagaaaaaataagacaaatcgcagagagtattacttgcctgagaaaagaggaaacatggttagggaaccttcgtttgataagtgctgaataccgtggcgtatatgcttattttcttttgtcttttttatgtttctcgaacgggaaacctatgttttccttgacggaaacgtacgttttcctatcgtgaaacgtaggtttttgctgcgcgcaacgtagagtgtgtggtaagattttcagataaacttggtgtgttttttctttatagttggtttagtaagctattatgctgtaagtgtatgttgactgcggggtagacttgtatagtgtgaatcagtaaaaaatacatgatatgatgtgttgagtaaatctctgtcacagaaagaaaagtataaaaactcaaaaatctgtctgatataatttgttatatttgcataatataattacatctaaatatagaaattaggatagggcccgtttttaaaaacaggtatcgtcagtcataactattagagttgggtaaaagttttttgtgaattgatacctataatgttatgaacgttcattattattttttaagtgtataacttccgataatgcaaaaatataggaacatatgacaccagaagaaaaagcaagacagaaaatagatcagtggtttagcgatgcaggatggaaagtagtagatagagatgagtatgaaccaacttgtactgcagtagctataagagaaggattattgaaaggtaatcttgaggctgactatttcctttttattaatggcaaagctgttggggtgcttgaggctaaaagagaagaaacagatgccttctctgataaagtatgtaatcaggctgttttgtatgcgcgaaatgttcctaggatttatcagacatatcagaaaccattgccttttatttttacttcaaatggcaaagatctgtatttttgtgatttccggaagcaagattcatgttttaatcagattatgacgattcccactccttatgaattggttaagttgttgggaataaatgattattttgccggacttccaactttgcgaaaaaaaggattacgtgattgtcagtatgaggcagttactgaactggaaaaaagtttcaagagtggtcagaatcgcgccttgatggtattggcaacaggtgcaggtaagacatataccgcatgtcttgctgcatatcgtcttctttcatatactccaatgagaagagtgttatttcttgtggacagaaataacctcggtaaacaggcagagggagaatttggaacttttcggctgacagaaaatggagatgcattcaatacaatatttacagtaaaccgtcttcgttcctctgctataccatctgatagcaatgttgttatttcgacaatacagcgtcttttttcttttctgaaaggagatactattgaggataatgacaacgatgatgataatgagcctacagaagaagttgtattgcctcctaacctcaatttaccacatgattattttgatctgattatcatagatgagtgtcaccgctccatttatgggaattggcgtaaggtattggaatattttgatacagccagacttgttggattgacagccacaccaattcctgaaacaatggcattctttaacaacaatcgcatagtcaactacacattggaaaaaagtatcgttgatggtgtaaatgtagattgccgcgtatatcgaatcaaaacccaagttacagaaaatggcggagctata

SEQ ID NO: 3814 - DNA, 30516 bp, Unknown
  gut microbiota DNA sequence
gacaaattccagtcctcctttcggcatgttcttggcgaagatggttccgccatggaacaatacggcgttcttcacgatggccagtcccaaacctgtacctcctaatttccgtgagcgtcccttgtctacccgatagaagcgttcgaacaggcggttcaggtgctcttcgggtactcccacgccggtatcagagaaactgaaatagtagaatttctcatcctcgcggaagcagttgatggtgatttgtatgtcattacccgcataggctatggcattgtcggtcaggttgcggaagatagagtagagcagcgagctgcttcctgtcagtatgacttccgacgggagcttgttcaccacagtaatatgcttttcttccagaccgagtgccacctcgttcaaaatgttttctacaatcttgctcaggtttacctgttccttttctaccagttccggtgcctcgtccattcgggtcagcacagagatgtcgcgcagcaggaaggtcagacggttgctctgggcatagcttctttccaggaagacacggacattttcttgcggaatgttcgggttgctgataatggtttccaggtatccctgaatgctgctgacgggcgttttcagctcgtgggcgatgttctgagtcagctgacgtttcagatgggcctgttcttcttcttgcgtaatatcgttgatggatatttcgaacgacatatcttgaaagatgatacactccaaggtgaacgagcgagcgttcttgttgaggtgcatggcataccgcttttcctctttgctgaaattaccctcgttccggtttaggaactcaatgatgggctgcagttccggaatgtcgaaaatttcattgctagaacgtagattacggtcggatatgttgttgatgtattgcgtaaacaggttgttgaccaggatttcctgtcgttctttggtaaagacacccagtccttcgtgtgaggtctgaaggtgcgaaatcagtttctcacgctcaatgtagagagcttctttcgcccggtgcaggcgtttgtatatcttaatgatgtgttgtgatatctctcccagttcgttcttggggaaagtttgcaggatgtccatgtcaatcggttcattccggtcggctttcatggcaaactgttgcagtttggtgatggacttgcccagcttccgggtaaagcggtagaagatgaaaatcagtaccagacagataatcagcgcaaaccataggtagccagagtcagcttgcaagtgttctgccagactcaggttgtagggaagggcagaccgtatgatgatgcggtagggaggataataacgtgcggaataaaaatattcctctccctgaatgctttccgactggcggctgatggaatagccgcttccatacatgagtgcgtcttgcacttccttgcgtgaagagtggttggcaaagcttttccagttggcatttgtattgtcgtacacgactttccccgacggctcaatgagcgtcacccgcaggttgggcatcatgtgagtcgttacatagctctgcatggaatcagagttgaccccgtggtgatcggccagaaagtcgcacagctggttgttatagttttgcagctgcgtgttcagtaattctattttataagccttttcgcgtttgtattgaaacagcatgaagcatactgcatatcccaggaaaaggaatatgacagaaagaaacagcctctgactgaaagggaggatgcgataagaaaattttgtcatgattgtgccaccgtaatttattcacattcgaaacagtatccataaccgagacgggttacgatacaagcaccgtattcaccgattttcttgcgaaggcgggtgatattcacatcaatcgtacggtcgagtacatacacttcatcgtgccataccttcgccagaatgtcttcgcgggagaatacgcgtccctggttctgcaacaggagcagaagtatttcaaattcttttttcgttaatgaaatttcctcgttgttgatggatacttttttcttcggaatgttgacagacaatcctttataaatcagctgttcgggcacctgagtctgtacgccggccgtgcgtcgtaacaccgcctttaccctcatgatgacttcacgcagagagaaaggctttgaaatatagtcgtccgctcccaggttgaatccggtcagcgtatcattttccgtatcctttgcggtgatgaaaatgataggaatgttctgtgtatccttgttctttttcatcatgctggccattttgaatccggaaatttctcccatcatcacgtccagcagtatcaggttgtaacgtggcaattcaagtttcaaggcttcttcggcggaattggcagtatctaccatgtatccttccatttcgagattgaactttagaatctcgcacaagtcttcttcatcgtctacaactaaaatccggtaatcgttcatgcgtattttctattaattaatacaaaattcaatgtgatttagttttcgttacaaagatgaccctttcttgtttcgtccttatgaaataggtgttacatttaggttacaacatgggcttggtaaactctccggctatggaacggttcatttcgctgcgtatttccttgggagtaagaccgtggccgagcaggaacatcagcttggtgagtacgctttccacagtggcatcatatccgctgatgacacccgcatcgagcaggtgcagaccggtttcgtaacgtgccatttctaccatacccgtctggcattgtgaaatgttgacgatgacaattccctttgccgtagcttctgccagcaagtggatgaaccagggcttctggggcgcatttccggagccgtacgtcttgagcactaccgctttcagaccgggtgtgttgagcaccgtgcgcacgatgttttcctgaatacccgggaaaagtgtcaggataatcacattcgtatcgaagacatagtgtgcatgcatgggcaggttgggatccaccttccggatacggtcgtattcgtacttgatgtggataccggccgtggccagtgccggataattgtaagaacggaacgcgttgaagttttctgcattaatcttggtcgtacggtttccacgcaacaagtggttctcgaagaaaatgcagacttccggtactacggcagttccgtccggatgttttgcagcggctatttcgatagaagtaatcagattttcctttccgtctgtacgtagcacaccgatgggcagctggcttccggtaaggatgaccggtttgctcaggttctccagcatgaagctcagtgcggaagcggtataggccatggtgtccgtgccgtgcagaatcacgaacccgtcgaagttatcgtagttatattggatgattttgaccagtttggcccacaaggccggctccatgtctgaggagtcgataggagggttaaactggtaagaggaaatgcggtagttgaaccgtttcagttccggtacgttctcctgaagttggtcaaagttaaatgcctccaaggcaccggtttccggattttcaatcataccgattgtacctccagtgtagatgagtaatacggaaggataatctggttttatcatttgatgcttcgtttagtttggcacaaagatagcaaaaatatgctttgactgaaagaataagccgctaaaaatagcagaatgattaattatccttcgttttttagcatttccaacagtttgtcgatggcctttctggcatctttttcctcctcgagcaaggtcacgaatttgctcccgatgatgcatccggaggcgtatgccgctgctgattcgtaagtggatttgttggagataccgaacccgatcatccgtggattccgcaactgcatttgcttgatacgctggaagtaagcctgcttctgtgcattgaattccttttgtgctcccgtcacggtcgcagaagataccatatagatgaatccgtcggtatgcgcgtcgatttgccggatgcgttcttcgctggtttccggcgtgatgagcataatcacgtggatgccgtattgttgtgcaatgggccgatagctttccaggtaatccttataaggaaggtcgggaataatcacgccgtcgatgccgcatgcctgacattgccggcagaaattctcaaaaccatactgcatgatggggttcaggtagcccatcagcaccagcgggatgcggacatctgtgcggatttgctccagctggctgaaaagtttgcggagcgtcatgccgttgcgcagggcctgtgtggctgcgtgctgaatgacaggaccgtcggccatcgggtcgctaaacgggataccgatttcaatcatctgtactcctttccgctctaaggtgcggatgacttcggcagtaccttccagggtcggggtacctgcacagaaataaatggaaagcacgtggtctttatgtgtctggaataattggtcaatgcgattcatatcagtaagtttttagaggttgtacttgttttgtttgaaagagtaaataaagtcagagagggcagccgcatctttcagaccgggagcctgttcaaagccgctgttcaggtcgatgccggcccagcggggatgactgaatttcagtaatgcatccaggctttcaggcttcagccctccgcttaacaggaaaggcgtctcgctgtggtagtgcgtcagcatttcccagtcgaagcttttgccggagcctccgtatccgttgcagggagtgtcgaacagaaaatagtcgcagaaggcggcatagctttccgtagccagtaggtcatcaggcgtacacagggagaaggccttgatgacacgtaggccagtctgttgcacttcccggcaaaactctggcgattcctttccgtgaagttgaacgtaatccaattgccatgttgctaccctttcccggatttgcgagagggaagcattgacaaacactcccactttctgcaccgtctccggcaggtattccggtacgcccggtacatagcggggagaaccttcgtagtcgatgaatcccatccagtcggcccctgtttgctccacctggcggatgttctccgcctccctcatgccgcacactttgacaatcataaggcaagagcttgaagaaagtccgacaaagccttttccggtgaaggcgttttcatgaaagtttctcccatcaggaatcccctgaaaccggcttcacgcaattgcctgaacgtgtcgggttgcgagatgccactttcggatacccacagcagttccttcggcaacttccgggccaggcggaacgaattctccacatccgtatgaaacgtgcctaagttccggttgttgactccaatcaggtctacatgctcgtgcaggtagtcgagttccttttccgtgtgtatctccagcaggacctccatctctaactggtgggccaatttccctaaggctttacattcgtccacggtcagggcagctgcaatcagaagcaccacatctgcaccggccagcttggcttgatatagctggtagggactgacgataaaatcttttcgcagcaccggaaggtgtgtcagcgggcgggcagcctgcaaatctttcaggttgcccccaaagaattttgggtcggtcagtacggagataccggaagcacctgcacgttcatagccggggacgatgacggtcgggtctgcctgtggagcaatatctcctttcgacggggagcgtcgtttgaattccgcaatgatgcccgagggcgatgcggccagtacctgcttcaggctttttgacggacggggagtgcccaactgctggatgaggaagtcttgggatacggcttcttcctgaagggcaatttctgtgcgcttatgagccacaatggtatgtaagatatcagtagtcatcgttcgtttattggttaagggtaaggaacttgcgtagagtggccagggcttttccgctttcgagcgattctttggccagtgccacgcattcttctattttcttctgaggctccagtgcctgaatggcaaacgaggcattaatcagcacgcagtcggtctgtgccttgctgccctcattatgcagcacccggtcgaaaatggaggccgcctcttccggggtatttcctccgtaaagctcttcctgccgtgccatggaaaaacctaattccgagggacgatagatggtttcgtaacggttggtcatcaccttgaattcgtcggtcagcgagatttcatcgtatccgtccaggttgttgaccacggcaaactggatgccgagttgctggagcgtgttggtgtaaagccgcatctgcgggaggtcggccactcctaacaactggcaggccggatggcagggattgaccagcggacctaataaattaaataaggtacgtacgcctaatgccttccgcacgggggccacggttttcagggccggatggaagaggggagcgtgcaggtaagccatgccgcattgttcgatggagcgtttcagtttgtccgcgtcgtttgtgaattttacgccgtagcgttccatcacgttgctggccccgcttactgaagtggctccgtagtttccgtgcttggctacccggtaaccggctccggccacgacaaagcaggcacatgtggagatgttgaaggtgtttttcccgtctcctccggtacccacgatgtcaatgggatgaaattcatgcaggtcgacgggcacgcaagcctgaagcagcgcatcgcggaagccgaccagttcgtccaccttgactccgcgcatctggaaggcggccagcagggcggctgtctgcgcttcattcatctcgccgccggtcattctctgcatcagcgtgcaggcttcttcacgtgtcagctcttcgtggtggaatatccgttttagtatttgtttcatattgtgtatctaagttttatgagtgagaaaatagggttttctttattgatggtgtatccagttgcccagtatctgtttcccttcgggggtgagaacggattccggatgaaactgcacgcctcgcacatcgagtgtgcggtgacggagtgccatgatgtatccttcttcacttacggcggttacctccaggcaatccgggaaatctttttggtcgactacccaggaatgataccttcctacctgtacggtagagggaagtccttcgaacagatagtccgtcgcagtcaggctgacgggactctgtatgccgtggaacacctcatccaggttggtcagttttcctccgtacacttcgccgatggcctgttcgcccaggcagacccccaatatcggtttctttccggcatacgtacggatgacatccagcagcaggccggcttcttccggaatgccgggaccgggcgacagcagaatcttgtcgaattcctccagttcttttaactgaaactggtcgttgcgtttcacggtgacttctgctcctaattcttttatcgcatgactcaggttgtacacaaatgagtcgtagttatcgatgatgacaattttcatggtgtgttatattttttcggccaggagaatggcttttttcaatgctcccaacttgttgtttacttcttgcagttcattattctcgtcacttttggctacgatgccccctccggcttgaaaccagagctcgttgttacggcttacgaaggtacggatggtgatggcctggttcaaatcgccgttcagtccgatgaagccgatgcaacctccgtaagccccccggttgtgcggctcgatttcactgatgagctgcatggcctttaccttgggagctccgctgagagtaccggccgggaaggtatcgatgaacgttttaatcgggtcggcttctttgtccagtgtgccgcttaccctgctcaccaggtgaatcacatggctgtagtattgcggctgtttgtagaattccacatgcgtgtcgtggcaattccggctcaagtcattccgtgccaggtctaccagcatcacgtgttcggcattttctttcgggtcggccagcagggcttcggtcagtgcggcatccgtctttttgtctccatttctgcgggtggtgccggcaatagggtcgatggtggcctttcccgcttcaatcttgcaatgcgtttcgggagaggaaccgaaaatccggaaaccgccgaaatcaaaatagaacaggtaaggcgaaggattgatgcttctcaatgcccggtagagggtgaaatcatcgccctcatagcgctggatgaaacggcgggaaagcacaatctgaaacacgtcgcctctcttgcagtgggcaatgcccttgcggatattggccttgtgctcctcatcggtcagcgtactggtggtgtcgcccgtcgcccgaaaggcgtaggtggtgtagttgcggttcagtaccgctttctccacttcgtcaatgtggctcggctcgtcgttgccctgcagctccaccagtaccatctcgctttggaagtcgttgaacacaatcaggtacttgtagagaatgtagagaatctccggcgcatcgttcttcgggtcgctgctgtctttcaccggaatctgttcgaaatagcggacggcattgaacgtggtgtagccgtacactcctccgtagcgggcatattctccttccacctgaaattgtctcaggaaatactggaaagcatcttccacctggaactcgggagtgagcggacgctcttcacggcttttgtccggaaagaccgtggtcacgattccgtggttcacggagaaactggcaatggggttcagtccgatgaaagagcggttgttttctactccgtggtaatcggaactttccagcagaatactttgcggaaacaggtcgcgcaccttcaggtacgtgctcacgggcgtatgcaagtcgccgggcagcgttttgtagtgggtggtataagcaaattttttcatggcttttctcgtttaaaagatttcagggttgtttttgtatttcagataagtgtcaatgtctttgtcacctcttcccgacacggtcagcaccacgatgtccgagggctggaactttactttctccagtgctcctaaggcatgggccgactccagtgccggaatgatgccttccagccgtgtcagttcgaaggcagcccacagggcttcgtcgtcattgactgccagcacggtggctcttttctgtgcggctaagttggcatgcatgggaccgatgccggggtaatccagtccggccgaaacggaataaggctccagaatctgtccgtcctcgtcctgcatgaccagggtcttggaaccatgaatgatgcccagccggcccaactggatggtagcagccgacaatcccgtttccactccctttcctccggcttccgctaagataattttcacccgttcatcgtccaggtagtgatagatggttccggcagcattgcttcctcctcccacacaggccatcaggtagtccggatagtcacgtccttcgtgttccatcagttgctttttgatttccttactgatgaccgactgcaagcgggctaccatgtcggggtagggatgaggtcccactgtggaaccaatcacatagtatgtgtccgccggatggcagcaccagtcgcgtatggcttcgttggtagcatctttcagggtcatgttgtccgaagtcacggcttccactctggctcccagcatctgcatgcgctctacgtttacccgctgccgttccacatcggtctttcccatgtagaccacgcattccattcccatcagggcgcataccgtagctgtggccactccgtgctgtccggctcctgtttcggcgatgatgcgtttcttgcccattctccgggccagaagcacctggccgatggcattgttgattttgtgcgctcccgtatggttcaggtcctcccgtttcaggtaaattttgcatccgtatttttccgacaagcgttgggcaagataaagtggtgaaggacgtcctacgtagtccttgagcaacgcatcgtattctttctggaatccttcatctgccagcaccttgcggtaggcattgcgtaattcttccacacagcgatggagaatttccggtatgtaggctccaccaaaatctccataaaatccttcctggtttacttgataagttttcatgagtgtatttgtttgcattagggtgaaaaaacaaaaagggccgtcgtaaagttacgacagcccttctgtgatattattactattgagatatatacatgcgactgagttcccttacgacctttggagttgtaagcggcgccaccagaagaatgtatttaccgtagaaagattcataatgttatttttcttgtttttttattgtttcactcgcaaaggtaaccattaatatgaaaacgccaaacaaatggatggaaatttttcaatttttcctatctttgttccacattttaaatcttgctatataataaggtatggaagagtttcgactggacggtctgaccgtcaaagaacatctgctgatactggcggaagatgggaaccgcaagtttaccgagggacttcacccgggggtggaacatgtgttgggcattcgtttgccggcgttgcggaaactggctgcaaggattgccaaggcagactgggagcgctactttgacacagccgacgggttttatatggaagaacgcatgttgcaaggcatggtgttgggatgcatccgccccgacgaggatgtggaagtctatcttcaccgtgtgacacgttttgtgtggattatcaacagctggtcggtgtgcgatacgtttaagtttggaggaggaaaagcttttatccgccgtaacgaggcgcggctttgggaatacctgaaagaatggatgaaagcatcgggtgagtatgaggtacgtttcggcgtagtgatgggaatgagttatttcctggatgaagcccacttggaggagtatctttccctgctcgacgggattcgtcatgagggatattatgtgcgcatggctgtggcctgggcactttcattctgttttgtcaagtttccggaacagaccatggcttttctgcgccattgtcatttggacgattttactttccgtaagaccattcagaaaatcggtgagtcctaccgtgtgagtgaagacatgaaaaaggctgtcaaggcattgaagcgctgacagcctttgccgttatttaggcagcttgcttatttcatgataaatttcacggcagcccagttgtgcttttcgcggtgatgcacgtattccatgcccagactctccgctttttcgcgcagcaccggaatgtcttccgtgtagaatccgctgatgtacagttccgaacctttcttcatgcaggccgcataggccggcatgtcctgcagcagaatgttgcggttgatattggctattactacatcaaaaggttcccgtccgttcagcagggaagcatctcccagttccacggtgatattggaaatgccgttcagggcaatgttgtcgcgcgagttgttcacgcaccagtcgtcaatgtcgatggcggtcacctttccggctcctctcatgctggccaggatggccaggatagatgtgccgcatcccatgtcgagcactgatttgcctttcaggtcagcctctaacaattctcctaagatagagctggtggtttcgtggtgtccggtaccgaaagccatctgcggattgatgacgatgtcgtattcggccttcgggtaatccttgtggaaggtactgtgaatcacgcagcggttgtcgatgacgatgggctggaagaaattcttttcccattcctcgttccagttcttgtcttccggttccgtaatggagtaactgatgcttgcgccgggtatcggaaaatcttccaccacttgcttaagcgcggcctcgtcgaactggctctgctggatgtaggccttcatgccgttttcacattccacgaaactttcaaaaccgatgtcggctgtcagtcccgataatacatctgtgatagtttcattgcacggctgtgcggtaaaggtcacttcaaaatatttcatacgtatgcgagtttaatagaatgtcagacaaatgtacgtaaaatcattgatattataatgcttgttagctaacttcttttactgctaaaaaatgtgtcaatgaagggcttttttgcagaaatatgtttgccatattgaaaaactgtctaactttatgttttgaatcataaacctatgaacaagtaaatgcatgtgataatgaaaaccacattccgtaggctgcaatgcggtattctcgctgtcgcgtggcttttggccggatgcaacagcgatgtttttattgacagattcctgtcggcagaaccttccgtgtctttatccgaaacagaaaaagaagtaactgtttgctttgaggcagacaactgggatattttaggggtagaaagtctgagggaaggggtcgcagtgtcggccacagatctggaagggaaaaactccaaatatcttccttttgaggaaggagaaaccggcattgtgtattgcaagaatgcgtttctggattttcgtgtggaaaaaagaaacggcagtgaattgcattttatttccggcgagaatctctatgaccagccgtttgaaacatttgtcagggtgggcaaccgttatgaagagaaggtgattcgcgtgtctttttctcctacccgtaaatatcagatagacagtgtgtcatacgactggagtcagttttcttccttcgattacatgctggaacccgtagagcaggtggaagtgaataccctggatgccagtagtcccgccacagtgtatttttatccttataagaattcagcccgtatcgtggagttttacatgcagtatggcggctggggaggagatgaaaacgatttacggaagttgctgggcgatgctgcttcccaggtggagattccggatatagtgagcggcaccccgggattgtatggcacgaaggtctctttctgtcatcatgaacaacggctggatgcgggactcgacaaggaattgaaggtatcgaaaaccgtagaggcaggcaaacacgtacgtctggaagtgtataatggaatagagcagtatcacgtaccttataaagcctatctttccaactcgctgaccggaaagaaattagaaatctccggtacgctttccagcaagagaccgttcaattatttaatcattcctattgcaattaccgatgaagataaatagacttgcactcagactgtgcatgtgtgcgcttgtgttgttacgtgcactttctctctatgccgatggcaaggacagtctttcccggaaaatgattcacatggcaggcattgacgtcaagccggcttatgtttttcccacgcatgagttctttgccggaaacaatgccacgttttctcccatccggaaaaacctgtcggttcatttgaaatacgggttcaagtttgcgccggatacttatttcggccgaatgtatcctcatgccgtacaaggaatcggggtggggtataacacgtttttccattcttccgaactgggaaacccctggtcagtgtatgcctttcagacctcgcgcatagccagtctgactccccggttgtcactggattatgaatggaacttcggagcctctttcggatggaagaagtatgatgcggaatcgaatccctacaacagggtggtaggttccaaaatgaatgcgtacattcacctgagtttcctgttgaactggcaactggatgcgcagacaaatcttagggcaggaatcggtgcgacgcacttttcaaacgggaataccgcttaccccaatgcgggagtgaataccttgggagccagtatcggtttgacacgctatttcggagggacgtcgcgtgccacgctggcagatggctcttccggcattgttcggcgtccgcctttcaagccctatgtcagttacgacctcattgtgtacggagccacccggaagaaaggcgtgtttccagaaggtggaaatcctgtgctggtgcccggttcatttggtattctcgggctgaattttacgccgatgtacaacttcagccgttatttcagagccggtgcgtcggtcgatgcacagtacgatgaaagtgccaatatttccagttacatagccaatagtgtggggcaacccgatgcggagaccatcaagttctatcgtcctcctttccgcgaacagtttgccgtagggctttccgtacgggcagaggttgtgatgccgatattttctatcaatttaggtattgggcggaatgtcatctgcaaaggagtcgatactgattcattttatcaggtactggctttaaagaccgatatcaccaagaacctctttctgcatgtggggtatcagttgcacgacttcaaagatcccaacaatctgatgttagggttggggtttcgatttaatgcaaaaggaagggaatgagtatcccttcactttctgcttattgtgcagcttttaaagccgcttcgtagtccggttcgtgggaaatgttttccaccagctgggtgtaacttaccttcccgctctcgtccactacaatgacggcacgggccattaaaccttccaagggtccgtcggctagctggagaccgtagtgtgcgacaaaatcacggctgcggaatacggacagcggaatgacattatccagcccttcggtagaacagaaacgtgactgtgcgaagggaaggtccatggaaatacataacacgactgtattctccagccctgcggcccggacattgaattgccttacggacaaggcacatgtcggagtgtccagactggggaagatgttcagtatcactttctttcctttgaaatcggataagcttacttcttccatctttgcattgacggcgtgaaaatcgggtgctacctgtcctacctgaagcattggaccggatgtgtgtgcttctactccgcggcaaattacggtttcacctttttcactctgcaggtcacggcctggtactcctgcggcggcacgaaccggcatcagtcccatcatccatattgccaccatccataaaattgcactgatttttttcatataaaaatagtaaagggttagggcgttaaaggtaaggagattttttgaaaaacaaatataagggttgttatgaatgctcaagcaaaaaacgacgttagataaattgtgcatattcggcctttcattttaataggtttatttaagtttataaactatgctatccggcagtatttttttcttatttcttttatataacctttttttcttataaatttgcagcctaaatttgggaggttacttcctgaatgattagaaattagataaaaactacataattatgagtaagaagtttactgaatattctcagctcaacttgtcagaaataaacaaggaggtgctgaaaaaatgggatgaaaacgatgtgttctctaaaagtatgacagaacgtgagggatatccttctttcgtgttctacgaaggtcctccctcggctaacggtatgccgggtattcaccacgtgatggcacgtacaattaaggatacattctgtcgtttcaagaccatgaaaggtttccaggtgaagcgtaaagctggatgggacacacacggacttccggtggaactgggagtggaaaaggcacttggaattaccaaagaggatatcggtaaaacgatttcggtggcagattataacaagcattgccgcacggatgtcatgaagttcactaaagaatggactgaccttacccataagatgggttactgggtagacttggaaaacccgtacattacctacgataaccgttacattgaaactttgtggtggctgttgcagcagctttacaagaaaggtttgctgtacaagggatataccatccagccgtattctccggcagcaggtacaggcttgagttcgcatgagttgaaccagccgggatgttaccgcgatgtgaaagaccttaccgtggtaggtcagttcaagatgaagaatccgaagccggaaatggcagagtggggtacaccttatttcattgcatggactactactccgtggacattgccttcaaatacggcactttgtgtgggcccgaagattgactacgtagctgttcagacttataatgcctataatggagaaaagatgacggtggtacttgccaaacctttgctctatacgcatttcaataaaaaggcagaagatattgcactggaagactacaagccgggtgacaagttgattccgttcaaagtggtaggcgagtacaagggtactaatctggttggtatggaatacgagcagcttatcccatgggtgaaaccagtggaagctgcagaagacggttcctggaaagaagcttcggctaaagcattccgtgtaatcccgggtgattatgttactacagaagacggtacgggtatcgtacacattgcaccgacatttggtgcggacgatgcgaacgtggctcgtgcagcaggtattccttctttgtttatgattaacaagaaaggcgagactcgtccgatggttgatttgaccggtaagttctacctgatggaggaactggatgaggctttcgtaaaggaatgtgtcgatgtagaaaaatataaggaatatgaaggccgttgggtgaagaacgcatacgaccctcagttcactgtagacggaaaatacgatgaaaaggctgcacaggctgctgaatcgctcgacgtatatatctgcatgatgctgaaacagcagggactggcattcaagactgaaaagcacgtgcacaactatccgcactgctggcgtaccgacaaaccggtgttgtactatccgctggatagctggtttatccgctctactgcttgcaaggaccgtatgattgagttgaacaagaccatcaattggaaacctgaatcaactggttccggacgtttcggcaagtggctggaaaacttgaatgactggaacttgagccgttcgcgctactggggtactccgttgcctatctggagaagtgaggatggcgaagaaatctgcatcggttcagtagaagagctgtacaacgagattgaaaaatctgttgctgctggcttcatgactgaaaatccgtataagaaattaggattccagccaggtgtttataacaaggaaaattacgataagattgacttgcaccgtccgtatgtagacgacatcatcctggtatctgcttcaggcaaaccgatgaagcgtgaatcagatttgattgacgtatggtttgactcaggtgccatgccgtatgcacagttgcactatccgttcgaaaacaaggaactggtagattcacgtagctactatccggccgacttcattgcggaaggtgtggaccagactcgtggatggttctttacattgcatgccattgctacaatggtgttcgacagtgtggcttacaagaacgtgatttcaaacggtctggtacttgataagaacggaaacaagatgtctaagcgtctgggtaatgccgtagatccgttcggtgcaatcgagaagtttggttctgatccgttgcgttggtacatgattaccaattcttctccatgggacaacctgaagttcgatactgacggagtggatgaagtacgtcgtaagttctttggaacattgtataatacttactcattctttgcactatatgccaatgtagatggctttacatacgctgaagaagatgtgccgatgaacgagcgtccggaaattgaccgttggattctttcactgttgaattcattgattaagaatgtggatgcttgctttgccgattacgaaccgacaaaggctggccgtctgattacagactttgtaaacgataacttgagtaactggtacgtgcgcctgaaccgtaaacgtttctggggtagtgccatgtcaactgataagttgtctgcttaccagaccttgtacacttgcttggaaacggtagctaagctgatggcaccgattgctccgttctatgcagaccgtctgtacatggatttgattgcagtgaccggacgtgaccaggtagtatctgttcaccttgccaagttcccggtagccgatgaaaacctgattaatgcagaactggaagctcgtatgcagatggcacaggatgtgacttctatggtattggctttgcgtcgtaaggtcaacatcaaggttcgtcagccgctgcagtgtatcatgattccggtggtagatgaagcgcaaaagcagcatatcgaagctgtgaaagatctgatcatgaacgaggtgaacgtgaaagaaatcaagttcgtggatggtgcggcaggcgtactggtgaagaaagtaaaatgtgacttcaagaaactgggcccgaaattcggaaaacagatgaaagcggtggctgcagctgtggcaggtatgtcgcaggaagctattgctgaactggaaaagaacggaagttacaccttccagcttgacggaacagatgcggtggtagaagctgccgacgtagaaatcttcagtgaagacattccgggatggctggtagccaacgaaggtaagttgactgtagcgcttgaagtgactgtaaccgatgaactgaagcgtgaaggtattgctcgcgaactggtgaaccgtattcagaatatccgtaagagcagcggttttgaaattactgacaagattgctatcgtgctgtcaaaaaattcaaataccgatgacgcgataaatgaatataatacttatatttgcaaccaggtgctagctaactcactgacattggctgatgaagtggttgacggtactgaacttaactttgatgacttctcgttgtatgtaaatgtaacgaagctgtaatatgaactcatccacccggctttagtcgggtggatactattattaacttaaaacttaagcactatggctgaaaaaacaaggtattctgacgcagaacttgaggaattccgcgccattatcatggagaaacttcagctcgcggaacgcgactatgagaaactgaaaagtagtataatgaacacagatggtaacgatactgacgatacatctcccacatataaagtgttggaagaaggtgccaataccttatcgaaagaagaaactactcgtctggctgcccgtcagctgaagttcattcaaaacttgcgtgcggcgcttgtccgtattgaaaacaaaacttacggcatctgtcgcgaaacaggtaaattgattcccgctgagcgccttcgtgctgttcctcatgctacattgagtatcgaggccaagcagcagggaaagaagtaacgaaatgaatttttaattgaagattgggaattgaaaattgagaaacgggacttttcaaagtgatccattttcaattttcagttctcaatttttttgaatccaatttgcaaattgaagaagatgaaaaaatttttcactcagggacgtctggttactcttgtggtggcaggagtgctgattatcgaccagcttatcaagattgcggtgaagacgaacatgtatttgcatgagaatattcatgtgaccgactggttttatatctattttacggaaaacaacggtatggcttttggcctggagatttttgccaaactgttcctgacgcttttccgtatcgtggctgccatattgattacggtctatctggtgaaactggtgaaacggacggacaaggtgaagaatggttacctggtttgtctttccttgattctggccggcgcagtgggtaacatcatcgactgtgtgttctatggagagatattcagcgagagtacgcattcgcagatcgcttcgtgggttccactggggcagggatattccgactggttacatggcaaggtggtcgatatgttctacttcccgattatcgatacctactggcctgactggatgccttttgtaggaggtgatcactttattttcttcagccctatttttaactttgccgatgcggctatcagttgcggcatcattgccttgcttattttttattcgcattacctgaatacggaaacacatgcgaattcttcccataaagaagccaagaaatgaaacgaatatcgcttataggagtgtccatgctggcgctgtgcggcatgtggagctgtggcaagaaagtgccggaggaaattattcagccgcaagccatggagaacctgctttatgattaccatctggcaactacgatgagtgcggatttgccttacgatgagaattacaagaaacaggcttacctggcatacgtattccagaagcatggagtaacagaggcggagtttgattcgtctatggtatggtattcacgtcacagcgacgagatgaatacgatttatcagaatctgcagaagcgcatggaaactactgccgagctgctgaaaaaacagacagtacgcagcagcggagaggtggcggtttcattgtcgggtgatacggtagacctctggcaggaccgtaccatttattggctgacctcttctacactcactaataagctgactttcgatttgaaggctgatacatcgttccacgagagggacaagatggtactggaagcaaatttctctttcctgcctaaaggtaagcatgaaggtaaggtagtgatggccatgaacctggtatttgataacgacagtacgcagggaatcagtcgggtggtggaggcttcgggtatacagcgcctgatgcttcgtccggattctgcatttaagtacaagagtgtgagcggattcatgtattacgccggaaaagaacattcatcggccttaatcagcgatatacgtctgatgcgttatcgcatgcatgaagagaatttgcagaagcagattgattctgtagccgtaaaagctgatacacttgcgcagaacgatacccttcgtagggtaaaacggcaggaaattaccaaacgctgatacttatgcagtattatgcatctcattatctctggcatgcggggcaggacaaactgttccgcatgcagcgtatagggttggaagtgtctggtcgtacgtgggtgtcgatggagcctttagaagaagaggtccggaatacccagtggctgggcggactgattgttctggcagcttctgattcggaattaagaaaaggcgaaacatttcaggagtttcgtgcgcggacagtttctgcggtgacaggagaccagccgctttatgctttccatgtgccgttttttgatttgcagaagatggaatttaccgaacgaagccgtctggtgcgtttatgacggacggcggcggaattccgcacacacgatggcagtggccactgctacgttcaatgattcactggtatcctttccttgcgggtagttaggaatcagcagtttttgagaaacgagtgcttcaatttctttgcacactccgttcccttcattccccattatgataaccccttgtgccgataattcctgcgaatagatgtttttcccgtccaggaaagtaccaaataccggtacgtttctttctgtctgcacacgaatgaattctttcaaatcgcagtaatgcagcttgacgcgtgccaaagctcccattgttgcctgtacggttttcgggttaaaggcgtcggcagtaccctgtgaacagaaaatatcctctatgccaaaccagtcggcaatacggatgatggtgcctaagttacccgggtcttgcacgtcatccagtgccagacagagtgaatggccgggtaatgaatcatcataagtataagaaggtagttcgaatacagccagcacttcttgcggggttttcagcagactggcacgtgccagttcctccgcacttacctcaatggtttcctgagcgagcagaagcggatgagcctccagccactgggccgtagcaattaacagtttgcatgaaaagtgtcccagcaggtcgttgaccagtttgttaccttcggccaagaaagctttttctgctttccggtattttttcatctccaatgaccggatatatttgattctgtttttgctcagcatagtgtgacggggatttttaattatattttaagaacaaagctaagaagatatttttaatattgcctatctttgcatataaaattttgcatatagtttcagtttgtatgaagataatcccccgtatctatatcggcctgcttgtcctgctgctttttctgagcggatgttcggtcagtaaattcattcctgagggacactatcttctggataacgtaaaagtagaatcagataacaaggaaatcaagccttcgcagatgaatatgtatcttcgccagacacccaatgccaagtggttcagtctggtgaaactccctatgtatatttacggagcagctggaaaggattctacaaagtggattaaccgtttcttgtaccgtatgggagatgctccccgtatttatgacccgaacttggcggaagaaacccgcttgcagatagaacaggcggtgcgcaacatgggatacatgagcgggcaggtgagtatgtacacccaggtgaaagggaaaaaaattaaagttggttatcagattcattctggtgagccttatctgatttcgcatgtggcatacgatattgctgactaccagatacatgattatctgatggcagattcagctcgttcttatctgaagtctggctcccgtctcgatgtaaacaagcttgatcaagaacgtgaccgcattacacagtatcttcagaaccggggctattatcgtttcaacaaagattttattacgtatcaggtcgataccatgcgtaactcgcgcaatgtcgacttgattatgcaactccatccttatcagcgaaagaaggaagaccctccttcacagcatcgtcagtattatattcgcaacgttgattttatgttcgatgtggactttgcagagctgacttccgagagcttgaaaggagtggattctcttcgctcgggaggagtgaattttttttataaggataagttgttcttgcgtccgcaggtaatcagtgattataattatttgcaatctggaaaactgtatcgtaatcgcgatgtgcagaatacttattctgctttggggcgactgaacatcctgaaatattccaacatccgttttcgtgaagagttggaggctgattcggcttatctggatgcgtacgtcatgcttacccgaaacaagaacaagtcgctttcttttgaaattgaaggtaccaactcggcgggcgacttgggtgctgcagcttccgtagcttattcccaccggaacttgtttaagggttctgaaacctttaccattaagctgcgtggggcatacgaagcggttacaggactggaaggatatgccaacagcaactacctggaatacggggtagaaaccagcttgagcttcccggaatttatgtttcctttcctgtcgtctgatttccgtcgtcgtagccgtgctacttctgaggtaacggtaaaatacaactggcagattcgtccggagtttgagcgtactgtggcttctgcggcctggagttaccgttggggaaagcgtggagcgacccatcgttttgatgtgttcgacttgaattatatttacatgccctatcgttcggaaacttttcgtgaatacctagactatatggacgaaaggaatccattactgcgttatagctatgaagacttgtttattgtgcgtctgggctatacttatacttataatagttcgggtgctactacattgaagacatcgcaacgcaattcttattctatccgtttcaatattgaagagtcgggcaacttgttgtatttgttttcacggatgattaatggtagtccgaagaacggggaggcatatcagatggccaatatcagttttgcgcagtatgtaaagacggatttcgattatgccaagaatttcatgattgacgaccgtaatgccttggtgttccatgtgggggtaggggtggccgttccgtacggaaattccaagagccttccatttgaaaaactctatttctccggaggtgccaacagtgtgcgcggatggagtgtccgttcgttgggaccgggggggtaccgtggcgacagcaacagtctggattatgtaaaccataccggtgacatcaagctcgacctgaatctggagtatcgtacccatttgttttggaaactgaacggtgcggcatttgtggatgccggaaatgtgtggaccatccgaaatcgggaaatgcagcccgaaggacttttcaagttcaaccgtttctataaacagctggccgtggcctacggattaggattgcgtttcgacctggacttcctgattatccgtttcgacggaggtatgaaggctatcaatccgatgtacaccggacgcgaccgttatccgattatctctcctgatttcaagcgcgacttcgcgtttcattttgcagtaggttatcccttttaatatcatctattatatggacaagaatgtatataccattgaagaagtagacgagctgaaagcctgggcagagcaggccgaatttccggcagagatgcaactggacaaggctgtctatatacccgatgtcaaagaaaccgtgcaccggttaatcatgcaggcctacgtgtgtcatgagaatccgcgtctgcagggatgtctgcgcctgctggagcgtatcaaggcaagggtagaagaagagaaaagaagctagatgcggctaaaaatgccggctttctttcatatttgcaaaaaaaatacgaaatttgcacagcaacaataaagattaattcatacacctttataaaaataacaattatgacaaaaagtgcattacaaatcgcaagagctgcttaccagccgaaattgccgaaagcgttgactggtgctgtagtagctaaggaaggcgaaccgactcagtctgtagccgatcaggaagaaatcaagaagctgttcccgaacacatacggtatgccgttgattcagtttgtggaaggtgaagctaaagaatttgctccgatgaacgtcggcgtaatcttgtctggtggacaggctcctggtggccacaacgtaatctcaggtttgttcgacggtatcaagaaactgaacccggctaacaaattgtacggttttatcctgggtcctggcggtttggttgaccacaactatatggaactgacagctgatatcatcgatgaataccgtaacactggtggtttcgatattatcggttcaggacgtaccaaactggaaaaagaagaacagttcgaaaaaggatatgaaatcttgaaagaactgggtatcaaggcgctggtaattatcggtggagacgattctaacacaaacgcttgtgtattggctgaatactatgctgctaagaactatggcgtgcaggtaatcggttgcccgaagactatcgacggtgacttgaagaacgacatgattgaaacttcattcggtttcgatactgcctgcaagacttactcagaagttatcggtaacatcgaacgcgattgtaactcagctcgtaaatactggcacttcatcaagttgatgggacgttcagcttctcacatcgcactggaatgtgctttgcaaactcagccgaacatctgtatcatctcagaagaagtagaagctaagaacatgtctttggatgacattgttacttatatcgctcaggtagttgctgaccgtgctgctgctggtaacaacttcggtaccgtattgattccggaaggtttgattgaatttatccctgctatgaagcgtctgattgctgaattgaacgacttcctggctgctaacggtgaagaattcaacagcatcaagcgttctaaacagcgtgattatattatcagcaagttgtctcctgaaaatgctgctatctatgcttctttgccggaaggcgtagctcgtcagttgtcgcttgaccgtgacccgcacggaaacgtacaggtttctttgattgaaactgaaaagctgctgtctgaaatggtagctactaagctggctgcatggaaagaagaaggcaagttcgtaggtaagtttgctgctcagcaccacttcttcggttacgaaggacgttgcgctgctccttctaacttcgatgctgactactgctactcattgggttacactgcatctatgttgattgctaacggtaagactggttacatgtcttctgtacgtaacactacagctcctgctgcagaatggattgcaggtggtgtgcctatcactatgatgatgaacatggaacgtcgtcacggtgaaatgaaaccggttatccagaaagcactggtgaaactggatggtgctccgttcaaggcatttgctgccgtacgtgacacttgggctaaggaaactgcttacgtttatccgggtcctatccagtacttcggtcctacagaagtttgcgaccagccgactaagactctgcagtacgaacaggcaaaataatttgattcctgaattcccggaagggaactttctataggaaaattaatttagcgaagaatcaggccgaccgaaagagggccggattcttcgctatttgttgaaacaagctcaaccggttctgccggtacatctgttgaaattctctataaacttttagttaagatgacaaagaaatcacccattctcgcggtgaacgagcccgtgaaaaaaactacccgcaagcgtcctgcgacccgaaaagcgacaggcagtaagaagaccgcttccggaagaacgtcgggcaggacttccaaagggaagaagaccatccgtcggtggcagatgccttcgtggtgttattacctgctgctcggtttcattggagcctgttttgtcatctgtttttattatttctttattcgtccgtacgcctaccgctggaaaccctgctatggcatgaaagcatacggggtatgtctgccatacggatttgaagtgcacggtttcgatgtgtcccaccatcagggacagatagactggagtgaactgcagaaaacccagacagccccttttcctgtacgtttcgtatttatgaaagcttccgagggaggtgatttcagcgatacagcctttatccataatttcgatgaggcccgcaagcacggatttatccgcggagcctatcatttttacaatcccaagacagacgcttcccgtcaggccgatttctttatccgctccgtgaaactggaatcgggcgatttgcctccggtgctcgacatcgaggtgaggggagaagatgagaaaaagcttcgccgcgacttgaaagtctggttggataaaatcgaagattattatcgggtaaaaccgattctctatacctcttataaatttaagacccgttacctgaacgattccgttttcaactcatatccgtattggatagcccattattatgccgactcggtggaatacaaagggcagtggcgtttctggcagcataccgatgtgggacgtttgccgggcatccgtgaggatgtagatttgaatgtgttcaacggcacgctggatgagttgaagcgcatgacgataccctgattcgaaagaattcatatcatatacagacaaacaaaaaccctccgcaggtatccttttgaggaaatccctgcggagggtttgtttttatatagaagatagggaaaccccgctgacttagttgcggaacttcaatgcatctccttcgcgttctacgatgatcggtttttcgcggttcacttcttgtgacagaagcttctttgacaaatcgttcagcaagtagcgctggatggcacgttttaccggacgtgcaccgaattcaggatcgtaacctgcagtggccaggaagtcgacagctgcatctgtcatctgcaaagtcactccattgcctttcagcatcttccggataccgttgatttgcaagcggacaatctgttcgatttgcggcttgttcagcggctggaacatgatggtctcgtcaatacggttcaggaattccggacggatggtcttcttcagcatgttcatcacctctttcttggtctcttctacaatctggtcatggttctggtcgttaatcttctcgaactgactctgaatgtaggcactgcccaggttagaagtcatgataatgatggtgttcttgaagttcaccgtacgtcccttgttgtcggtcagacgtccgtcgtccaatacctgcaacaaaatgttgaacacatccggatgagccttttcgatttcatcgaacagcacgacagaatacggtttccggcgtacggcttcagtaagctgaccaccttcatcgtaacctacgtatcccggaggcgcaccaatcagacgtgacacggtatgcttttcctgatactcactcatgtcgatacgcgtcatcagcgattcatcatcgaacaggtattctgccagtgccttggccagttcggtcttacctacacccgtcgtacccaagaagatgaatgaaccaatcggacgtttcgggtcttgcagtccggcacggctacggcgtacggcatcagccacggcttcgatggcttcgtcctgtccgataacccgcttgtgcagctcatcttccaggtgaagcagcttctctctttcgctttgcagcatcttgcttaccggtatgcccgtccagcgagaaactacatcggcgatgtcttcagccgttacctcttccttgattaaagcgctgtcaccctgcttcttcttcagatcttcctggatagacttgatttcgttctccagtgcctgaagctttccgtagcggatttcagctacacgtccgtaatcaccttcacgctctgccttgtcggcttcaaacttcagttgttcgatttccttcttgttctgctgaatcttgttcaccagttctttctcactctgccatttagccttgtaagaagtctcctgttccttcagttctgcaatctccttgttcagttgagccagtttagcctcgtccttttcacgcttgatagcctcacgttcaatttcgagctgcttcagccgacgttcgatttcatccagttcttccggaagcgaatcacgctccatacgcagtttggcagccgcttcatccatcaggtcgatggccttatccggcaagaaacggtcggaaatgtaacggttgctcagttccactgccgcgatgatggcttcgtctttgatacgcacttgatggtggttctcgtagcgctccttcagtccacgcaagatggagatagagctggccgtatccggttcgtctaccatgactgtctgaaaacgacgttccaatgccttatccttttcgaaatacttctggtattcatcgagggtagtggcaccgatgctccgcagttcgccacgggccagggccggtttcagaatgttggcggcatccatggcaccttccccttttccggcacccaccagcgtgtggatttcatcgataaagaggatgatgtttccgtcggacttcgtcacttcgttgataaccgatttcagacgttcctcaaattcacctttgtatttggcacctgctaccagcgcacccatatccagtgagaacagctgcttgttcttcaagttttccggcacatctccacgcaggattcgttgtgccagtccctctacgatagccgtcttacccgtacccggttcaccaatcagaatcggattgttcttcgtacgtcggctcaaaatctgcaatacccgtcggatttcctcgtcacggccgataaccgggtcaagttttccgcttcgtgcagcttcaatcaggttgatggcatatttgtttaatgactgataggtatcttcgctcgactgtgaggtgactttctgtccctgacgcagttcctgaatggcagcccgcagttccttgtcggtaaggcctgcatctttcaggatggtggccaccgtacttttcacgttcagcagtgccagcaacaaggcttccagtgacacatattcatcacccagttccttagatacttccaaggctttctgcaacacctcgttggcgcttcggctcaggtaagcttccccacctgaaactttcggcagtgaggcaatttgtctgtcgagtacggtttctatctgctggccgtttatgccgagtttctggaaaatgaagttcgttacattttcgcccaccttcagcaaacctgccatcaaatgttccggctcgatggcctgctgtccacggctctgtaccagatttaccgcttcctgcactgcctcttgcgatttgattgtaaagttgttaaagttcataaatggtctcctttctcgttattagttgtggtttcttattattttcatttcgtttgtcgcagcccgtcctgtatgcttgcaggcctgcttgcgacgcttagtttaattcaaattctttgccacagcttgtaaagaataaaaacctgacgaattgtcattttgtgatgcttttacactgaaaatctgtcagttatgtgtcgctttttgtcagccagaaaaacgcaagtgcgttttggttcaaacgcaagtacatttgacatgaaactgtagtgtactaaataagttgacacaatttatttagtaacatgcgtaaaaatcgaaagtattcaaaggcagaatgtctgt

SEQ ID NO: 3815 - DNA, 1365 bp, Unknown
  gut microbiota DNA sequence
aaaaacagacggataatcccgtttttaggcatgataacctaaaatatcactcttttacgctttttcatgttttgtaaagttttgataatttgagatagttttatacatttgtaaacaatcacaaacgaaagcaggcttttctccttatatattataagagaaagcggttcctctgcttccggaataaaacaaagtggttcaagggaacagaaccttaatctaaaaaaagagaattatgaaaaagtttttaatgaccgctgtattgggaatgtttgcattagctggtttttctcaggtaaaatgggatgctaaggttggtatgaacttcagtaatgtaactaagtatgatgatgctaaggcattgccaggattccagctaggagtaggtatggattatggtttcagcgaaagctggtcattgcagtctggattattgatttcttctaagggatataaaattgaagacgttaaagtaagacctatttatttggatattcctattttggctgcttacaaattcaatattagtgataatacgaaatttgtcatcaatgcaggtccttatttggcatttggtttaggaggtaaggctaaagatgacaatttcgatttaaaattatttaaaagtgatgaaggagattggaagcgttttgatttaggtatccaatatggtatcggtcttgaattaagtgatcgttatttgattaatttgacaggacagaatggattcattagtccagtagatggtggagatgatcctaagaatatgacctttactatcggcgtaggttaccgcttctaatttgagaaataaatctcatattcatctataaaacgaaaggtcggcatgaaaaatcttcagtgccgaccttttttatgtgactaataaccagccattcagaaaagaattgaaaaaatattgtaaaataaactgcgaaaacgtttggctgtttcgtgtaaaaaatatacctttgcactcgcaaatgaaaatagtgatgcactcttagctcagttggtagagcaactgactcttaatcagtgggtccagggttcgaatccctgagggtgtacaaaatttcgggaagtttgacaattatagtggatgcactcttagctcagttggtagagcaactgactcttaatcagtgggtccagggttcgaatccctgagggtgtaccgaagccgtgaggcaaaatgaggaaaggctctgaaaatcgattggttttcagagcttttttatttccctactttgaaaatacacaataatacagaattttaatgggtcaacgtaaaaacctgagggatttattgtttaggcataaattttagtcagtctgtacaaaaagaatgccttgtctttaact

SEQ ID NO: 3816 - DNA, 1713 bp, Unknown
  gut microbiota DNA sequence
acatgggatttcttgtaaacgacaaacttgcagacgttatcattcctgatgttgatgtgagtgcgttgaataatgaagaatgaagagtgaagaattaagaatgaagaattaatatagtgaaggacgggaggggtgactcttccgttcttttttttgttatgacataagaacaaaaagacataatttcaataatggtgaagaatgaaaagtgaaaatgcaatacgctcgccgcttttactttttaacttttcacttttaactcaataccttcttctgttcttttgtctaaagaaacaacatgtttctgtgaggcgtatcgtttgaaaaacttatgcgattaagttggaaagatgaaagtttttatgtttctttgtgtaaacttcatctctgcaagctatggttagtacaacagacatcatcgacagactgaaaatattcaaagcacaatcggcttcgaaatataaaataaagttcatggggttgtttggctcctatgcgcgccagcagcaagatgaaaaaagtgatgtggatgtttttatctgtctgcaggaaccggactttttcgtgatggagcagattaaagaagaacttgaagtcttgctccattcttctattgatttagtgaactttagagagtcacttcgtccaacgttaaaaaagaatatccttaaagatgcgatctatatctaaagaaatattgattgatttattggagctgattctggaaaaagctactctcgtgataaacagaaatcagtcgattacgtgtgcacaggattttcttacatcgccggacagaatggaaaaatttgatgcagcatgtatgctgatacaggtagtaggtgaaacggctaagaagatagatgatcgtacatcgtctctgttgtttgcgcattatccgcaagtctattggcgaggcgtattcggatgtcgaaatattatttcgcatgaatatgggaatgtagaccccatccagatatttggtataatcaaaaagtaccttcctgaactggttgtttgtgtaaagcaaattttgtcagacgtggaagcaggtaagcatgacagcttattcttgtcatagaatgaagagtgaataatgaagaacgggaggggtgactcttccgttttttttgtgattgcttgccgcttttactttttaactattaacttttaactatatacctttttctgtctaaagaagctcgatatctgtataactcgtttgaaaaaatgtgttgtaatgaatgctattcgttcgaaaaaatgtgtcgaatgttggtttattcgctggaaaaagtgtaatttcgtcgttgggaaataagattacaccatgcttaaaaggaagatagaaacatatttagccgactggaaacggtctgaggacagaaagcctcttgtaataaaaggtatccgccaatgtggaaagacatacattgttcagaaattcgcaagggagaattatgaaagtgtggtctatatgaatttcattcttgagcctgacaataagtctgcctttaccggcaatatagatgtggataccatcattctcaacctctctgctttgattcagggcagtcgtttcattgaggggaaaacctgcatcatccttgacgagattcaagagtgtaaggaagcaaggactgccttgaagtcatttcatatagacgggcgtttcgatgtcattgccacaggttctcttttgggggtaaaagg

SEQ ID NO: 3817 - DNA, 21814 bp, Unknown
  gut microbiota DNA sequence
taagacagacattctgcttttgaatactttcgatttttacgcatgttactaaataaattgtgtcaacttatttagtacactacattgatgaaaaaacaagaaaatgcgatgcagtatttgtcaattctgttcatttgtttactaaaactggctagaaactcattttgtcgggatttctttttgacttttcggtgaaatggggtatttttgtaagataaatagacgttgacgcttaccttgcatacctatttttgtctgtttgggatgaatgggtgtgggacaggtaacagcgaagcgtgcctaaaatatagcactaaattaattacgatttatgataaatttaaagcaatttattgctgaccatgtaataaacagacagcaaagtatgttctctgaagatattagagccaacaaagaaactttgcaaaaagaaattgaaaataaaagtgtatgcgtcataggtggagcagggtccattggttcatcttttatcaaagcgatcctgccatttcggccatctaaattaattgttattgatttaaatgaaaatggtctggcggaattaacgcgcgatttgcgttctacatacggaatgtatgtaccggaagaatatcgcacttatacattaaacttcgctgatccaatatttgccagaatattccgcgaagaaaaaggattcgacattgttgcaaacttttctgcacataagcatgtaaggagtgaaaaggacaaatattcagttcaggctttgatagagaacaacgatatcaaggctaaaaagctgatggatttactgtgtgaattcccgccgcagcatttcttctgtgtaagtaccgacaaggctgctaaccctgtaaacattatgggagcgagcaaacgtgttatggaagatatgatcatggcatattccaagaaattccctgtaaccactgcacgttttgcaaacgtagcattttcaaatggttcattgcctgacggatgggtggcacgaataatgaaacagcaacctttggcctcaccaagtgacgtaaaacgatatttcgtttctcctgaagaaagcggacagatatgtatgcttgcatgtatccttggtaacagtggcgaagtgttcttccctaaattgagagaagaacagatgataacgttcagcagtttctgtgataaatttattgagacattaggctacaaacaacatcagtgctattcagatgaggaagcaaagaaatttgcttcagaaaggaaagaagatgacaaggaatatcctgtagtatatttcagaagcgatactaccggtgaaaaggattatgaagaattctatataccaggagagaaaataaacatggacagattctcatctctaggagtaatagaagaatccaagcaccgccccatgaatgaaatagaagaattttacaataaactggagacaatttttgccaatgagaattttaccaaagcggaaatagtagaggctcttaaagagttcctgcctaactttgagcatgaagaaaaaggtaagaatttggatcagaaaatgtaattgaattatgacagattattctaaaacaataaacttcataaaagaagtatatggtaataaagagtttactcctcttgcagttcctgtgttcgcaggtaatgaaaagaagtatcttgaagaatgtattgacactacatttgtctcatctgtaggtcagtttgttgacagatttgaaaaggatatggcaacttatactggatgtaagcgtgccgtagtttgtgtaagtggtacaaatgctcttcacatgtcacttatgcttgccggtgtagaacgtgatgatgacgttcttacacaagcacttacatttattgccacctgtaatgctctttcttatattggcgcgcacccagtatttattgatgtggataagactactatgggactatcgcctgacgctataaaggagtggctggttaaaaacgcagagattcgtaacggacagtgttataataaaaataccggaaggcgtgtgaaggcttgcgtccctatgcatactttcggacaccctgtacgcattgaagagattgctcaaatttgtgaagaatatcatatcgaattggtagaagatgctgctgaatctatcggttctctttataaagacaagcacacaggtactttcggaaaagtgggtgccatttccttcaacggaaacaagacaataacaaccggaggtggcggtatgatgctttttaacgacgaagagttaggagcatttgcaaaacatcttactacacaagcaaagattccacaccgatgggaattccgtcatgaccatattggttacaactaccgtatgcctaatattaatgcggcacttggctgtgcccagttggagaatttggataaattcgttgaaagcaagcgtcaagtcgcagccgaatatgccgagttttttaaaaacatagatgatattgacttctttacagaaccggaaaactgttactctaattattggctgaatgtagtaattttaaaagataaagaagcacagctggaattcttgcagcaaacgaatgacaacggagtgatgacgcgtcctatctgggagttgatgaacagattgtcaatgtttgagaattgcgagaatgatggtttaaaaaatactatctggtttgcagatagagtagttaatattcctagttcagtcagattgtaatagtatgaagaagaaggtttgtgtagtaacagccgccagatcagagtatggactcctgagatggattataatggagttgtttaaatatgactcctttgaaactattgtcatagcagctggaacacacttatcaaagaagtacggatatacattgacttttatacaggatgataatataaaagtatcaaaatgtatagattatttgtccgatggagattccctaaaagatgtctctttatcaatgagcaaatgtttgaatttgttttcagatgcttttattgagttaaaacctgatctgctagtagtattaggagatagatatgaactattgtctatatgtggtgctgcaatattacagaatatacctatagctcatattgcaggtggtgaagttacagagggagcaatagatgacaaaatacgtaatgctgttacgatgatgtctgatatacatttcccgaataatagtgaagcatatagcaatatcgttaggatgataggtacttccaaatatgtttttaatgttggtgaaccaggtatagagaattttgtaaaaatgaatttacttgataggaagacattgtctaagatattgggaatttgtgaagaaaaggattggcttttggtgacattacatcctgaaacaaaactctctattgaagataatatgactatggtttcaaacatgataaaagctttgaaatgtttctctttaagtgaaataattattacagaagcaaattcagactttggtggtggcatgataaacagatattatgatgaaacatgtagcaattgtaactttatacatgtatacagttctttgggacagctgaactttttgtcacttatgaaagaagcaaaatgtgtaataggaaattcttctagtggtattattgaaactccttatcttggagtacccactataaatataggtaatagacaaaaaggtagatttatgagtaataatataatatcagtaggatattcgtattatgaaatttataatgccatatgtagtgcgatgtctaaaggtaggtatgaagctgattttacttttggtgatggaatgacatctaaatatatagcacaacatattaaagattatttatatgataaaaaatatgattaaaactccatgtttcgttcttaatgtagacaaggctctatgtaatatcattggttttaaaacagctttgattaaccgattcaaaaataacatacttggttattctgttaaaaccaattcatttccaggttggcttgatattgtaaaagataacggaggatatgcagaagtagtttcttatgatgaatataatttagttttaaaatgtggatttgacaaatctcatataatatataatggaccaatgaaagacaaggcttcttttatagatgcattagagaacggtgctattgtaaatatagagacaaaaagagagttagattggcttttggaacttgatagaaataaatcttataagattggtatcagggtgaatctaaatatttctgttatatctcctgaagattgtaaagaagaagaatcatatagcagatttgggttttcttatgagaatggtgaattaaaatctgctattgatcatatagcaggattggatcatgttgttctaaaaggattgcatttacatagaacatctaaaacaagaagtattaatacttataaaaatatatgcttgtatgctttaaatataattaaagaatatgatttaaatttatcatatatagatatcggtggcggtttttatggagatatgccaggtaagcctacttatcaggactatattgatgcaatatataatgttttgtctttgcactataactgtgatgagttatgtttgattgttgaaccaggcaatgctctagtagcatcacctttctcatattacacatctgtgatagatattaagaatgtagaagataaaagaattatagtcacggatggtacgcgtaatgatgtagatcctttctttcataagaaggattattttaaagagtttattaatgatttatctgaaagagatcttgaaaaagaacaagtatttgttgggtgtacatgcttagagaatgacaagcttttcatagaaaaaggtgctcctcaaatgcaaataggagatattataaagttctgttttgtcggtgcatatactatgtgtttgtctccattatttataaggttctttccaagagtttatataaaaaaacatgagaatctaattctagcaagagaagaatggactgaaaacgaatatttgcaaaaaataaagaaataatatggaaaataatattttatgttgcaatgtaggtagaagaggtagattgatgaaagattttaggaaaagtctatctgggagtggtaatgttatagcaactgataattggtcggttgctccagcactatttttagcagataaacaatatgttgttcctaaaatttatgatggaaaatatattgaatcagttcttgaaatatgtgaaaaagagaatataaaagcaataacaacgtttattgatccagagatagagattctttctaaaaatagagatttatttatatcaaaaggaatactgcctctttgtccttctgctaatacagcatatctgtgttttaacaaatttgctatgtttgaatatctaaaactaaaaggtataagaactgtattaacttttaatgatatacataaattcaaaaaggcattacataacaaagagattgccttccctgtatttataaagcctataagtggaagtggaagtgttggagcacaaaaagttaatacgatagaagaattagaaatactatggtctgaaaataaatttgattatataattcaagaatatatggcaggaggtgattgtgatgctgatgtatatgtagactgcataagcaggaaacctgttgcagcttttctaaagaagaagatagagactcgtataggaggagcaagtaaaactatatcttttaaagataataaactttttgatttcataaaggaggtttgttctgtacttgaattatatggaccgtgtgacatggactttttttataaagatggtaattattatctttcagaaattaatcctaggttcggtggtgcttatttacatgcttttggagcaggagttgatttcgtgtctatgatagtaaataacattaaaggaattgagaatatatcgcaaataggtaattatgaagaaggtgtattgatgttgatgtatgatgatgtagtaatagtaaacgaaaaggatcttttaagagattatcatgactaaaaaaacttatataatagcagaagcaggtgtaaatcataatggtaaacttgatttggcattaaagctttgtgatgcggcaaaagaaagtgcggtagatgccataaagtttcagacatggaagactgaacttataatttctaaaaatactgagatggctgaatatcagaaaaaaaatcttcaaattgaagaaagtcagtatgacatgttaaagaaactagaattatcatataatgattttaaggtaataaaaaaatattgtgatgatataggaatccaatttttatctactgctgatgaaccagaatctcttgattttctatgtgatttgggtatgccatttataaaactaggttctggagacattaataatgtaccgttcttgagatatactgcaagtaaaggattaccaataatactgtctactggtatgtcaaatatgaaagacgtttcttttgcttatgacattcttaaagaagctggagtaagtgacatatcaatattacattgtacaacaaattatccatgtccaatgaatgaagtaaacttgaaagccatgttaaccataaaggaagctttaaagtgtaagattggatattctgatcatacattaggagtagaagtgcctgtcgctgcagttgcattgggggcagagataattgaaaaacattttacattagacaaaaaaatggaaggccctgaccattctgcttcacttgaacctgaggagctaaaagatatggttctgaagataagaaatattgagcaagctttgggtaatggagtaaaggagcctaatgaaagtgagaaaaatatttcaaaagtagtacttaaagttatattagccaaaacagatataaaaaaaggtgaaaaactaacagaaaaaaacctgattataaagcgtgctgaacaaggcttaagtgcggtatactgggatttaattgttggcaccgaggctaaacatgattacaagattgatgagcctataagaatttaaaaatgaatgctttatatataattccagccagaggcggcagtaaaggtattccgcacaaaaacattaaggaacttaatggtaagccattgatatgttactccatagatgtagccaggaagctgaccactgatgataatatatgtgtaacaactgatgatgatgacataataaaagtagtagaagactatggattaaaagttcctttcaaaagacctgaagaattggcatcagaccaagccggcacatatgaggtaattatgcatgcaataaaccattatgctgcaaaaggaacctattatgataccataatattattacaaccgacatctccttttcgcaaagccgatgatgtgaagaggtgtattgaagcttattctgataaatacgaaatgatagtttctgtaaaatcagcttcatctaacccatactatgattgctttgaattaaataaccaagggtatttataccaatctaagggtgacgggaattaccaaagaagacaagatgctcctaaggtatatgaatataatggtgccgtttatattatggatgtcgaagccctaagaaaatgcagctacaactcgtttaccaaaataggagcaatagaaatggatgagatgtcgtcattagaccttgatacgatgttagactggaaatttgctgagttgttaataaatgaaggatatggaagatagacatataatattaaatagttttactattctagacgctcttaacagaattaacaatatacatgaggggccattagtattatttgtcgtagattctgagaacaaagtaataggatctttgaccgacggagatatcagaagggctctaattaaaggtataagtgttactgaaactgttgaaaaagctgtacatcgcaatttcaactttcttagaaagaacgtaaatgacgatgtgaaaaacatacacatacaacgtgaacttaaaatgaaacttgtacccgtattagacgagaacaatcaaatatatgaaataataaaccttgaaaaatataagactctgttacccgttgatgccgttttgatggctggaggaaaaggagaaagattaaggcctttgacagagaaaactcccaagccactgataaaagtaggtgaaaagtgcattatagattataacatagatagtctgatttcatatggaatcaaaaatatttttgttactgtaaactatttaggggaacaattagaagaacatttcaaagaaaaaagagacggaattaaaattaatactgtaaaagaacctaaatatttaggtactatcggcagcattaagttcgtagtatcattctataatgatactatattggtaatgaactctgatttatttacaaatatagattatgaggatttctacttacattttaaagagcatgatgctgacatgagtgtagcagcagttccatatatagtaaaagtaccatacggagtgttcaaccttgaaggaagaaatatcaagggagtaacagaaaaacctacaatcagctattatgccaatgctggaatatatttaataaaaaaagaattattaaaattaattccagagaataagttctataatgcaactgattttatgtcaagccttataaataacaattataaagtaatcagatatcccatttctgggtattggattgatattggtcagcatgatgaactggaaagagctaaagagattgctaaacacataaagtagttatattaaatcataatgaaaacaatactattcttccatagatgtgaactcacatacttatatatatcaatagctaagaatttaccagatgacataaaacaaattcatgtggcatactcatcagtcgaggaaaatatattacatgagaataatataaatgattgtataaactattcttcactatttaatgaaataatagacaaacagacattggattataatcttataaaaaatcttgatgagattatcataaagaatagcaatggtagatttaatttaaatggttctatacaaagtgatagaggttactccattttaaaatataatgaagctttattgtcggcacaatcacattatctgatttggaataaaattctaacagataatcatgtagatatattcttacatgaaccttgttcattatgtatcaatcacatagctgcacttctatgtaagcattatggaggtcattatttatatcaaattgccaattacaatgatacaaatgaatacactttcgcttttgctgaaggagatgatttttcatataatgagtttgaatattattataaatattttcaatcgcataaggaatatattaatattgaacgatgcaaaaaactattagaaaaattcagaaaagatttctctgtatttttcggtggaaatatacaagaagataaaagcagattaatattatatataagggatatcaaaatacgcataaagctattaatatgtcatgacaggtatgacaaaataaagaataatattgattactggatttcaaaacaaaatatatctcaaaataaaatacgtaacataaaagaatataaaaatagaaatattcattttgaggtagagctgcctcaaaatgaaaaatattattactactcatttcatcttgagcctgaagctaccgtcttatatttaggagatggaatatatgagaatcaagtaaaactgattcaaaatattgcagcatctattcctccaggaacatttctttatgtaaaagatcatccacatgaatatgcatatcgtgatgctgtagactatgagagattattaaaagtacccaatataagattaatacaccaatctattccaggtaaagttctcattaaaaatgcaataggtgtttttactataaatggtacagctggttttgaaggtttactattagggaaacaagtttattgctttgcaaaaaaccaatattctttccatcatagagtttctttgattcaaaacgtaaaggacattagagaagaagtatataagagagttaatgattgttttaaatcagatgatgacctctatccttatatttttgcactaataaaatcttctcataaaggatatatcgatttcttttgtaatagagcagaaaaattaaatatagaccaagaaagcaatggagtcaaaatagcacaagatttagtatattatttgaatcatatagatacttactgtaactgtgaaaacatttaaaatcaacataaatcagtcattactttacattgttacaaacatttttgtaagtttagtaggttttgtcagatctttcgtatttatgcgatggctgaacatggaggatcttggtataattagcctttctttaacattaatgcaatttttaagttttctccaattaggtctatttaatggaggatttcgtctattatgttatgaaaattctgaagagaaaaataatgtaaacaatcttgtatatagttatattgtcgttataagtggaatagttttcattttatattttatttcatatcttacaggaattgatttagttttatcaaaaaatatattaatcgtatcacttataggtggattaataatgcttctaaacaactggctaatgaattccttaatagcattgggtaaattattgactatcaatatacttaacttaatatctgtatttatatctttattatttctaccatcggtgttttattgtgggataaatgcagctttgtttgtaacgattatacaacctataatatttgcagccattgtaataataaaagtcccagaattaagatttagtgctttcaactttaacataaatcttgtaaagaaaattctatcagtgggctttataccttttttatctggaatattcttcatgattaatctacaagtagaaagatggtccatagcaaagattcttggaacagaggcattggggaatttttatttagtatctttatttaatactttatcattactaattccaaactcaataaataatatctttttccctaaaataataaaatcatataacgataaagatattcctttattcaaaaaaataataaaaaacaatactatagctttttttacttataatgttctattagtgttaggaacctcaacactatttgaaaacattgtggtattaattttccccaatcatataaaaaatatatgttacgtttattactacttacctggtattgttatgaattctatgacatatgtctttacacaaattctcaatgcttctttaaagctaaatttaatattatgcattgatctattaacaacaatatcttttgtagtgactataggcataatataccattataatcattttagcctagaaagtatttgtatagtaagaagtatactttatagtatagtattttttgtgtattttttttacattatactaagatggaaatcgattataaaataaatatatagctttatatatgataagaagaattataaaatttatcaataatagaattaaggctcgtttatataaatttttaatgggctcttttgggagaaaatcaataataacaagtccattaaaaatagatggtaaaaagagaatttatataggcaacaaagtaattatagaatataaaacatggttagcagccatgccattaacgggttatgataattgtaaattagaaataaaagatggtgtaaatataggacatttcaatcacatatatgcaacaaaaagtataattattgaagaaaacgtacttactgctgacagggtatatatttctgataatttacattgttatgaagatattaatattccaataaagcaacaacccataatacaaaaaaaagaggttataattggagctggaagttggttgggtgaaaatgtatgtgttattggtgctaaaataggcaaacagtgcgttataggagcgaacagtgttgtaatacatgatattcctgactattgtgttgctgtaggttctcctgccaaaataattaaacgttatgattattctacacaaatttggaaaaaaacaaattataaaggtgaatttatagattaaaaatatgaaaagtattctcattacaggtggagctggttttattggttcaaaccttgcattgaaattaatggataaaggttataaggttacagttatggataacctttcaaaacaaatccatggtaaaaatcctgaaataacatctcctttatataaatctattaaagacaaggtgagatttataaaaggatctgtaacatcaaaagaagactggataaaagctttggaaggtgtagaatgcgtagttcatcttgctgcagaaacaggaactggacagtcaatgtatgaaatacagaaatatgtcaatgtaaacataggtggaacagcattgttacttgacattctgactaataccaaacatagcgtcaagaaggtgatagttgcggaatcaagagcaatatatggagaaggaagatattatagtgaagaaaaagaggcatatgtgtatccgactgaacgtgctgatgccgacatggcaaaaggagattttgaagtaaagtatccaggatgcaatatgccattaaaacttgttggaactacagaagattcaacgattcatccaacatctgtttacggaattacaaaacaagtacaaggacagctagttcatttggtttgcccttcaatcggtattgctgcagtatcatacagatatcagaatgtatatggacctggacaatcactttcaaacccatacacaggtatcttatctattttctcaacccgtattaaaaacggtaatgaaattaatatatttgaggatggaaaagaaacaagagatttcgtatatattgatgatgtagtagatgccactatacttggtatagagaaggaagaagcaaacggtcatgtattcaatgtaggaacaggggttgcaacagacgtattgactgtcgctaatacattgattgagaaatatggaataaaagttccgatatgcatttctggcaattaccgtttaggagatatacgacacaatttcgcagatatcactgctgccagaacgatacttggatttgaacccaaatggagctttaaagatggcataggcaaatttgcagaatgggtaaacgagcaggagatacaggaagatagatatgaatcttctattgaggaaatgaaacaaaaaggattatataaataaatatataagtaatgaagatacttgttactggtgctaacggatatattggaagacacgtagtatccgaactgttaaatatgggacataatgtaattgcttgtgatttacatttggataatgtagatgaaagagttgaaaagatagaagccaatttatttgaagcaacagaaaatatatatgagatcatgaataaccccgagatttgtattcatttagcatggagagacggattcgttcataactcattaaatcatattggtgatctatccgctcatttcaagttcctcacatcaatgattaacggaggattaaagcatttggtggtgatgggaacgatgcatgaagttggttatcatgaaggtgccatagatgaaaatacgccttgtaacccattatctatgtacggaattgccaaagacacactgagaagagccatgctccaatattgcaaagaaaaaagttgtattcttcagtggtgtagggcatattacatattaggcgatgacaaaaacaatcattcaatatttaccaaactactggaagcaaaggaagctggaaaaaataaatttccatttacaaccggtaaagcaaagtatgactttatttgtgttgatgaattggcacatcaaatagcatgtgtagctgtacaaaaagaaattaatggaataataaattgctgtagtggtaaaccaataagtatagcagaacgagttgaacaatttatatcagaacacaaacttaatattaaattagaatatggagtttacccagaaagagtgtacgattctccttgtttatatggtgacacaaaaaaaataaatactattttaaaaaaacataaattcatactagatgagtaaaactatcctattatttatgcctgcattatttgatttacataatcaagtacaacatgcattacataaattaaattttgaagttgattatattgaagactataaaggtcgattttcgccgttagatagaaaaagtaaatttaaaactatcaagaaactatattttaaatactttaaccccaacaaaaaaagattactcaataaaaacatatttaattctaaaaaaaagtacgattattttttatgcgtaaatggtttctctcttgacaaatcgctgattgagcatttaagaaaaataaatcctaagattcaaactatattgtatttatatgatagtataaacttttatgattttacaaaccacttttcattatttgataaagtatatacatttgactatgttgatgcaaaaaaatataatttaaatatactccctctattttggaacatcgtaaattccccccaaacatctaacaataaatatacttatgatttgttttttattggaaagcttcattctgatcgtttcaaaatattaaatcgtattgctgtagatgccaaacaaaaaggtttaaatacttatataaaaatatatattaaccctaaaaccttatcatattttatctatcgtttgaaatatagttatttttcaaaaatgattcataaacttattggaagaatgcttgtagataatataatcacatatacacctattcccaaaaatgagttagatagaattatggcagatagtttatgtgtcatagatgttgaaataccatgccaatctggattatcaaatagattgattcaagctctagcgatgaacaagaaacttctcacaaccaatattactataaaagagacccaattatataatagttcaatgattgcttttatagaaagaaataatcctatagttccaatagatttcttaagaataagcaatgagaaaataaataatatagaaaatttacgtatagacaattggcttaaaacacttcttaacatttaagcataaatagaaaatgtaaaatattatctaaagacaatttacacaaagaaataaaagcaaaacaaacatttaaaaaataatgtacaattagaatttttacaaaatcatacatatcgtcagcatcaacaaaaatattatccatacaaacatataattaatttcgagctatatgtatgtaaatcatttcttctaattaatattttacatattactataaataattaaaatatgccatattttttattatacacaataaatttattttttctttttctttcacaagtagcaaatattaaatatagaaaaacatgtattcaattcatttttttatttcttatcatattttctggctttagagatcatgttggtattgattacccaacatatgtagaattatttaatgacgcaataaaaaataatgaggtagaaataaaagaatacggattcatactaataatgaaatttatcggaataataggtggtacaaaacagctattatttttaacgtgcgctataataaccaatattttcttctataaatttataataagattagatgcaaaatattattttggggctattttggtatatattacagtagggccattttaccttaactcattaaacttaataaggcaatatgcggctatgggaatttttatttattcaaccatttttatacagcaacacaagtttttcaaatattctgtcatattattactgacagcgttctgttttcatctttccgttttattgcttataccattatatttcattttgtaccgaaaaataggatggcttactaaatttatactatttcttatttttactatcggaagtaaaatatttatatacttaatatcgttaactccatttggggtttatataaatatgatattctccccacctagtttgtttcttacaattttgtttggctctatatcattatattttatatataaagaagctacaaatgatttccaagaagattatagagtcttttttaatatgaattttttctcatttttattattaagtttattggctgtcaacaatggttttcttagcgaaattattcttaggatgaataattattttatgctttctatgattttcttaataccatactccgtgtataataataaaagacaaccttctaaaattagttatgcatactttttatttatttttctatcaatatatttttttaaaaatgccatcataagtggagaagaagtgaatcttctaccttacaatattgacctcaatttattttattaatttttatgaatagacttctatttattacagcatatcctatcaataataaaactgctggccaaaattattcattacaacttttgatagatttatctcatgactatagtgttgatataatatactggaattaccccaaccataataccacaataaaaaatattaaaaatttaaacgttataatggaacttaatacaaacagtgtgttaaagacattatactattcaataatcaaatgtagtttccccttatttacagttagatacaatagttttgtttataaatggttaaaacaaaatcagaataattacgatatgatatattttgattttagtcaaacatttatatattctaaacccatcattcatccatataaagtaatgatgtgtcatgacattatagctcaaaagtaccaaagaaaaaaattctcatttctgtataattggttggtaagaatgactgaaaaaaatttactaaaaaatgggaatagcatatttacgttttctgcaaaagacaagtttttaataaagagtatgtatggaatgaactctgaaatcgttccattttacataggaaaagaaatacttgatattaacctaaaagacattgaaatagagaattattttgtattttatggagcatggaatagaaaagaaaactcggacggattaaaatggtttattaaagaagtttatccttcatgtaaggatactaatattaaaataataggaggggcattggatacagaaattaaagttcttatttctaattatactaacatcgaatacttaggttttattaataatccgtataaaataatagctaaatcaaaggctattatagctcctcttttctcaggtgcaggagtaaaagtaaaagtaattgaagcattagcattaggtactccaataattggtacagatattgcattcgagggtattgacaatataatatctgataacagaaagtttctaataaaagcaaataataaaaaagattttatagagaaaataaaaaaacactgtgatattaactccgaagagaaatcaaaagcccaaaagatattcataaataactataatgaaggtaaattcatagaaaaaattaagtctattatttaatatgataacagcatcacttgttacttttcatacaaaaccatcagaccttttaagactcattaagtgtatcttaaattcaaacatatctattttttatataatagataattcttccaatgacagtcttcgtgaatattctcaaatatcagagaaaattaaatatatacatagccaaaacctaggctttgggcacggacataatatagcattagaaatggccttagctcaaggagcaaaatatcatgttattataaatcctgatatatactggaaggataacgttattgaagaacttacatcttttatggataaaaataatgactgcggccaagttatgccaaaaatcctttatccaaatggagaaacacagcttctatgcaaacttattccaaccccaataaacctgattggacgaagatttattcccataaaagcaattaaacaaaaaatcgacgcaaaatatgagcttcaccactcaggatataacacgattatggagattcctgtattatccgggtgtttcatgtttgttagaatggatataattaaaaaagttggcctttttgatgaaagatattttatgtattgcgaagatgttgatttgtgtagaagaataggagaaatctctcgaacaatgttttatccaaatgtctcagtatatcacgaatatgataaaggttcttacaaaaagaagaaacttttaaaatatcatatctgctctaccataaaatatttcaataaatggggatggattattgataaaaagagaactaaaacaaataaaagatgtctatcacaaataaagaatagaaataataattcaataaaagataatcatagcaaactataatacgatacaaattaccattatttactatcgttttatagaaaacaaatctttgctcataaaacggcgaaagaaaagacctgatttataataatcactcaatttactattaagagaaatacctaactctaacttatttggcataataaataaggtacattttatatggaaaaatcatctaaaaatttttctacaaaatatattaacatcaatacttacccaaataacaaataattaaaatgacaggaaacgaacaaaagaatgaatctcaagagattgacttaatagaattattccgagaattatactcaaacagaaaaaaaatatacaaagccataggagtaggtatcgtagcagggcttattggtggtttcagcgtacccaaaacttatcaagtaaaagtaaacttatcccctgaatctggaatcaactctacgagtggattatccggcattgcttccatgtttggtttagggaacatgactactggatttggcgaggatgccctaaccttcaatatgttcccagagattgtaaagaccaatcctttcgtattggaaatgcttcaaattcctatccaaacccaaaaagaggacagcattatactttacgattatctcgatacagaaaagaaaccttggtggaattatgtaataggagccccaggaatacttattggaggaataaaatctcttgttaaggaaacccctaaagatagcgcaaaaactattaaccctttccggctgactccggaacaaagcggaagaatcgaaatgctaaaaaaagtattggaagtggaaacagacaagaaaagcaatatgacgaaagtcacagtttccctacaggacccacttgcagccgccatagtagcagacagtgccgttcataagctacaagaatatattaccgattaccgcacgcgcaaagcaaaacaagattttgacttccaacttagtctgtgtgaacaataccaaaaagaatattttgcggcccagcaggaatatgccaaatttgcagatgccaatcggaatgtgattctccagaccgtaacctctgaaaaagaaagactgcaaaagaacttgagcctagcagaacaaatctacagtcagtccatggcccaactccaagtacttcgaggaaaactacaagaggccaaacctgtgtttgccgtagtggaaccggccaccgtaccacttgttccggcatctcccaagaaaatgctcatcatcattgcttttgcatttttagcttttgtgtttgaatctgcatggattcttttcgggaaagatatttatcatgatttcaagaatgaactgaaaaagaaagattaattccacaattctctatgaaactaaaagcaattttactctttgctatattatccggcagtttggcgcaggcacagactgagaactcttccctcacctaccatgtagaattaggagctactgccggagacggtacgtacgccccattgtggttcactggaaaccgttacggattaggaagcacaaatccaaattcgggatatctgctggcaggaatctcatacgaaaaacaatttaaacgcggatggcgtattgaagccggactagacatggcgggaggcattcatcaggcgcaagatgtgttcattcatcagatatacagtgatttttcttggaagatgctgacactgagcatcggaagtaaggaacgcccgggttttccgctgaccaagaacacagcactaagtagcggaatgatggtggaaggtcctaacacgcaaccgattccacagatcagaggagaaatcaaggagtttctaaacgtaccgggcacaaaaggatggctggcttttaaaggacacattgcatacggttcattcacagacaatggctggcaaaaggattttgtacaaccagggcagtatttcacaaaggatgtgctttaccatagcaaatcgctcatgctgcggttagggaacaaagaaaagcttccattggagtttgaatttggccttctgatggcgacacagtttggtggtgaccgctatctgaaactagaagatggaagtacagagaatgtgctggacatgccggacaatttgaaggcttactggaaagcttttttccctcaaacgggaggaagtgatactcctgaaggagaacaagtaaacgtggaaggcaacatgttaggaagctggaacttcgcactgaattactatttgggacaatggaagttccgggcttatctggagcattattttgaagatacatcgcagatgttttgggaatatggacgctggaaagacggacaaatcggactggaaattactttcccgaaaaaccggtggataacttcggccgtatgggaaggactttgcacaaaggaccaagcaggtcccctgttatttgatagcttttggggacagttccctgaataccaaatcagcgccgacgataattattacaatcattatatttatggaggctggcagcaccaaggtatgggcatgggcaatccattgcttccaggaccagcctataatgcagaccatagtatttcattccggagtaatcgcgtaagagcacatcacctgggcatcagcggacagccttcttcggagtggggataccgcatgctgatttcattcgcccgccactggggtacatacgacattcctcttgaccaacagcggaaacaattcagttcgctctatgaagcaacttatacaccgaaatgggcaaaaggatggagtgcttcggctgcactgggacttgaccgaggtaattacttgggtaattctacaggaggcatgctaaccatcagaaaaacaggagtgattttttaattgaagaaaagaagtatgaaacgaattttctatatagggctttgcatgatggtactggccatgatatgcaacgattgcaaaaaggaaccgataaacactgagattgaaggacactggcaattattggaatttactacgaaagcggacaatgaggtacatccgtgtaaacgtatctattacagtatacagctttgggtagtggaagtagcagaaaagcaagggccacagggattgactcctttccgcggaagataccagtacgatgaagcaagtaatagcatcaccatgaacgacatgagcacgtatgaccttccagaaaactcccgtccggctgaggtatgggaactggagccctacggactaaacaatgtgaatacgacgttcaaggtagtggaaacaaacgggaaatacatgaccttagagtctgattatgccatattaaagtttaagaaattctaaagcaaaaggcatataatcagaagaaaagccccggctgtcattggcagtacggggctttttctatatctttgcgcagtaaaattttgattatttatggaaagaaaagtagcactaatcacaggtattacaggacaggacggatcattcctggctgaatttttattggaaaaaggttatgacgtacatattccgaagcatacccgttcactttccggc

SEQ ID NO: 3818 - DNA, 286 bp, Unknown
  gut microbiota DNA sequence
tgcaggtgtaaagctggagacagcaaagccgagcattactaattgcccgtcagctttccttatccgcgcggagcggatggaaaagtcatcgaaaggatggtatatacgtttagcagaaacaagtgctgagattgcttgcttgtgagtcatgaatatataaaggtattcaggtgactattgcacgaaggttccacctcttcccattccgaacagaagaagttaagcttcgtcacgccgattggtactgcgcaagtgggagagtaggtagtcgccgttttaacagaag

SEQ ID NO: 3819 - DNA, 25864 bp, Unknown
  gut microbiota DNA sequence
aactttgtcaggaattaatcttcaaactgacaactattttcagtacacttcaaacgcaagtgcgttttaccttaaacgtacttgcgttttcttttaaacgcaaaggcgtttttttgagagaaaagaggaaatttgtaacttattagaaatcagcttcttttacgatgtgtagtttttctccagtcaccggatgtacgaactccagcgcggcggcgtgcagatacagacggtcagacggctggccgtataggtcgtcgcctaccatcggatggttcagtccctccggatgggcggcatgtacacggagctgatgggtacgtcccgtatgcggatagaatgtaactcgtgttcttccgtctttgcgttccagtaccctgtaggaagtgatagcccgtttaccatactcccggctcaccatctggcgcggacgatccatcgggttcggacagatgggcaggtcgatgatgccctcgtcagtttctagttctccttccaacagggctgtgtaacgcttttggataagacgcgtttcgaaaagtgcctgaagttccttgtgcacttccttcgttttggccgcaagcagcaggccggaagtagccatgtccaagcggtgcacgataagtggaccggtggccttgggataaagattgtgcaatcgctgtagaatagagtcgaggtcgttcttgcccggtacggagagcatgcctgccggtttgtgtaccaccaccagccattcgtcctcgtagagaatctccagtgccgtctggcggtgtacatcctcctccagcgggttcggttccacgtccagtcccacgagcatgtgtttcagaatcggttcacatttccctttgcacgacggatagaaatgtccttcgcggcgaatctcgtccttgggtgacatgccccaccaaaactcgcccatagccaatggctggagctgatgcaggtaagcatactgaagtaatttagggagtgcgcattcgcctgcaccggccggcggtgtcttttgcggagtagagcggaaaatctcgcataaatctttcacttccccccgtgcgttgagcatgcggaactgggcgaacagacgcaactggagagccgccgaacgagttttccgttcgtggcgcaaggtctgaatctcttgctcgaatgcctgaaaagcctctccggccgcctgtactttctctttcaatctccgttccaaccgtttgaactctgctttctgaaactggctttcgcgtgacattgcttccgctttttcgggtgaaacgccttccttccgacgttgttcacggagggttttcgcctctttcagcttctgtttttcagaagccagtatggcttgtgcctcttcttccaccttcttccattcttcccgtgccgagcagtatgcctcgctggcttccatggtggcaatccggtggttgatgccggaaatctccgcttcctcgatacggaaaaatccgtcgggttgcaggaggtcatacaccggaggtacgaaaaacgcgtggtggttgcttccagccagattgcccgaaaaagcggccaggtagcccagttttccttcggaattctttattaccagtaccccgaacatctttccctgacgaagttcctcctgccaatcgtcccgtgtgagcaggtactgacgtacctcatcggccgccagtcgggtgagcgggtgaggggtgtagtggaaaggaaaagtgaaggctttcggcaaggcgatgccatcagtcggggtgtggaaggaatgtatcatggtgaaatattgagttcgtttttattgtggggcaaaggtacgaataaaatggcttctatagaaatgaaggtatatatatcctatatgatgtatcttatgactgtttttgtacaatggatagaagaaaaatgtatttttgtaaatgttacaatgtacatgaactttcacagagttattaatctgagtcacaaattccatattttctgtgatgaaacgacctgaaatcctatgaaaacaaaaaagaaaaacattctccgcttgctcgtcgctctggtagtggtaataggcgtggtgtatgcttcgttgccctactacgcccgtcaggcgctcattcactggatgcccgtcatcgacgacctggaaacctttcaccggcacacggtacaccataatcccgatgacgtgtggcactggcccctttctactgattataaccgttaccaactggcagaaaaagatgcgcactatctggacagcctgcgcaccgtgtccttcctcgttatccgtcgtgacagcatcgtcttcgaaagttaccgtgacaggtggaatgatacactgacctcaaatatctattctgctacaaagaccatcgtgggactactggcgggagttgccctcgacgaaggaaagattcatagtctggacgatcccgtatcgcgctacatacctgtctatacaaaaggaatgcaggctgacgtcaccctgcgccatttgctgaccatgagtggaggcatggcgtgggatgaggcgtacgcttcgctcttttctgtcacaacgcacggttattatggtaacgatctttacgacttggtgacgggcctggaggtagttgaccgtcccggcgtgcaatattcctaccgtagtggtgagactcaattgttagcttttgtcatcgaggcagccaccgggcaaacactaagcgactatgccgaagagaagctctggcgtccgatgcaggccgaacgggatgcctattggttgctggacaaaaaagacggtgacgaaaaagccttctgttgcttccataccacggcccgcgatgtagcccgtttcgggagtcttttgttacatcgtggcaattggcacggccgtcaactggtttccgaagcctatatggacgaactgatgcgtcccgcttcgtacctgaaagaccagtggggcaaggattcactcagttattatggtttccagacgtgggtgatggattatcacggtatgcgttgctcttacatgcgtggtatgctgggtcaatacattatcgctattcccgatttggatgccattgtcgtgcgcctgggccgtaagcgttgcgatgtatataaccgtgagattacgactgacatcacacggtatatggatatagctatgaagatactgaagggaaaatgatgcgtgctgtcggttattggtaaccggtgcgtatggcactatgtgcgaatgtttttctatagggttgttattgaaccattctttgttttgcagggctattctagagattttatgtaagtttgcagaaacagtaaatttcatttcagatgaggagcatgatttatccggtaggcatacagagttttgaagagatacggaaaggagactattgttatgtcgataagaccgcacagatttatcagttggtaaaaacgggtaaatactactttctgagtcgtccgcgacgctttgggaaaagtctgcttatatctacgttggaagcttacttccaagggaaaaaagaacttttccatggcttggctatggaaactttggaaaaggaatggactacatatcctgcattgcatctggatttgaatgcacaaaaatacgacactccggaagcgttgattcatgtgctggaggaaaatctacaatactgggaaagtctttatggggcttcggagagtgaaataggagtagcccgccgtttcaacgggatgattcgccgtgcggccgaaaaaacgggaaagaatgtggtggtactggtggatgagtacgataagcccatgctccaggctattggcaatgaagcgttgttgaccgagtaccgtaatacgttgaaagctttttatggagctttgaagtcgatggatgcatatctccgttttgctttgttgactggtgtgacaaagttcagtaaaataagtgtgttcagcgatttgaataatctggaagacatttccttgcagcaggcttacaataatttgtgcggtattactgagcaagaattactggaaaactttgaagaaggaatccgtgtgttggggcaacataatgagatggcgtatgaagagacttgtaaaagcctgcgacaatggtatgacggttatcatttttccggtcatacaggcggcctttacaatccgttcagtctgctcaatgccttgaaaagtagggaatttggaagttattggtttgagacgggcacaccgactttcttagtggaactacttttacgtagtcactatgatttgcatcgtctgacggaagaacttgctaccgctgactctttaagcggtattgatacgatggagacgaatcctgtgcctattctatatcagagtggctatctcaccataaagggatacgacaagcgttttcgtacatataccttgggcttccctaatcgggaagtggaggaaggatttgtcaagtttctcttgcctttttatttggctacatcaaaagctgattcggcatttgaaattgtcagttaagaaaaagaaccggactccaatcagtccagttctctctgacggcagaagcatccgccgaatttctcgtccacgtgttctaccggctggcggaagatgccgtaaaccgatgagccggatccgctcatgctggcatacaccgcgcccagatcatacaactcgtccttgatggccgcaatctccggatatttcaggaacacgctgtcttcaaaatcattcttcatgttgtctttccacgtttctaccggttggcagatgatgtctttcaatggaacttccggatggcggggagtgatgtgtgcgaaagcatcgcgtgtggatacgaagatatctggtttcaccagcaccaggtaataacccgaaagcgaaagacggacaggttcgaatatgttaccgatgcccgtggcaaataccggctggttgcggatgaagaaagcacaatcggctcctaagcgggcggcgtagtcttccatcttctccagacttagtgccagacggaatttctcgttcagcaacttaatcatgaatgcgcaatcggatgaaccgcctcccagtccggcacccgtggggatgtgcttgaacaggtggatgtcaacgggtggtatgtcatgatcctttttcagcaattcgtaggctctgaccactaagttgtcttccggctttccttcgatagccgtgcctttcacgtgaagcgtataaggagcatcgttttgttctcttcgtgtcacttccagtgcatcttgcaggtggatggggtagaaaatggtttccaggttgtggtaaccgtcgggacgtttttcaataatattcaggccaaggtttattttggcattgggaaatgtaatcataaggtcgtttgttttttcgttgctcaaatatagcagaaagtttcgagaaaatcgggattcacggaaaaaatcgtatctttgccccacttaaacaaaaacaaaatggcagaaccgagaagaaatacacgtgtggcaaagacggctaagaccaagccgatggatgagtacggccacctccagcctcaggctcccgaactggaagaagctgtgctgggtgcgctgatgattgagaaggatgcgtattcgctggtgagcgagattcttcgtccggagtcgttctacgaacaccggcaccagctgatttatgcggccattactgacttggctattcaacagaaaccgattgatattttgaccgtggccgagcagttgcgctcgcgcggtaacctggaagaggcgggcggaccgttctatatcactcagctgagtggtaaggtagcctcgtcggctcatattgagtaccatgcccgcatcattgcccagaagtttctggcacgtgagctgatttcttttacgagtaacatacagactaaggcgttcgatgagacgcaggacgtggacgacctgatgcaggaggccgaaggaaaactcttcgaaatctctcagcagaacatgaagaaggactacacgcagattaatccggtcatccaggaagcctatgaaatgcttcagaaggcggcggcacgtaccgacggtttgagtgggctttcgagcggattccatcagctggacaagatgacctccggctggcaaaactccgacctgattatcattgcggctcgtccggccatgggtaagacggccttcgtgctttccatggccaaaaacatggcggtgaacagcaaagtgcccgtagccttgttctcgcttgaaatgagcaacgtgcagctggtaaaccgtctgattgtgaacgtctgcgaaattccgggcgagaaaatcaagagcggtcagctggcaccttacgagtggggacagctcgactacaagataaaagaactctacgacgcaccgctttacgtggacgacacgccttctttgtccgtgttcgaattgcgaactaaggcacgtcgtctggtacgtgagcatggggtgaaaatcatcatcatcgactacctccagctgatgaatgccagtggtatgtcgttcggaagccgtcaggaagaggtcagcaccatttcgcgttcgttgaagggattggccaaggaactgaacatcccgattattgcgctgagccagttgaaccgtggagtagagaaccgtgaaggtatcgacggaaaacgtccgcaattgagcgaccttcgtgaatcgggagccatcgagcaggatgccgatatggtgtgcttcatccaccgtccggaatactataagatttacaccgatgagaaaggtaacgacctgcacggcatggccgaaatcattatcgccaagcaccgtaacggtgccgtaggtgatgtgctgcttcgtttccgtggcgaatatgcccgtttccagaaccccgacgacgacatgattgtgccgatgccgggcgaagaaaagaaggctccggtgctccgttcgaagatgaataacggcggcggacaggacttcgtaccgcctccacccacggagatgccgcctatgcccgacaatccgtttggcgcgcctgtgcccgatgtaccattctgacggtttttggctaaaaatattttttgtcttacctcttatatcccaaatatgtattaactttgcacatcattgtttgggaaattataaaatactattacgatatgaatatttcttataactggctgaaagaatacgtcgacttcgaccttactccggacgaagtggcagccgcactgacttccatcggtttggagactgggggagtggaagaagttcaaactatcaagggaggattggaaggtttggtagtaggcgaagtgctgacctgcgagccgcatcccaattctgaccacatgcatattacgaccgtcaatttaggacagggagaacctgtgcagattgtctgtggtgctgccaacgtggctgccggacagaaggttatcgtagctacgctgggtacaaaattgtatgatggtgacgaatgcttcaccatcaagaagtcgaagctccgtggcgtagaatcaaacggtatgatttgtgccgaagatgaaatcggcgtgggcacaagccatgaaggtatcatcgtgttgcctgccgacgtagttccgggtacactggccaaggattactataatgtgaagagcgaatacgtactcgaagtggacatcactccgaaccgtgccgatgcctgctcacactatggtgtggcacgcgacctctacgcatggctcattcagaacggtcataaagctacgctgaagcgtccttcggtagatgcattcaaggtagacaatcatgacatgaatatcgacattgtggtggaaaatactgaagcctgcccgcgttatgccggagtagccatcaagggagtaacggtgaaggaaagccctgaatggttgcagaacaagctccgccttattggtgtgcgtcctattaataacatcgttgatattaccaactacatcctgcacgcctatggccagccgatgcactgcttcgatgccgacaagataaagggcggcaagattgtggtgaagacttgtgccgaaggaactccgtttgttacattggacgaagtggaacgtaaattgtccgacaaggacctgatgatttgcaacgcggaagaaccgatgtgtattgccggtgtgttcggaggtctggattcaggtactaccgaaactactaccgacgtgttcctggaaagtgcttacttccatcctacatgggtgcgtaagactgcccgccgtcacggattgagcaccgattcttctttccgtttcgaacgtggtatcgacccgaacatcactatctatgccttgaaggaggccgctctgctggtgaaagaactggccggaggtgaaattgcttctgacatcaaagataactatccgaatccgattgccgatttcgcggtagaactttcatataattatgtaaactcactgattggaaaggaaattccggcagaaacggtgaagagcatcgtaaccagcctggaaatgaaaattgtggaagaaacggccgaaggtctttctttgcagattcctccttatcgtgtagacgtgcagcgtccgtgcgacgtggttgaagatattcttcgtatctacggatataacaacgtggaaattcctactaccctgaaatcaagcctgagcgtgaagggagaagtggacaaatcggtgaaactccagaacctggtaggtgaacagctggtgggttgcggatttaatgaaatcctgaacaactctttgacagcagccgcttattacgacggactggaaacttacaagccggaaaatctggttcgcctgatgaacccgttgagtaacgatctgaacgtgatgcgtgctaccttacttttcggtggtctggaaagcatccagcacaatgccaaccgtaagaatgccgacttgaagttcttcgaattcggtaactgctatcacttccatgctgagaaaaagaatccggaaaaagtgttgtcaggctattcagaagagttgcacatggggttgtggattaccggaaagcgtgtaagcaactcatgggctcatgccgacgaaaacgcttcggtttacgaactgaaggcttacgtgctgaacatattccgtcgtctgggcgtgaacttcggctcgctggtattcggtaacctttcagacgatatctactcagtagctatctccgtacacacccgtggtggtaaattgctggctacctttggtgtagtttgcaagaagattcagaaagcgttcgatatcgacaatgaagtgtactatgccgacctgaactggaaagaactgatgaaggccatcaagggcaatacggtaagctacaaggaaatctccaagttcccggctgtaaaacgtgacctggcattgctgattgacaagaagatacaatttgccgaaatcgaaaagattgcttacgaaaccgacaagaagttactcaagtctgtagaattgttcgacgtgtacgaaggaaagaacttggaagctggcaagaagagctatgctgtaagcttcatgcttcaggatgaaaacgctacactgaacgacaaacagattgataagtttatgcagaagctgattggcaacttgcagaataagcttggagctgtgcttcgataataagtaaattcattaaaaaataaatttaaaatatcatccaatgggaagagcatttgaatatagaaaagctacgaagctgaaaagatggggtcacatggcaaagacctttacacgtctgggtaaacaaattgcaattgcggtaaaggccggcggtcctgaaccggaaaacaacccgactctgcgttcggtaatcgctacttgtaagcgtgaaaacatgccgaaagataacattgaacgtgctatcaagaacgcaatgggtaaagaccagagcgattacaaaggtatgacttacgaaggatacggtcctcacggaatcgccgtattcgtagatacattgactgataataccactcgtaccgtagccgatgtacgttctgtgttcaacaagttcggaggtaacttgggtactacaggttcactggccttcttgttcgatcacaagtgtgtgttcactttcaagaagaaagaaggtatcgatatggaagaactgattctggacttgattgactacaacgtagaagacgaattcgatgaagatccggaagaaggaactatcactatctacggtgatccgaagagctatgcggctatccagaaacatctggaagaatgcggcttcgaagatgtcggtggtgatttcacttacatcccgaacgacttgaaagatgtgactccggagcagcgtgaaactatcgacaagatggtagaacgtctggaagagttcgacgatgtacagactgtatatactaacatgaaaccggaagaagacgctgaataagctttttcttgaaagataatgacggaacggagtatccggccggaataatccggcaagtggtgctccgttctctttttatgttaactcgactagcatattgatgacaatgaaatatacttatcgtacgatgggaacatgcagttctcagattgattttgaggtagaggatggcatactgaagggcgtgcattttaccggtggttgcaatggaaacttgaaagggatttcagccttggtggaaggtatgaaaatagatgaagtgattgctcgtctggaaggtatccgttgtggcgggaagccgacttcttgtcccgaccagctctgtaaggctttgcgggaaatctaagtgactaaatgagggatattgaagcaaagagcacttctgagagatgaatgttatgtctcgggagtgctctttttatgtgaatgtttgatattaaagctactcagaaagagtggaaagcaggaataccaatagcgcagccgcaatggctagtgaaatgaaggtaaagacagccaggaaaacgattgtcttgacaaatgtacgtatccatccccggcggtataccgtgtgcagggaaatgtaggtgtacacgaacatacctgttacgaagataaggagagtatacatcggcatgtttcctttaaacgattccataaaagtgtcacttgtcagcacgggtaccagcggaataggaatcagtatcagaaacacggtgttcaggtgaatggcatgtacgaaatgccacatgtaaggaaacttggatttccggaacattccttgcagaagccaggcaaacagaggcagaaggaacatcatgtagagcggagtccatttggacaaatctcccaaaagatggttgagaaaggattcctgacgaagttgttgtgcttcatcgctgtggtcttctttccattcgtatacgggagttagggcggtaccggtcgagtctacctgaaagtggcgtgcagcttgcagggattcagaggtaatctcctcttccgcgatcaggttatccaggtactcaccttttacttttttgagattcagaatggtagtcaggtctttttgccggagagtggtttcatgcaggcaggagtcggccacgatccggggcatttgcacgtaggaaagagagaatcggtcgtccagttgttgtaccttgaacaattcctcggccttttctactcctctttcctgaaaagctttcactaactcggggccttggtatacatacatgcatgtatcgggcagggtagcagacgatttgagttgtgctacgatttcgtcgttgatattgagggagcttaccgcctgcaatgcctgattggccttgtcggaagctatcataaagaaaagggtaaagaaaacaacagagatacacatataaagccggaaaggatgtacgtaggaattgatttttccggcattgaattcgttggtcaggaatccgggacgggtaaacatcagccacaaggtttgccagattttgctatcaaactgatagacattttcaatgtattgtctgaggtatttccagaaaggctggtagatatcgagggcatattgtccgcaacaatgacaatacattccctccagcttggtaccgcaattcttacaataggtgtacccgggtacagtttttttacgtattctccggaggcgtttcaactcgatgaggcgcattacccggcgctttcgttctttcagtctttgccgcatctgggcgaaaagagtcttgtgggtttcttctttgtgtgtggtattttccatgtcagtagaaatgtaatataaatgatattttgacacaaaagtacgtttgcaaaatgaatttagcaagtttttctgaggggaattgaaaatgcttggtattcggatttaaggaaataaaaaagtgatattgtttctcttgaagcatgtatcacagaaacaatatcactcggtgaatgaacaaacaagaggtatttcacccgcaagtttatccaatcttgcttatcttctttaatttttcttcgtcaatgagcttgatttttcgtccgtcaataataatcagtttttcggcggcgaaattagacaaggttcggatggcattggatgtggtcatgttggagaggttggccaggtcttctctggagagatagatgctcagagtacactggtcttcttccacaccgtaggtatctttcaggaaaagcaatgattctgccaaacgtcctcgaatgtgtttctgggtcaggttgactgttctttcgtcggagatacccaagtctttcgacaactgtttgatgaaaaacatggcaagttccgtattttccataatcagctgcacgatgacgggcatgggaatcaggcacatggtacatggctcaaaggcagcagcagcggtcacgaaattttcttcggcaaaataggcacgataggcaaagtattctttgtcctttattactcggataatctggctgcgtccccctacgccgtccttgtaaatctttacctttccgttcagcaggcacatcaaattctccggcgtttcaccttcgcaataaatcgtttcgttctttttgtatttctgaatcgtaaagttctgtgccagcaattcgcgttgttgctgtgttaatggttgccataaatctggtatactttcggcaatctcagcttctgttaattccttttttaccataaaatgttccaaaaccatgttattaagcacaaaggtacgaagaaaaattgaaaatattcttttttttcatcataaaaatggcctcagataagggctttattatatatttgctgtgaatatgcgaaaactgaaaggcttatatgaggctttgtggggcttgctggcattgtgcttgctgtgctgtttcccactgcgaggggtggcgcgcgacaatgctccgtaccttccgaaaaagcctgtcgtggccgattctattttggattacatgtttcattctgcatctatttatttgcgtgaggtgaaaggatacaagggcgatttgtatttgaaaggtcatctgaaagtacataagcagaaccggattatcaagtatgtgccttccatgtttcgtctggaaaagggtataaatgattattttcatgagtctatcagtgagctgcaatatacggctcctgccatttacgaccggaaggtcagggcaatatctacgactttccccagcaccagagggcagatattcgacattatggactacatgaagttcaatatttatgctccttcgctgatgggcaacaggatactttcaccgctgaacagaaaggctcaggtacattatcattatttgcttgaaagggtggagcaccggttgggaggagaattgtattgcattcgtgtcgtaccccgttaccggagcacgcagttggtggaaggttttctgtggctttcatcagccgactggactatccgaagaatgaatctcaagggacgttatgacctggtaaggttccaactgagcatgcagatgggcgaggaggaagatacgaaatatcttcctgttttactgaatcttgatttgaacttcaagttcctgaagaatcatctggagatgaagtatacggggtggatgaagtattcatcggttgtttatcgtaagccgggggaggaatggattgtcaagaaaacgaacgaccataatctttcgaattcttatactttgtcgtgtgataccagtcggctcgtggtggaacgtgactcgttcaaccgcatccgtccgattcctttgtctgcttatgaggattcgctttaccgttcggcggatgagcggcgattgaaacgggaggccgatacgataaaggcagagcctacaaaactgaagaagaacatggtgttcttggggcagctgggggatgccttgattagcagctatgacattgacatctctaaagtgggaagcatcaactgctctccgattatcaatcccttattagtgagttatagccaccggaacggaatatcctatcggcaggtatttaagtacaacaagcttttccatgatgggcgtttgctacgtattgttcctcagattggttataactttacaaagaaagagttttatgccaaggcggatatggaatatatctacaatcctcggaaattgggctccattgaagtacatggaggaaatggtaaccgaatttacagtagtgtggtactcgaccagctggagcagattccggacagtgcgtttaccttcgatggacttgaattggattattttaaagatgtatacgtagatatatcgcataacattgagttgtgcaacggactaaagttaggcacaggtttggctatgcattggcgttatactaagagtacgccggaagtggaagcacgtgtacgttctaattataacagtttcgctccccgtattcgtctggaatggacaccgggcatgtattattatatgaacggcaaccgaaagataaatgtcggctctttctttcctacctttatgctggattacgaacggggtatcaaagttttaaagaattccggtacctatgaacgaatcgaaggttctgtggaacaaatcattcgtttgaagaatgtgcgttcactggcttatcatgtgggagccggtatgtttaccaatcaatcggatatgtactttgtggattatgcgcattttgccaacttgaatcttccccagggttggaatgacgatattggaggtacgttccagatgctggacggacgctggtacaatgcttccagtcattacatacgaggtaatctgacctttgaggcacctttcatcctcttatatccggtcacccgtttgttgtcgttcgtacagaaggaacgtatttatgccggcgttcttttcatgccccacctgaatccttatctggaattcggttacggctttgctacccacttgtttgatgtgggtgtctttatcggaaatgaaaaaggtaaatttacctccttgggatgtaaatttaccttcgaattattcaacaaataaaaatagttgcattatactaactcgtccgaagtatatccttgcggaagtggacgacagttatatccagaagccatgatttcaccgtaggctccggcagaacgaagtgcaatcaggtcgccacggtgtaccttgttcaggtcgatggcttttccgaatacatccgatgattcacagataggacctactacatcgtatgcttctgcaggttcttccgaagtgaggttctcaatcttgtgataagcctgatacaaagccggacgaatcaggtcggtcattcctccgtctacgatggcaaactgcttgttggtaccttgtttcacgtaaataactttagtgatgaggttaccgcactgacctaccactgagcgtcccaattcaaagtgaagcgtttgctgcggacgcaggcgcaggtgcttgtgataagtagcgaaatactctgcgaagtcaggaatcggctggcggttggggtgtgcatagtcaatacctaagccacctcccacgttgatatgttccacgataatctgacgggcaaaaagtttctcctgtaattcgtttacacggttacagagtgccacgaagtcgcccatatccagaatctgtgagccgatgtggaagtgtaatcctacgaacttcacgtttttcatctccagtgccaggtcaatcacacgatccatgtcttgtatactgataccgaatttattttctgccagtccggtagtgatattggcatgcgtatgagcacctacatccggattgatacggaaagccacgcgggcaatcttgttctttgctgcagccagttcgttgatgacttccagttctggaatagactcaacgttaaaacaaaaaatgtcataatccagtcccagattgatttccttgtctgtttttcctactccagcatatacaatcttgctagcagggaatccggccttgatggcagctttgatttcgccgccgcttacgcagtcagctcccagtccgctttcacgaatgatgcctaatattttagggttggcattagctttcaccgcatagtgcacacagaatttattgtattttcctgcttcctccttgattttatttaaggtttcacgaagcagatttgtgtcataataataaaatggcgtttccagttttcggaactgctctattggaaaattagctttcataaaatgggtttagttgtgattgttgttatattagaagaataaaaaaggcggtgatgcggtttttactgaccgtatcctccgcctttagcttttataaaaggttgcttttatttctctttaccgttgaaaagcacgttgctcaatgactgcaacgcctgcttcttatctgattcacgaatcaggaaagagatgttgtagttacttccaccgaatgaaatcatacgtaccggaatttcacgcattgcatccagtgcctttgcttcgaaacctacgttttcccattccaggtcgcccactacacagacgatacacatgtcatggtctaccgttactgtaccgtacttcttcaggtcgtttacgatttcgttcaggtgttttgtgttgtcaatcgacatagatacacccacttctgaagtacataccatatcaatcggagtctggtagctttcaaagatttcaaataccttgcggaggaaaccgtgagccagcagcatacggcttgacttaatcttgatagcggtgatgttgtctttggcagctaccgccttgattttgcctttttccgtatcgttagaaatcagtgtgcccggagcagtcggttccatggtgttcagcaaacgtaccggaatgttggcatatttagccggctggatacaagtcgggtgcagaatctttgcaccgaagtaggccagttcagctgcttcttcaaagtgaagctgacgtaccggagaagtcttgtctactacgcgcgggtcattgtcgtgcataccgtcgatgtctgtccagatctggatttcagaagcattgatggcagctccaatcagagaagccgtatagtcacttcctccacgctgcaggttgtcgatttcaccgtatgcgttgcggcagatgaatccctgagtgatatagatttcataacccgggtttgcttccagttgtgccgacagtttttcgcggatataagtcaggtccggttcactgttcttgtcagtgcgcatgtattccagtgccggaatcaatgtcgcgtttacgccctgctcgcacaagtagttagtcaccatgttggtagagatgatttctccctgagctaggatgactttttcttcaaataaagtaaatatgtctttcgtataagaacgaatgtaatcgaatacagattttacgaaatccagtgttttctgtttatattcttcggtagaatacaactcatcaatgtgctgtttatatttcgcttccagtctattgatgatttcatttgcaccttctggatttttcttgtacagataatccgaaatttcaactaatgtgttagtcgtacctgacatggcagacaggactacaattttctgttcgccgtcagtgattaatttggccacatccttcattctttgtgcagaacccacagatgtacctccaaactttaaaactttcattttacgtttcgaattttaaatgttctataattaattaatttcgggagcaaatgtaataataaaaaccctattttggggtcatttgggcaaaaatccttttactcctttgtcttttttatgaatttgtcgtttccgtgagacggtgatgttcgcatttgtacacttttccggaatattccgaaagcaagttgaggttgtgcgtggtcatcagaatggctgagccctgacggcagatgtcctgcaataattccacgatgcgccgtccggtttccacgtccagattgccggtcggttcatcggccaggataatttccggtttgttcagtatggcccgggcgatgacgatacgctgctgttctccaccggaaagttcgttaggcattttgtaccccttgttttccatgccaacctgctggagcacttcttcaattcgccgttctatttcggtacggtttttccagccggtagctttaagcacgaatttcaggttttcgtgcacggtacggtcggtcagtagctggaaatcctgaaacacgatgccgagtttccggcgcagggtagggaagtccttccgtttcagggtgcgcatggcatttcccagcacccatgcttctccggcatcaatctccacctcaccgtagatggttttcaggagagtagactttccgctgcccaccttcccgatgagatagacaaattcgcctttccggagttccaggtttacgtcagaaagaatctcctgtccttgcaagctcacgtttacgtgctggtaagaaatgagtggttgttcttccatatatagtgattagtgttttttccaggtggcgctgtgacgctctttcaattcacgggctaagtcttcaatgcggtagcctttgtacgtaagcagcacaatcaagtggtaaagcaggtcggctccttcgtaaatcaggcgttcgtcggttccattgcaggcttcgaggatggtttctacagcttcttcacctaccttttgtgccatcttgttgactcctgaattgaacaggctggtggtgtacgatttctccggcatttcctgacggcgacggtcgatgaaatcctgtaactctttcaggaacatgatgtcctgctcgtttttgtctccccagcaagtatctgtgcccttgtggcagacagggccttccggatgtaccatgatgagcagtgtgtcgttgtcacagtcagcctttaccgaaaccacgtgcagaaagtttccgctttcttctcctttggtccacagacggtttttggtacggctgaagaaagtcaccttacccgtttccatggttttctcgtaggcttccttgttcatgaatcccagcatcaatactttttgcgtatagttatcttggataatggccggaatcaagccattcattttttcaaaatccagttccataatcttactttatataatatagttagtttaaacagttatctgcgcacggcgataccttctttgcaaaggtaatcttttaattcgggaattggaatttcaccgaagtgaaaaacactggctgccagggcggcattagcttttcctaacgtaaatgcgtcacggaaatcctctttcttgccagctcctccggaagcaatgaccggaatggtaagccggtcggccagttcggccagtgcttcgttggcatatccttcctttaccccgtcgtggtccatgctggtaaacaagatttccccggctccgcggctgttggcttcttccgcccattccataaggaaacggtcggtctccagccttcctccgttgaggtaacatttccagccttgcggggtttgtcgggcatcaatggccaccacacatacctgcgaaccgaaatggcgggcgatgtcatcgatgagctgcgggttccggatggccgaagagttgatagacaccttgtcggctccggcatttagcagacgttccacatcgctcagttcatgaatacctcctcccacggtgaaaggaatgttgatttccgcagaaatgcgtttcaccagctccgtaaacgttttccgtccttcgtggctggcagtgatgtccaaataaaccagttcgtcggctccttgttcactgtaagcctttccgagttctaccgggtcgcccgcttgtcgcagattgacgaagttggtacctttcaccgtttgtccgtctttgatgtcaagacagggtatgattctttttgctaacataatcagtttcttgagttaagagttaaggaagaaaagctttcaagtcctgcagggtgatacgcccttcatagaaagccttgccgaataccactgccggaatacctgcttcgttcagtgcttcaatgtccttcattccgctgatgcctccgctggctatcagatgcaggtcggggtgcgcctccatgatttgcttgtatagctccaaagacggcccgttgagcatcccgtcgcgagagatgtccgtgcagagtacctttgcgacacctttctttatatagtcatccaagaacggcatcagctccagacggctgcactccagccatccgttgacggctattttcccgtctttggcatccgctcctaaaataatccgttcactgccatataccttcatccatcggttgaacgtatccggctcctttacggcgatgctgcccagcgttaccatctgcgctccgctttcgaaggcaatgtgcaagtcttcatcgcttttgatgcctccgccaaagtcaatgaccagcgaagtctgtccggccagtgcttccagtatcttatagtttaccacatgcttggaagccgctccgtccaggtcgaccacatgcaggcgatggatgccatgcgcttcaaacatcttggccacttccactggattctcgttgtaaacctttttcgactgatagtcgccctgagaaagtcgtacacacttcccgtcgatgacatcgatggctggtataagttctatcatattttatataatgtttcgtgattagagattcaaaaagttgcgcaggatacattctcccacctttccgcttttttccggatgaaactgggtggcatagaagttatccttgtgcaaggccgcactgaaaggagtgatatagtcggttgtggccgctgtaaattcgttgaccggcacatagaaactatgcacgaaatacacgaactcttcttctttcataccttgaaagagcgggctgcggagatgtgacaatgtattccatcccatatgaggaactttctcttcaggattggtcgactggaatcgcttgacttccgcatcgaagattcccagacagtccgcatcaccttcttccgaatgtcggcagagcaactgcatccccaggcaaatacctaatactggttgtttgagctctttgatgagaaggtccatgtggcaagctttcaggtaatccatggtggtacgtgcttcgcccactcccgggaaaatcaccttgtcggcactgagcagtgtctccttgtcgttagtgatgacaggttccacacccagtcgcttcagtgcacaatccaccgaaaagaggttgcctgcattgtattttatgattgcaattttcattcagtgctgttttttttgtagaaaaaaatagtttttgcaaaagtaacgaattataaacaatctcctaataaaagcgacaaaaagtttgtctgtgatggtggttttctgacaaggtttttgtaagaacctcctatgtgtggctttctaaaaaatgaggcgtaaaacttttttgaatattttttcggaaagctattgcagattcaaaaaaaagcactacctttgcatcgcaatcgagagagatggcaacgaaaaaacttaatggtgcgttagttcagttggttagaatacatgcctgtcacgcatggggtcacgggttcgagtcccgtacgcaccgcaagcttacaaagcaaaattaggaaaagctctgattcacaacagaatcagggcttttttcgtttccgggcggaagcagaatatggtggttttgcgaagtaagtcaggtgcaaaaatggttgcttttttcagacctcaaaaaaatgcaactaaaatgtattacatttcgctgattttcatatttttacgtaggtttgttttgttccataaaaactaagtttgtaacactaaaaacaaaggagtatgaaacagaacacactaagagtgctgttcttcgttttgaagagcaggttgttaaagaatggtgaggcgccgattattcttcgagtaactatagatggccagcaggatgaagtccggattcaacgttctgttccgttgaagttatgggacaatgtgaaggaacgcagcaaaggaaaagaccggagttcaacggagctaaacagctatattgaggcattaaaagtaaggctgtatcagattcacaaggaacttctctgtcgggaagccctgattaccccaaagaatcttctgataaagttattctctaaagaggaacgacatctggttttgcagaccatgcggaaatgtattgatgactggacttccctgattggtacggagtaccagccctccaccatttcacgttataacaactgttatgaatcgttgcagacagtcatcaagaatttctacaggaaagaggacattacatttcatgaactgaatggggaattcattgaccggtttgagatgcatctgagaacggtacgcaagctttcccagaataccctgaccaagtatatgagctgtttccgcaaatttctcggactggcccgggaaaacggatggctggaactggacccgttggccggaaaacgaaagcgtctgtttcggaaggaagaaacgtgtcctacgttcctgaccctggaagaactgaaacggattatggagaaggacttttccacgacacgtctgaacaccgtgaaggattttttcctgttctgttgtctgaccggcctgtcatacattgatgtgaagaccttgtgcccggcacatctttacaaggacaatgaggggaaactgtggatacacaaggcccgcgtaaagattactactcataaggaaagctgtacctgcaatgttccgcttctggaacccgcacttgtcattctggagaaatacaaggactggaatccggaaaatcctgaaggtccctgtttcccgattccgtcgaatcagaagatgaatgagttcctgaaagagatagccaccctatgtcgggtgaacaaacggctcaccgttcatgtggcccggcacacgttcgcgacgactgttacccttgctaacgatgtcgccctgcagaatgtgtcgaagatgctcggccattcttcaacccgcatgacacagcattatgcccgtgtgttggacaacagtatcatgaaggacatgcaggatgtcgcccgggtcttcggataatcagaaaaggctatacttcacaacgcacagtgaggtatagccttttacataaggaaaagttgtctgcttgtatggattggccacgtttttaccgggattatctcttcttccctttttcaatcagtctgataacatcctgtcttcgataataggttttccggtcaatctgggagaagggcaaggtaccgttgcttctcagggcctgcaatgttctctgcgatatgttcagtgccatgcatacttcctgattgtccatccagtcatccagactttttgaggtttgcctgcttttgaggttttccagtttttctttcagcagtcggatggatgttgtcatttctctgaaagtaccggcttcaatgtttacgatttccataaagtatagttgtttggtttgaggcaaagatagacggtatgggccgaccggccaatatcatgtcatcagatggcatcaaaagtcatcagatgtctcatgttgcctgttgcaggaaccggtctttcagaaatatccgattgttgaatctgggaggtacagccgtgttcaggaaagacatgtattatacttcgttatattgcgcaatttcgcatagtactgtatttcagtgtatttactaagtttgcaccaaaacagaacgtatgaaaggaaatacactgaatgtaatgttcttcatcttgaagaacaagttgttgaagaacggtgaagcaccggttgttcttcgggtgacaatcaacggacagcgggatgaaatccgtatccagcgctctataccggtggagttatgggacaatgcgaagatgcgtagcaagggaagggggcggagttcggcagagctgaacatgtatattgagacactgagggacaggatatatgtcatccataggaattctgtgtatgatggggaaagactgactccgaagaaaatcctggatattctctatgccagggaaggacggcatcaggttctgaaggccatgaaggaatgcatagacggatgggcggcttctcccggggatttgcatcctgccaccctggcacgttacaacaggtgtcacggattggtggagacagtcatacgggatgtttacaataaggaggacgtcgcattctccgaactggacaggaagttcatcacggcatttgaaagatatctgaaggaaacctgcgggctggcctggaatacggcggctaaatatctggagtgtttccgtaaagttctcaaggtggctcagcagaagggctggatggaacatggcaagtttttggaagaactgggacagttgtgcgtaaaggagaagacttccccttctttcctggactgggatgaactgaaaacagtgatggaaacggatatgccgtccggacgtctgaaacgggtgaaggatgtgttcgtcttctgtgcgctcaccggactttcctatcagagggtaagcaccctttgtccgtcgcacctgttcagggatgacgaaggaacactgtggatttgcaggacacgtgctgaaggaggggaggctggagacaactatataagccgtgttcctcttcttaaaccggcaatggtcctgctggagaaatacagaggttggaatccgatgaatccggaaggtccgtgttttcctgtcccttcagtccagaaaatgaatgaatacctgaaagaggtttcggtactatgtcggatttccaagaggcttaccacccagatggcccgcaatacgttcgctgcgacagtcaccctggccaaccggattcccaaagaacacgtcggggaaatgcttggctattcttccgactatatgttgcgccattatatgcaggctctggagaggaattcccaaaaggcatgaagcggatatatacaaaatatgataaaaagtgaaaggctatactccaatggatgtggtggtatagcctttcccataaacggaactggatgtgagaacgcttcttttcgattcagctcaagcagacataattgacaagaatgagtaccactaagacgcggtttatactgaaataatgatccttttggcaagccctgaacctatagaagcaaaaactaaccagtagcatcaccgtcagaacattcggttcaatatgcctgtctaatgtgaatattagatatagtctgggtactcaaatcaggcttctaaccagccagtgagtgatttgctgatgctcacacatcatctagcagtcgatataaacccaaatagcagtatacccgtttatatgaagccatttggtagcgaaaatccgaacagctctacacattcatctagcttcatgacttttgtagataagacctgatatcatcatagaattccgaatcaaaaggttgaaggttagaataaaagaatctgactttaatatccgatttgatgaggttcgaatttacagagttaagataatacttcagttcagccagttctgcaaacaaccattcatgttttttttgtatccagatacataagaaagggcatttcttacctgttccgtcaattcggaccaagtccgaattacaccttctgttgtctttaaataattcatattggatacactcctgctgtgtgcct

SEQ ID NO: 3820 - DNA, 66988 bp, Unknown
  gut microbiota DNA sequence
aagaactatcttttctttcgtgctcctgtttcagcgggaaagcgtttgcaaaggtaaggcgttttttcgtaacctccaaattttcgaaagtttttttgaaaaaattttcggaaggttttcagaaggcgtgcggcttaccctttctcgctccttgcacatcgcaaggtaagatactcggtgcagcagtcagcactgtctcccgtagcctcagctctgccagtctgtcatcttcagcggctctccctctcgaaagcggttgcaaaggtacagactttttccgtttccgcaacttttacaccatacttttttgcagaaatttttcaggttcttgcctaactcgctgatttactttatgctataaagcataatttttattgcaatacgaaaacggatgtgaaatgacctacattatataattcgtgcgtgcgcgtacgtgtgcgcgaaacgagacggaaaaagttttacaaaaaataggggaaaacagctgcaaagcctgaagctgcgaatggaatacggaaaaaggaacggagtttttacacggacaaggaggaactttttacgtttccgctacgaaaaacatacggttccgcaacgcaaaacgtacggttcgcatggcggaaacatacgtttcgccaaaggaaaacataaaaataatggaaacattacacggttttctacccgaggttttctaaaaaaaccggattccggaaaaaaagacagcccttcgcgtaagggcataaaaaaaggagttccgctgaactccaacctttgttaaccttaaatctaatactatgaaagacacagtacaaagaattattttgaaatcctctaaaagcaaataaagttttttccgaaaaataaaatcgatatttctccaaaaatccgctaacttagcccctcttaaaaatgatttacctatggcacttatcaaatcagtaagagggtttactcctcaaatcggtgagaattgttatctggccgacaatgccaccatcatcggcgatgtagtaatgggaaaagattgcagcgtatggttcaatgcagtacttcggggagatgtaaactccatccgtatcggcgaccgtgtgaacattcaagacggtaccgtacttcatacattatatgagaaatcaaccgtagaaataggcaatgacgtatccatcggccacaatgtgacacttcacggagcttgtgtgcacgacaatgccctgattggaatggggtctaccctgctcgaccatgccgtagtaggtgaaggagccatcgtggctgccggcgcactggtacttgccaataccgtcattgagccgcatacgctttggggcggcgtacccgccaagtttatcaagaaagttgaccctgcacagagcaaggaactgaatcagaagattgccaacggatatctgatgtatgcttcctggttcaaagaggaagaaaccgagaaataaaaaacagcctcgcaaggtttacggcattcgattccgtaagtgttgcgaggctgttactttttatctttacctaagattatttattcttcaactcttccagcaactcagccacatcttcttcacgtgtggcccaactggtcgcgatacgtaccactgtcgtaccgtcagcccgtttttcccacacctcaaagccgatgcgctgtgccagtttctcgtacaagctgttttcaagctgtacaaacaactggttgctctgcggacgaatgtagaatgtataaccgtttactttcagtccttccacaatccggtcagccatatcaatggcatgacgggcaattttcaggtacaagccatctgtaaacaaggtatcaaactgcaaacctaacagacgtcccttggccagcaacacaccccgctgtttgacaattgtatcaaactggcgaatcagtccgggctgcggaattacgaccgcctcgccaaacaaggctccaaccttcgttccgccaatatagaaaatatcacacaaggaagcaatgtccttcaaagtcacatccgtatcccgcgctgccagtccgtaccccagacgagctccgtcgaggaacaacggaatcttatgcttacggcacacggcagacaaggccttcagttcatccagcgtgtaaagtgtaccatattccgtagggtgcgacacatacaccattcccggagccaccatgtgctcccagctcgggtcctgatagaaagccgtcacataacggtctacctctgccgcatccagttttccttcgtggtgaggcaaggccagcaccttatgccctcctgcttccaccgctccggcttcatgctggttgatgtgacccgtttctgccgcaatcactccctcatacggacgaagcaaggccgtaatgaccgtggcattggtctgcgtacctcccaccatgaaatgtacttccgcctgcggacacccgcaagcttctgcaattttccggcgagccgatgcacaatactcatccgtgccatagcccgaagttttctccatattcgtctgacacaagcgctccagaatcaacggatgcgctccttccatgtaatcacttttaaaatattgcatattcgttttgtattttaaattagactttttcttccaacatcaaacccactcccttcacggtcttcagttccaccgtatcatcggccactaacagtttgcgcaagcgagacacgaatacatccaaactgcgcgaagcaaagtaatcttcctccgtattccatagacgcgacaagatgacttcccgccgcacaatctgtcccttatgctcacacaacatacgcagcaaatcagcttcccgcgccgtcagcatccgttcttctcccctttttctgtttccatacgccacgcaccgtatcaaaggaaaacagtttcccgatgggtacctcccggacttctttctgcgccgacatccctcgcgtcagtttcaacagtgccgtgatatgtgcatgcagttcctcggccagaaatggctttttgacatagttattcacacccagttcataacctttcaccacatctttcggtgacacacgcccggaagtaaacaagatgggcacatgctcatcctgctcccggatacgccgtaccatctcatatccgtccattaccggcatctcaatgtcggctacgatgacatccggctgctgtgccttccaaacggccagtccttcctcgccattggatgccgtcagcaccttataccctccaatcatatcctccagaccaccctgaatgatataacacagattcgcgtcatcttccaccaacaacaatttaattatctcttccatttcatcgttcctcttttttattctccagggtactttccggaggaaaagccaaggtaaaccggctgtattccccctccatgctttccagcgtgacccgtccgccgtgtgcttccataatccgaagcacataattcagtcccagtccgaaaccagatgcttcaccggaacgactgcgttcactggctgccgcccgttcgtatttctcaaaaatcttccgctggtctttcaacggaataccgaaaccattgtcggccaccgtcacacagactgttccatccgctttccgttccgaaagaaatgtaatttccacggcttcacccgaatatttcaatgcattgtctatcaaattactgagcgcttccctcagaaattcttcgtctgcccaaaccacttcttcctgcaagttccatacaaacgcaacctgcttagcagtttttgccttatacttctccgccaaatcctccagaatcgggcgtagcagacaatccgtctgttgcaatttcaatgcatgattctccagtttggaaagcgtcagtaccttgttggtcaacgccagcagatgctctccttcctctttcacaatacgaaaataacgttctttcttttccggctgtccgtccaggtgtccgctttccagaatctccgtccccatcaggatggagctcagcggagtcttcatgtcgtgaatcatggcatacgagaaatcctccctcaccttggctatcttgtcctgccggataatgacacgaatctgatacacaatacagataatgaccagtaccataatcagcaccgtggcaatcagcaacaaagtcatacgctggaaaatcacccagtaaggattcagaatcaccccttgcagatagcgggtatatgccctattaataggcaccagccttgttctcaagtatttttgtccttccagttttgcctgtggagaggatgcccgcaacacattacctaacgaatccgtcatacaagtcgataccttggccgagataccgaccgaatccagcatgtgggcataaatagaatccagattatgcaaggacacatccatcttgaacgtattcgataccccttcctgtatggcgatgaacacagccgattcaataaactgacgtgtttccggagttggagtctgtgtttcgtcatcctccacgtcctcattcaggtcaaaccgatacgtgtacgtggaatccttcttcccatgcaactctttccaaaggcctatccgatcaaaagcctccttaagtgccgcatccttaaaaagctcatggctctgccgcatgacgttctcacgggtcagtttgtaagtgttgaccagccagacatactgcagttcgacaatcgcaatcagtcccactaccgcaatccagcgaatgtgtttcatcttcataagcgtatattcttcacgtaaacgaaagacgttaacgtagcgttaaccttgccttaacccaaaaagcgaaacgggctttttagttttgcagtgtcaaagataatgaaagataaagacacgaacgatatgaaaaagtattttttagtgagcatcttgttactgctcggtacgatgctcggaacagccaccgcacaaatcatcacaggcaaagttaccgacccttcccgtcagcctattgacggggctacggtcgtgcttcaaacacccgattccatatttgtagaagctaccattacaaatgctgacggtactttcctgctgaatcaccagccggcacactatcgtctgctgttccaacacctgctgtatgaaccgcaggagaaagaaggcacagggactgatgccggtacgtttacactgcaaccgaaagactacgcacttcaggaagtcgtagtacaaggcgaacgcccgctggtcaccgtggaaggcagccgactgacctatgacatgccgcagctgacctcccaacggctagtcaccaacgcgtacgaagccctcaaacaacttccgggggttatcgaacagaatgatgtactaacgctggccggagcaggcggagtcagcctgctgctgaacggacgcccctcgtccatgacctacgaacaactcatcactctcttaaagggtatgccagcctcgcgcgtggaaaaagcggaagtgatgtacagcgctcctccgcaataccacgtgcgcggtgcggctatcaacctcgtactgaaaggatataaacccggcgaaggaggcttgcaaggagaagtcaacggtgaatataaacagcagaaggaagccggaggcaacggaggcgtcacactggcctatacttctcctaaaattgacctcgatttcatgtacaaccttcagagcaactatacccgtggctacattgatttcatcgcccgtcatacggtgaaggagcagatatatgacgtgaatcaggtgacggacaatgaaggacgtagcctgacgcacaccctgcgcgtcggagggacgtataaatttgataaagacaactcgctgaacttgtcctataccacccagttcagtccggacaaaaccggcgacagccattccaacgggaatatttccgaatcattcaatcattctcaggctcaccaccagatgcacaatgccgcattgtattatacctccggattcggatttcaagcaggagccgactacacgtattttacctcgaccgatacacaagactttttcgaccgtagtccggaagaggtagaaacccgcttcataagctgttccgaccagtacattgaccgctggaaaatctatgccgaccagcatcacacactgtcacaaaactggaccctgaactacggaacttcttttacttacgtcaacaaccggaacactcaaaactatgatttgccggaaatgcaaggcaacaacctgcacagccgtatccgtgaatacacctataacgtctacgccggattcgacaaaccgttcaactcccaatggaccctgagtgcctctgccacaatagaatactaccagatgcaagagtaccggaaatgggctgtctaccccaccctccagttgaactacatgccgtctgcctcgcacattctccagttgtctttcagttctgacaagacttatcccgattactggacactgagtggcgccaccagctacctgaacggttacaacgaaagtctgggcaatccgttccttcgtccctacaccgattacaacgtcgacctgacctacattctgaaaagcaaatacatttttcaggcaagttacagctatacacccgactacttcatgcagaccgtttacctggattccgaccgtctgaaagccatctacaactggcagaactgggattacgctcaggacctttctttcacggccattctccctttcaaggcaggaagctggtgggacagccgtctcaccctacaggctaccttgaaacacgacaaggccagtgtatattacgatgcacctttcaatcagaagcaatgggtcggcgtaggacactggacacataccttccagctatgccgccagcctaacctgaaaatggaggttaccgctttcggacaaacaaaatccatacaaggcagttacgacattcagccagtggccttcgtagatgcagccttgcgctatacctttgccaaagacaaagccatgcttcaactgaaaggacgtgacctattcaatacgatgaatcccaaaacaaaagtccggaacggtgcgcaacatctcgacatgaacaccaaaagctacatgcagagcattaccctttcgttcagctaccgctttggcggctacaagaaaaaagaagtgaaggaagtggatacctcacggtttgggaactgatattaaacaaaaatatcctgttgccaacctacatattgacaacaggatatttaaatttctccttctaaaggaaacaggtattatttcaggcttctgctcccattcagaatatcttcaggaatttcagcacaacgtgtatatacagatacgtcttctgcattatcctttacagtccacttcattgtttcatctgtcatttctgatacaatgtattctttcaacgggtcatgtgaataatcatactcacctgtcaaaatataccctaaatcttcatcttcttcaatttcaaaagaacctgtagatttatgcgaatacatacttcccatattttcatacatttcaaaagtatgttcctttctattaaaagtgatgtatacatactgaccttcttgtaaaggtgccccattgaactcagtcaacatccacgttccattcatagtggcataatttacctcctgatataccactggagcttcttcatccttgctgcaagccgtcgtcattgctaacaacgagatgcacatcataattctaaatatgaattttaccatatcttcctatttataaatattattattttatatccatattgatttttattgtcctatcggatggtcgtccggaaacaccttcaagtaaaacattgaatgactttttccccttctgcccggaaagttttcttccatccagttctaccatcaataagccttcttgtccaggttctaaaacctccggttccgttcttaacttcaaaaattctggaagaaatccctttacagcacttacctttaaaggctcatttcctgcattagcgcaagctatccgctcgactctgcggtgcatagtcgcagtgacagttcccatgtttattgtcttagcacgtatttttaaatgccccatggtatacctgtaatctctccataaagccgatgaaggagtaacctttcctgaaatggtcaatgcagcaattggtttcttttccgaaatgcttacatatacaaatgcccgggtataaatagttcctggttgtccgaacggattataagtcagttgaatcacagccttttctcccggatttatcactggagaatctatatgagcgtttgtacatccacatgtagtagaaatctttgtgactactatcttctgttttccgacattcgtgcaagtaaaagtaaaaacttgcggcttgtcatcctcagacagagttcctgcatttatctccatacgttcaaagcgaagcatttcttccgcatgctccatcaatacaggattcaatacggcatccagttctttttgggagaaaactttctgtgccatcaaaaaaggcacagaaagtaatatgaacatccagataattacagttctcataaaaatcaaacaagattacatccatccatttccagtagccttacgcaccgtaatcacaaattcttgtgtcttgccatcgctattggtcacagaagctttagtggttccaactttggtaccttttaccttcagctgattattatccaacgatacagccgcaatactgctatccacgacattaaattccgtagctgtcacattatccgcatagattctgttcaaattcaccgtttctgtggcgtcaagtgctacgtacacgttaggtacacgcattggctgggcaccaaaattactgccatcaatattggccagcacagcctgtgcatcgattaagcctcctatattacctctataagccggtaagttcattctcaaatgaggagcagcctcacctacacttccccaattttcccaataactcttctcatctgagagattgccactcaaatctctcaccgacgccagcagcaaatctttaaaatccgacgcacgataatgcttacgcaattttgctgcatacgacaaacctaaagctgctacccccgatacatgcggacaagccattgaagtcccatccatataaccatatccactttggcttgcggtaaggtcagaaccctcaatagctgaattcggcatagtagaaaggatagaagccttttcatccttaaaggcattcgcatcaccaccaggagctgcaatcaggttcttgcttccactcgggctgacataattcgtataacaagaaggttttcctgccggatcaagtgcagtaacacaaataaagtcaccatacgctcccgggtagctgaccataggagcatattcattacctgctgcaaatatggcaatacctccatcaatcaccccattcggatcacccgcattatgaataaaatattctaacgcttctttctgaagtaccaccgagttagaccattcctcatccgatgtaaaaccaggagtacccatcaatggattgatacgtccagaagctgccgaccaactacactgaagaataacagccccattatctgctgcatacttaatggccttagcttgattcagtacagaagaagccccttctccactaaaaatctggcaagacattattttcacaccagttttaggagttccatcccctccagcaatacctcgaataccgatcccattgttatctgcagcaattactccagccacgtgggtcgcatgtcccgtatctcccgtttgagtatatgaaatatgaccattccctgcaacaaaattataaccatatttgtcaccagcatatccattgccatctgcatcttcatcagaaccaaatgtttctgctggattaatccacatattattggctaagtcttcatggttatacatcaccccttcgtccactacggccacaataatagaagggtcaccctggcatttttcccaggccggtacacaatttacatcgtatccggtaacagcacctgtaactacacttccatcatttcctataccccactgaagtttcatattttcagtctgggtctggctgcctaatgtttgaatggcttctcttgtagccctgtttaaacccttcgctttcttggtggtatcataacctctctttatcacctggttatattccacggttgccacttccgaaagcttagacatatccaaagccaccttattcaagtccatatctttatcaaacttcaccacataccacaaatgcaaaccatttttacgggtacgttcttcatgacgtttgtctacagggaaaacacgttcaaaggtatatgctccggcaatatctaggatttcatctaccgaaggaatactcgaacgagtctgtaccccgctacgacttaaaatctgagctttttcaagcacctcttccacttccggcttaaacttgatgagaagttcaccttccactgcctcatcagccaaaccagatataggggccactatattctcttgcactccagattctaaaaacgtttcagaatcagagcaggagaacaaccccatagcactcacaagagcggcaaaaatatattttttcttcatttttaatcgtttaattttcgagccatgcaagccccggcctacaggtttgcaggccgaaagctttacaaagttctattttatatcattccacaaaaattactttaacgaaatcaattcccctcttccgattcatctgttatctgaggttttctcttaggatacatctcataataactcatctttctcgttatgccatcatcttcaaacccatagttactcaagtttgtaggctcattactgaactttgtaataacctcaccctttgtatttttagcctttgaagacgttgtactaagttcctgctggaaaatcatggtaaacggatcccagaagctcaggtacggatgatataatatccagtcaggtagttttccgttcatgaagttcaggtttaaagaaagcttcttcattcttggccaaacttttggagcaccaatcaaatacttcttagcgtcttcaattgtatctttattggctgcattatcaatatcaatttgtgtataagctttaatacctaaattcaacaaatcctgatccgaaggcaattctccatccagcatatttaaagacaatgacagatattccagattttcccattgcaacaacttcttaaaataagtattattatatccatctgacggtccagggaatccatctccaccataaccagtagtccaacggaaaccaagtttatcatcttttcctttataggctgaaagatcttttgtcgtatcataacgatttatctttgtcaaatccaatttgcgcaaataagggaaatggtcctgcgtaatactttcgataccgataaccttcacgccgtctattgtggttccagcttcgcccatcacttcaaagttattgctgcccaagtccaaagagataagcgtattacccaactcggtaaagttttccggcaatcccaccagaccataagcgcatatcgctaaattacgcagatttccatatttcaccagttcacaaatctcatttcccaatacgatatccttgaggaatgtattcgagtttcctgagaatgtaattgattcagcagttttaagatatttcacctgataaggaagtgattcctttgtttcaaacgcaataaattctacagatttcaaacggccaatcaattctttagggacaggagcggaataatcaatcgttctatctggatttaacttaatatacttatcagtagcttcccaaagttctacacctttccagtatctcatgtttccactggcatcccaagtaaaaataccattcatgctactatatatggaaagaagagccaaagagtctccggcacggtcatccgtaattaccggagcaggtttctgagtaacaaccagttttattgaaccatccccctcagtatcagacgtttcatgcggagtaataattacctctgcagtacgagccttctcagccatgttgacatcccagtcaaaatgcagtttcaacaagcgtggacggtctccataatcataattaggcgtttctttcttgtacttcagccattccttgtctgaaacggttccatcttcatctggcaaattattgacccttacatcaaaattcacattggccatcattgtaacctcaaagaaacgctcctccagtttcgcagagttttccaaagagatggttctgtcttcttcacttacaaaaataccttttgcataccccatctgcattactttcactgtagttgcagtggtctggcctgctgccataaaagtgataactccttcacgtggttcagccactacagacgagtctaccagaacttcacaagtagcagctccttctccattggaaggactgaatttcaaccaggaagattcagaagtaccctgccatttcacattgccttttatttccagcagttcgctgcctccatcagccccgacagcaatctccgtcttgtcgatagagaattcagacacgacattgtcttcttccttacaggaaacagccaataccatgcaggccgaaataaccattataatatttaaaaatcttttcatacgttactcgttaaattattccaaagtcagataatcacatccacgaatatcttgtgttgtatcataaatcagcagatacataccagccttgatataaggacaaacagacgatacattcagaacgatacttgggttatcacttacatccagcgtattaatgaggtacgaaagtctttccgtttcgggaacctttccaatatcatttccacctaaaagcaatgcacgcaagcctttatggttaccaatatttgtaggccattccttatatactcggttaccgtcatcatcacgctggttacgcataatcaacgtgttcagataagaaatatttgccaatccccatgggaatgccgagaactgatttccacttatatcaataccatacaaatgcggcatatatgttccattcatatcatccggtaatttcttcaaacgattgttcgacaggtcaagacttgtcatcatatacgttttttcacccttaatgtcatcattcgtaatctcctcgatttggttcccgctaagattcaacacggtcaaaggagatccggccgtgaacaagtctttcgggaaggttttcaatgcattaccagccaaagacaaattattcgtattgatacccttatctgtcgttacttctgtaatctcattataagagaagtcaatggaagccattatgtaaattgacttggcatcaaatatatccggaaattctgtcagttcattatgtgagaaagacagtgattccacatcatccataccacaaaagtatccatccgcatctttttcgatacgtgcaatctcattataatcaaaagtaccctgaaccaagttcacatcctttccaaaagcaggaagagctgtcaacttattgtatatcaaatcaatcttacccaacgtcttcatcttagagacttctgtaggtaaagatgcaatattattataacctaaatatagaatctgtaaagattcaccggctttaccctctgccaatgttttaattccttctgggaacgctgccgctaactgaggattcattgccatattcagctgagtcaggttctccatttcagccaactgatcagggaaagctgtcaagcgtgggcagttgtaaatttcaaggtctgtgcaacttttcaaatcacctaatgactcaggcaagctagtaataggtgagttggctatatacaatacttcaagtttcttcaggtttccaattgccttatcaatccccgtaataccgttggtcaagtcaccatggattatatccttgggctgtacaatcgattttttaatggccggctgtccagcctctaccatacaacgctgcatctgcacgtcccagtcctgtctggagtcgcgcaatgcaaagttatccatataatcagaacgtagcttttcaagcacagcaggagtcaaaccaccctttaaatcagccagtgggttttctcccggacgcaatttatcattgtgtgtacctaaagccagactttgaagttcttcaaactcaccaatcactgcaggcacaattcctgtcggattaaaatcgccaatagacaaaccaataacacggccattcttgtcaaggcttactcccggctggtcaccccacatgtctatatctttattatcaaaatcccagttggttcctttcggatagctttcgcctacataagaccagtttgggcctcccagctcctcccacaaagtacgaagattataataatcttttatgtttgcagctgtttccataatagtaacaggcacctttgcatctgtctgcttgttatctgtcaccgtaaaggtagcctcacccaatacttcatcattaaaatattgcagaagttccgtacgattatatgcagcatacgaaagaatcttgtaatttccagcctcagctgtaacaagcgtatcaattcttccgacagaagtacgatagcctataccccggtcatcaaaatcttctacataagttaccttcaaagacttaaactcttgcgtctttttggtatccatgttctgaatcttaatatccaccttattaatatcgctaaacggataggggtcggaatcacttgcaccacgagattggatatttttaatcagttcaaacttaaccaagcctcttcctattgcatccaccagcaaatcctgcacaacaagcccaccacttacaattgtaaaggttgttttttcagatggaataccggcaaaaataggttctttctctgctctatcataaagataaaatcctactactgtatattcaccggtctgcagttccagtttatcactacgcaaaccatactctgcgctttgctcatcataagcatgcaacataagtgtctgagagaagtcataatcattgcttctcaacactactttcactttatttgcttcataaagtgaatcaagcacgtttccacttgcacgagaggtctcattttttacataagactcactcttgtacaccttaaactgtacgtaacccttatcagcctgaaatacttctttgtcatcagtacaagcatataacagaaaacaaagaatataaaaaataaatctacaataagataatctattcataatatcactccctataaattaaaattgcagcaactattggagaagattgggattgctcatcccatttgcgtacaacaatgcataaaggttttaatacatctcctttttcatcatatccattagtttcgcttattccattccaaaaaatatacgaagacatataatcacaaaaatcattagtgccccaagatgggtatttcactggatcttcttgagataaattatgccatgaatatacctcaaaatcggcatatacattagaaacaattttaaaagttgaatatgatgtatgagactgtaaacgcaccttataaatattattagttccacaatattcgatatcttcatcggaaggagaatcaacttttaaaaccataataggttcttgactatctgaaatcacttcaaaatcacttgacgtaatgaaagcacttttttgtgaaatagcaatcaatacatatttgtctgcacaatctgtaaaaactccggaagaggttaataaattatcacgaccaataaaacccaatgtatcttttggcataatcattaccacaccagatcgttctctatttccttcattgttttttactgataattgagcttcttttaactcagaattctgttgttgattcacttttagactcatccaagcatcttgattatcaactaaaacatattgatttgcaatttgctcttcaaaatacaaaacttcataatcatttccatttaccaatacattttgcataaccaaaggagcatcaaactcatcagattcacccgtcatgctattggaggtagaatatttgcctccatcagaattgaaagtccatcctccccaagcattcttatcagaactaactctatcaataccataaaaattcactggtatattaacaaaatcgtcagttcctgtccttttcacttttatatcaccttttttagcaaaagcactaaactcatcctttacagtaacagaaatatttcccggacgaaaaccaagacctttcagaggagcttcattcaccactaaccattcgggatattcctcaacagtccaatcataattagtagtaaaattaatgtcaactccttttcctatttccctataaaaaaacggtattaggttttcctctgaaaaataattcccattagcatctgtcacccataagccttctccctgacgggtcaactttgcaataactttttccatgtcaccttgtttcaaagtgatttcagcctgcatttctccataactcagtatttcttcatttacagacacctgcacagtctgctttcctgcctgtccgctaatagaagtcattccattagagaatctgcaccacaaagttgaagaatacagtttccaatccattgacgcctcaaaaacgaggtcaacagactctcctgccttcactgagaggatttgctcttcttctgggaaagaaggagtcacaggtgccccctcatcctcagaacaagccacaaccatcacagctacagccataagccacatttttgataatatgtttatatatttcatacgtctattcttttgacattacatgttaatatccttgtttcttcagataatcatactcctccttagaaatccattcaaccacagtcgggtatgtacctaacggaccagctgattcgtatccttctacatagaaagtatgatacagcagagcaaatccctgacatacattaaagtatgaaactactccagtataaggcacggccaaaatcatatccgtacccaatactgctccacctgtaacttcagataatttggtaacaacctgagtttccatctcaactttgggttcaagtggtttctgcgtattaaaactgattttcaagtccattccatccaagaagaaatcattaatgattaccccattttccttttccggatcttgttccacagtcaccaggcggaaacttgtattctgcatatagtctgcaaagaaattagacgttactttggcatatcctacaaaacgctgaatatcaaacggacaaatctttaccaactgcactttcgtctcatctccatatatatcccagattttatcttgtggcgcaaccagtctcaaattaatacccaaagagtccatatcttcaaagttatcataaaaacctttgatttttacagaagaagccaactcgccagctttaatggtaaccgagtttgactgcagttcataatgtaatccttcaatggcattacttcctttatcgactacctctacggcgtaagtacgatcatagtcgcatgccgtagtagcagatataggaatatcataataagtatccgaactttgtatggcaatggtctgcaacgaatctgagaacattacatagtcaggacccgcataggaaacacgatcttcactgcatccaacaaataatgtggcagcaaaggcaaatattcccaattttccgaaaaatcttttcatcgttattcctttatattatttcgttatttattactttcattcggttcaatggcagagcccggcaagtcaagttcatgctgaggaatcggccatacaaacaaaggattgccggcctctattttcaggctgcttccatctctcacactttgttcctgcggcttacgttcaaaacctttaccccaacgtttcaagtcctgcaaacggaatccttccatgaacaactcacggagacgttccttgtcaatttcgtccagccagttttctgaagtcaaagtggcagaaccatacgtttgatagcgagcctgacgcaaggtagaaatgtctgcagacgcttttgcaaagtcttctttctggcaatatgcctctgcacgaatcagatattgttctgataaacggaatactttcggcatatttacatgataaatacggtaattggaaacaaattccatgtttccataatactttaccagcaacggccaaacaagcccgtgagcatatccggtaggcatatcctggaagaatgaaacataacgcaagtcattaccttcatacgtattcagtgctgcttgtccaggtacataatccgggcgataactaatttcatcaaagttcaagaacacctgtcccaattttcctccataagatgtaggaaggaaaccgactttccagatagtctcagtggaagcatcatatttccacatatagtcataatatgacatatcgtttgtatagactgtagtggcgcttgaaagcaaatataaatcactgtctatcagcttagaagaatacttaatcgcattatcccagtcctgcatatagaggtatatacgagccatcagtgcctgcaccgtaaattcattgaaataaggtgaatcataataatcagatgccacaagcgtagtaccctcctccggctccatataatcgtatgcttttgccaagtcgttcagaacaaactgatatgaatcatacaaagaaacacgcttcatttcacccggattagaatagcttgacacaagcaccactcccagctcatctttagccgtagcaggatcgtaggctttacagaaacatttgattaattctgaataagccagagcacgggcaaaatatacttctcccttatacgcttccaatttctcgtaagcatcatcatccacaatgttattctcccacttagccacttgctcaaagaagaagttacagtcacctatcactttgtaaagtgaaccgtaaacagcttcaatatctgcattggtaggattgatgttccagcgccagatatcaccataagtattggaatagccatttactgcgtataccaaatcagactggatgtcaggcagcaaagtcaagttaccgctatacaaatagcggctcataaagtctgagtaaattcccatgacagcctgattggcttcttccactgtagtaatggattgatcggccaaaatagcatgtgtagggtccttgtccaaacatgaagtagagaacaacatcgccgctactcccaataaatatattttaaagtttctcatcgttgtcttcagcttttaaaaattcaattctacgcccaaagtaaactgacgtgacataggatattgcgcacggtatatattagcagagaattccgggtcaagtccggtgaacttagtaaatgtcaataagttctgtccttgtacatatacacgtgctccgttaaagaatttcgtacttttcaatacactctgaggaagattgtaagaaagcatcaggttcttcaaacgcaggaaagaagcattttccaggtaatgggtatcaaactgaggagtaactccatgacgcggaatgtctgtcacatcccccggttctttccagcggtcataaagcaaacgttttgactggttgtaagaagtatacaaaccattactttcgtccataatgcggtcattgttatacgcccaacgatcggccatccagctgaactgtgcagaaagcatcaagcccttccatgaaagggttgttccgaaacctccttgccacggagcaatgaaactctttccttcaatcagcacacggtcttcttcgctgaacacattggttatttcaccgtctttagtataccagagtgcatctccgtttgccggattcacacctgcataacgtaccatgtagaagtttgctacatcatgtcctaccgcatacatatttacgttgctgtctacatactgatcgattccgttataaagttccgtaagcttgttcttattgtaagaagcattggcaaacacattccatgtaaaatcttttgtacgaatgatgtcagcatctaccgagagctcgataccacggttaaccattgcacctacgttatcccaataagctccgtaacctccgtctgcataacttaccggtacctgcatcaacatatcagaagtcagcttgttatagaactctgccgtaaagtttacgcgattaaaaaagcccagacgcaatcctacgttagtagtccaaagcttttcccaagtaagattctcatttccacgctgtgagggtttgatacctgtttcacccaaatagttagagctacccgttaccaaagccagatgttcatagttagaaatagaggagttaccagaagtacctgtactgaaagtcaactgagcattggtaagccagtcgtaaccttcaaagaattcttccttcttgaaatcccacatcaatcctacagaccagaatccggcccaacgattatctttaccaaaacgtgaagaagcatctgcacgtacagaaaaatctgcataatatttaccatccaggttatactcgccacggccaaagaaagacaagaatgcatattctgtagtagaatccccccatgaaccagcaaatgaacctgatgaaagattaaccaatgcgtcattgttctgcttgcttgtggttacattgaaattctctgaatgataattcacgccttcctgtcccaacataaagttaaagtcatgacggtttttcaggttgaagtgataattcaccgtattagtaatggtcagggtcagattatccaaagatgaacgtccggcactacccagtcctgcattcaaagaataacttggagtagaagttgagaaaccagtatcatgtgaatagtctacaccaaactgcgaacgaatagtaagtccctcaatcggagtcacttccgcaaagacagatgaaatgaccttgtaagtcttatattttatcggattgtttatcaaccactcaatagggttcactccgcttcctttccaggttccatcattggtagaagccaaagagccgtcttcattgtaaggattccagtaaggcagcataaagtgtgaagcagaaataggtgcataaattgcataatctccatccacagcctgctcggtttcctgataagcaagcatggtacttgttcctaatttcagccattcttttgcacggttttccacattggcacgtacattataacgacgaaaagaagaaccgaaagtaataccatcctgatcaaagaatcctccagaaacataatagttggtcttatcagtagcgccatttacagaaagctcataactctgggtaggagcattgttgttaaacacttcatccatccagtttacgtctatgcctttcaccttatcataatattcatcaccgaggtcaagaccgatttctttttcatactgtatacgctctgtcgtattcatcatgtcccagttgcttccagccagctgtgagaatccccactgacctcggaaagtgacattggcatctcctatattgcgtccacgcttagtagtaatcaccactaccccattggcagcacgcgctccataaatagaagtagaagaagcatctttcaacacagagatactctcgatgtcactagggttaattgaattaaaacttgatgattctacaggcaccccatccaagataaataacggagttgttccagagttaatagagttagtaccacgaatctggaaagtagccgcacggctaggctcaccagaagcggccattacagtcaatcccggagtctgtccctgcaatgcctgatcaaagctggccgtaggtacattttccagtttttcacttttcacagtcgacacagaaccggcaatggtgcctttcttacgtacaccatacgctacgactaccacatcgtcaatcatctgtgaatcgtccaacattgttacattcagcacaccggtatgtgaattcactttcagctcctgcgtctgcataccgatataagagaagaccaaagtagcttcgccaccctgaatctgcaactcatagttaccatcaatgtcggtaaccactccattagtagttcctttttgcaggatagatactccaatcagcggttcattgcctgtcttcgacacgacattacctttaaccctatacgactgggctaaagctgactgaatacccaacacagcaaaaaagagtaaccaaagactaaatcttttcatcttttgcctgttataaaataattaatgattaaataaaaagttcttattaaacaaaacagcaccataccagcttcactaacctttcaaagccaggcacggttattcaagcattcattacatgaacactcaaaaaagagaaatagtagaaacggaataccaaagccaatcccttgatattccgatgaaagttattgctagaatgaatcgcgagattttacattgcggaataccaattcttgattatcaacccctataatcacataaaataaattcacattcatgtccctctatctatataattctaagccgcaaagatatataaaaaactataacatgatatatttttacctatcacttttaacgaatttcagtatataaatctataaattatcatcagaacgcgtatttttactcactaaatatacattctgaatagccaaatatttttaaatgtcttcgaaaatcctcaaatgtcttcaaatgtcctcaaatgtctacatagcccctaagtgaccttttatatttgtaccggaaacaacaatgtttccctaacgggaaccctacgttttccgaacgagaaacataaggttccgcaaggagaaacatacagttcagccagcggaaacataaataacaacttgtaatatttcaaaagatatggaagcattgtatgattttttacccgtaccgggaacaaagaacagcgaaaagagcccgaaactttaccctaaacttgtaaccagaggagctgtacccttcagcgaaatcatccggcagatagcccgttcttccggattcaaggaaggaaccgtaattggagtaatggaagaagtggagaaatggacatctttctacatttccagaggagaatgcgtagaaataggacacatggcctatgccgtggccaacctgaaggcagggaaagagataaccgacgaaggcgaaattcacgcccagaccatccgattcgataaagtacggtttcgcacaagcaagagtttcaaccgaagatgcaggggacaggaactttcccgagtcaagacagaatggaaattccagaaaagttccgcccgatacacggaagaggaacgcctgcacctgctcatggagtatctaaagcagcatccgttcatcacaaggacagaatacggtcagctgaccggacttcagaaatcaaaagcctggaaggacctgaacggatggataaaaagcaagatattaggaagcaaaggaaaagctccccacaaaatttatatacttccaccggagactatttcgacagcaaccggcgactcaggtagcgcaccggataccatacagacagaaaacctacagccagtacggtaaagaaaatgagcgccacgtcttcccagtgtacactgacgggataagcgtcgacaataaaactgccggctgctcctaaggaaatcagtccgaaagtctgttgcaaccagcaaagcagcacacctaacacaatacccgacacggctccgataaatgaaatcagtcgcccttcaaaaaggaagatacgcacaatctgccggtcattggcccctaagttacgaagcgtcaccacatcgtcacgcttatcaataatgagcatggacagggaaccgatgacattgaagcaggctatcatcaggatgaaggtcaagaatagataggatatgaatttctctatcttcatgatgcggaacgtgtcggcctgctgttcgtaacggtcgaacacacgaaaacgttcgcccaggtgtttttccagtttacgcttaaaggcatctatatcggtgccttctttcatttttagattgatggcactgacttcagtggtgtattgaaacaattgtcgggcaaatttcaaagaagtaaggatataggagccatcgtatttctcctgatttacggcaaacaccagtccggacgagaacaggtttcctcctgtaaaggaagctgccggattggccatgttcaccttagcccctcgcttgggagcatacacttctaacgggtcaaggaaacggatgccggtacccaaagtagctaataactgtacaccgggaatagcataatctaccacctcatcatgcagcagcaactctcctcttccgaaaagaatggtatcaatcggtgtcagttcttcaaaattatcttccactccttttatgacagccatggcctgacgcccctgatactgcaccaaagcattgtcttccaacgactcggacaccaaggctacttcaggcattttccggatggctgcaatagctttatcctggccgtcgaacacttttccggtagcaggcacaattttcagctccggatcgaaagccgtgaacaaattagataccaggtcctgaaaaccgttgaacacggaaagcgtacaaaccagcgccaatgtggccagtgccactccacacacggatataccggaaatcacattgatggcattgtgtgatttcttggagaacaaatatcgccgggctatgtaaaaaggaaagttcaccgttataccttatttatatataacacaaaataaaaacccacagaagccggaagcaacgttccatgttcttctgtgagtatttactaaaatatcagatacattatttcttcaacagttcgtcaattttctctgcataatccagagaatcgtccacgaagaacttcagttcgggaatgatgcgcaactgatggcgtacgcggtttcccagctcaaaacgaattgacttcatattggcattgatgttcttcacgatttcttcacttctatctgaagggaagacgctcagatatacacgcgcataactcatatcgggactgatgcggacaatgctgaccgaaaccagcacaccaggcattgacttggtctgcaaaagaaagatttcgctcagttccttctgaatgaggcgggcaatcttgttttgtctggttgtttccatattacctttttattttttacgtatgatagtcagaccgtcacgcaagggcaggattaccttttccacccgtgtatcggcagccaccaggtcattgaatttcttgattccgatggtctgcgtgtccgtgtgatgcggttcttcaagcacatgtccgtcccacaaggtattgtcggctatgatataaccgccggaatgcatcttttgcagaatcatttcataatattctacatagaaacgcttgttcccatccacaaatgccaagtcgaacacgatgtccatgccgggcacaatttcaagggcatcaccgatataaaacttgattttatcggcatagggtgaattttccagccacggacgagtgaaatcttcctgctcgtcgttgatttcaaaagtatggagcatagctccttcctccagtccctctgccagacaaagtgcggagtatccgctataggtacctatctcaagcacctgcttcggacgtatcatctgcacgaacatcttcagcatacgaccttgcaaatgccccgaagccatacggggacgcaacagttttacgtgcgtcgcccggtacagcgctttcaggtagtcgttctcttcatcaatatgctgaagaatgtattcatcgagcgcgtcagtctctttcatgattacaagtaacggttacggttgggtaaaacgtagtcatctccgctcttcaacacatcacccacctggttgatttcgaggaatgaagtatgagtaccttgtttaccaccgctcagataagccaccatttcgttttctgacagcacaccgtcgtccatcagcttacgcaatgcagcgaaataatattcctgtccgttggctttttccggcatatagatagcttctacaccgtatgacaatgccaggtgacgcatggtcttttccttataacagatagccaataccggatattttccacggaaagcagccaggttgcgggcagtcaaaccgctgaagctatcggtaatgatggcacggataggcatcaggttagtagcgcgtactgcctgttttgccaggaagctggttacatcggtatttgccggagtcaaaggaattggaatatcgttttcttccatcttgtctttttcagcctgagctgcaatcttcgccatagtcttcacagcttctaccggatatttaccatacgcagtttctccactcagcatcaatgcatcggtacgatagtagatggcatttgcaatgtcagtaacctctgcacgagtcggacgcggattgttaatcatggtgtgtaacatctgagtagccacgattaccggtttcttagccaggatacatttcttaatcaagatacgctggatacccggaatacgttcctgcggcacttcgatacccaggtcaccacgagctaccattacgccgtcggctacttccagaatttcatcgatgttatccacaccttcctggttctcaatcttagcgataatcttaatgtcgctgtggtgtgcatccaggatttcacgaatatcaagtacatcctgacgattacggacaaatgaatgcgcaatgaaatcgatgtctttttcaatcgcgtacaaaatattgttgcggtctttttcagtcaaagaaggcaggttgatgcgtacacccggcacattcacactcttgcggcttcccaaagtagcatcattgcgtacttcacagaacaaagtatcttcattcttatcaataaccttcagtgccagttcaccgtcgtccatcaacacatctgctccgactgacaggtcgtgcacaaatcccggatatgtcacagcaatacattcatgagtagtttcctgctccggatttcctacaatacgaactttttcacctgtcttgaagtcaatcgggccttctgcactggccgtagtacgtacttccggacctttggtatccatcagaataccgatacggttagaaacggtacgcacattattaatcaacttttcaaaaccttcacggctggcatgtgcggtattcatacgtaccacgttcatacctgcattaaaaaggtctctgataaaatctacttcgcagcgcaagtccgaaatggacgcaacgatttttgtttgtttaagcatcataataaatatactataatttgttgttgtctaatacaatggattctactgccagacgataagaattcagtccgaatccgcagattactcctaggcatgcacaggaaatcattgatttgtgacgaaactcctcccgccgatgaacattggaaatatgtacctccacgactggagacgtaactgcacggatggcatcctgcaaggctatggacgtgtgagtatacgcaccggcattcagcacaatgccatcatacgaaaagcctgtttcatgaattttatttatcagctctccttccacattcgactggtaatacgcaaactctaccgatggataccactctttcaatttttccaaataactttcaaaagattcggctccataaatggaaggctcccgtttgcccaacaagttgatgttcgggccattgattatttgtattctcatctgtatacttctgctgaattttaataactttgtagaagaatttggcacaaagatacgaaaaagaaatgaaaaaggccgataaaaaaaacataataataaagtataagcaatacctgaaactagaaaagtcgctttcggccaacacggtagaggcctaccttacggatttggacaagctgttcgcctttttggaactggaaaacattcactttacagatgtcactttggaaaatctggaaactttttcagccggattacgtgacattggcattcacccacgttcccaggcccgcatcctgtctggaatacgttcctttttccgttttcttctgcttgaagactacatacagcaagacccgtcagaactattggaatcgccacaaatcggcaaacacctgcccgacgtactgacggtagaagagattgacacccttatcggcagcattgaccggagcacacgggaaggacagcgtaaccgggctattttggaaaccctatacagttgcggactgcgtgtgtccgaattatgtaatcttaaactgtccgacctttacctgaaagagaaatttatcaaagtagaaggtaaaggaagcaagcagcgcctggttcccatttcttcacgtgccatacgcgaactggaactgtactttccagaccgcaacgaaggactgataaagcccggatatgaagattttgtatttatcagccgcttcggaaaaaacatttcacgcatcatggtgttccacatcatcaaagaactggcagaacaaaccggactgaagaaaaccatcagccctcatactttccgccattccttcgctacccatctgctggaaggaggagccaatctgcgcgccatacagtgcatgctagggcatgaaagcataggcactaccgaaatctatacccaccttgaccgcagccgattacggcaggaaatcttggaacatcaccctagaaatcgacttaaaaattagagaaatgcgtttttttaagcttttttcgaacggacctaaaaaaaaaacagataatgattaacacgtaatagagtttttcttatctttgccccaaataatcaaacaataagattattcatttatacaaactaaatatttaacatcatgattaagaagttgtatttgccgttagtggcattgttagtccttgctttctcttcatgtagcaagatgggcgaattatctcctgactacttcactaccaaccctgaagtgttggaagctattggtggtaaggtacctgtaactattacaggaaaattcccggaaaaatacttcaagaaaaacgcaacagttgaagttactccggttttgagatgggaaggtggcgaagctaaaggtcagccagctacattccagggtgaaaaagtacaaggtaacgaccagactatctcttacaagactggtggtacttatacaatgaaagcctctttcgactatgttcctgaaatggctaaatctgaactttacctggatttcaaaattaagaaaggtaaaaaagaatacactatcccttctgtaaagattgctgacggtgtaatcgctacttcagaacttcctactgtaaactctgctaatgctgcttacgctccggatgcattccagcgtatcatcaagcaggctaaagaagctcagatcatgttcttgatccagcaggctaacctccgcgcaagcgaattgaagtctgacagcttgaaagcattccacaaacaagtagtagctgtagctggtgacactaagaactacaaactgaacaacatcgaaatttctgcttacgcttcacctgatggtggtgttgaactgaatactactctggctgaaaaccgtcagaacaacactgaaaaatacatgaaccagcagttaaagaaaggtaagattgaaactgaagtagatgctaaatacactgctcaggactgggacggattccaggaattggtttctaaatctaacatccaggataaagacttgatcttgcgtgttctttctatgtacagcgatccagaacagcgtgaaactgaaatcaagaacatttcttcagtttacaaaactttggctgacgaaatcctgcctcagttgcgtcgtgctcgcttgactgctaactacgatgtaatcggacgtagcgacgaagaaatcaacgctgcattcgatactgacgctaaagtattgagcaacgatgaattgctgtatgctgcaactctgactaacgacaacgctcgtaaagaagctatctataagaaaactgttgaattgtatccgaacgacttccgtgcttacaacaacttgggtatgatggcttatgctaacggtgacttggctactgctgaaaactacttcaaacaggctgcaagcaagaacgctaacgctgctgaagttaacactaaccttggtttgattgaattgactaagggtaacgtagctaacgctgaaacttacttgagcaagtctactggtgctaacacagctaacgaagctttgggtaacttgtacatcaaacaaggtcagtatgaccgcgctgtacaggcattcggtgacactaagaccaactcagctgctttggctcagatcttggctaaagattacaacaaagctaaatctactctgtctgcagtgaagaatccggacgcttacactaactacctgatggcagttgtaggtgctagaactaacaacgctgacttggttaagagcagcatggataaagtaaaacagcaggatgctgctttggctgctaaagctcagaacgaccgcgaatttgcaaaatatgcaaacgaagtaaagtaatctgacttaattacataaaaggaaccggaatcgtgtcaagtgattccggtttttttatgcctttatgggaaagaatcgggagaagatgaaagattataagatgaaaatatgtattttcgcaaaaataaaatacagtttatgaaaaaattatatctgctcctcttatctgtatatctgttgttttgcctggattcatgcagacaaagcgatgaatttgagctcaaaggggaactggaaggtattacttccgacatgattctggtagttttcgacgatcctgagtctaaattggataccatctacccacgagaaggtaagttcacctatactttcactcccgacaccctgaatatattccgtctggtgaacgattccggtgaaacattcccaatatttgcagaaaagggctggaaggtttctataaaaggaagcttggcacatccggaaatcaaaggagaaggggccaacaatgaatatcaggaatttttgcaaagcatagctacgctgaaggattctgcacaagtgtgcaagcaagctgaaagtttcatcaagagccatccagcttcacctgcttcagcttatatcttgcaacggtatttctcacaatcagccaatccgaacttagacctcatcgcccgactggcggaaccgctgactggtaaggtgaaagattgcagagtattgaacgaagttttacaaaagttacccgaaaaagggaaaaacacatcggcctacctaaactacatgtccgtaaagaaaagaaatggagaatatttgtcttggagcagcagtagcacgcaaaaacaatattcactcataaacttctgggcgagctgggataaggaaagtatagaaataaaagattccttgtatactctatgcgagaaattctcaaaaaacaacctccggattgtcaacttttcattggattataacaaggaagaatggcagaaaaatacccggaaagatacggaacaatggattgaggtatgcgactataaaggatggaataatcagattctgaagcaacaaaacgtgcagcgtcttccattcaacatactgatagaccgaaaccggaagattttaggcagcaatctttacggaaaagcattacagaccaagattgaagccttgatagcggaagacaaaaaataaaacacaacttaaaaacgaccttaaatgcttgtcaaactttttggagccgccgtacaaggcattgacgccactatcgtgacaattgaagtcaactgttcacgcggtataaaattttacctggtaggacttccggactctgctgtcaaggagagccacgaacgtatcgtatccgctctgcaagtaaacggatacaaatttcctgcacgacaaatagtagtcaacatggctccagccgatatccggaaagaaggtgcctcgtacgaccttccgctggctatcggtatcttagctgccaatgaaacaatctcctctgaacacttggcagactacctcatcattggggaactaagcctggacggaagtctgcagcccatcaaaggagcactccctatcgccattgcggctcgccaacaaggttttaagggaattattcttccgcaacagaatgcttcggaagccgctgtcgtaaataacctggatgtatatggtgtggaacgcattacagaagtgattgattttctgaacggcacacgaatcttacagcctaccattgtcaacacgcgtgaggaattctacaaacaccaatctatttttccgtttgactttgcagaagtaaagggacaggaaaatgtgaagcgagcactggaagttgcagctgcaggcggacataatgtactgctcatcggtgccccaggcagtggtaagtctatgatggctaaacgccttcccagcattcttcccccgctttcattaggagaaagcctggaaacgaccaaaatacactcagtggccgggaagttaaaaaagggttcttcacttattgctacccgaccgttccgcagtccgcaccacaccatttctcaggtagccatggtgggcggaggagctacgcctcaacccggagaaatcagtctggcacataatggagtgctgtttcttgatgaacttccagaatttagtagaagtgtactagaagtgcttcgccaacctcttgaagaccatcgtatcactatttcaagagcaaagtacagtctggaatatccggccaatttccagttaatcgcatcgatgaacccttgcccatgtggatactacaatcatcccacacgaaactgtgtatgtagtccgggacaagtacaacgataccttaacaagatttccggtcccttactcgaccgcattgacatccaaattgagattgtgcccgttccctttgaagaaatctccaagatcaccccgggagaaagcagtgcctgcatccgcgaacgtgtaatccgtgcccgacagatacaagcccagcgttttgcaaacgaaccgggaatctacagcaacgcccaaatgacacccaaactgctgcatctctacgcacagccggatgctgccggactggaactgttaagaaatgccatgaaccggctgaatctttcagcccgtgcctacgaccgcatactgaaggtttcacgtaccattgccgatttggaaggaagtaatgagatacgtccagcacatttggcagaggctatcagctatcgcaatctggacagagaaaactgggccggataattatctatccagcccagacaatcaaaataaatatttaacaggtatcaaccggactattccgttcaacccggaaggaagtgtttcccaatgtccgtaagtacctttctcgtaattcagcttagccatattgatgtcctcaaaaatgcgccattgcttaccctgacggtccatctcagcaatactatttgccggaaggttggtgacttccacttctatgagattcttaccagactttagcaattgccctatgcttaaacggaagagagcagcccaggctataccagcttcttgcccatttatacgcacacgtgcactctcacgcacgtcacccaggtccaaaacccagtcatccgccgataattcaggcaaatccaactccaatgaatacaatgcagtaccccggttaatcttcgcagccggatgtgcaacctctgtccatgaagaaggcgtatctattttaaactccccttcaatagccggatagctttccacgaatctcagtttccaaccatgatccaaactcaaactatagtccatttccttcctatatttccattcaggctctccttgcaaggaacgagtaaaagtttgaagaatgatactctctcccgacttcaattgcatatatacttgagtttttccttccacctcgcgcgtttttgcaattccccgtttacccgtcatcgggtcaaaacacatgatatgtttttcaggcacattcaatgttacccatccttccacatcgttagcctgtaagtcggaaataaaataatgatgtccttccgtatgtgtacgccggataaactgtaccccccaacgtgtcttcagttcttctgccggaactcccgtacgctctaatgtctcatggtaatcacttcccacgatgatacgccctttcccaaaattaaaagcctgtgtgcctcggaaagacttttctcctggcaactgttccagcaatgcaaatagttgctcccgattctgtttcaatgaagcatatccaggcacatcttccggataatgttccacaaatactacagttgccccctgacgtgccaatgcgaccaacttctttaaggtagaaactggaatcaattttactgcaggtacgatgagtgctttataacaagcacctccacgtgtcttcagcataccatcctgacacgatgtacttttaataaaagaatcagaaatatagtctacatcatagccacctgccataatggtttgtatcgtcttgataaacttcggcgcatactgatccatcttgtgaatatcaaagccaacaaaacgtcctggaatgtcattccacatatcataaaccggaagataaaccaggaagtcattatcaggcttacctaattgaagaaaagactgacaacgagttatatactcaaagaaagccggcgcgtcacgccatatcgtattggtgggcgacatgtttatcgtagcataaaatagccaaccaggccaggctgcttctttcggagaatagggggtaccatgaaaaaatgcatgattaacacccgacacaaacatcaaatccatatcaggcttacactgtgagagggaagtacgaaaatgctccgtcaaccaggtgaatgtttcagaagaagtgtaaggttttcccgcaatatgtgcagccgaagaagcatatttcagcatggaaatatctgaaaaattaggacgtgtaagcgaatcacgcctcaatctcctaatatgaaaatcagtcaacccaaacccttcgcactccggaatatccgccgaagcatacgtatcaatcagattggcaggagatccatgtgcctgattacgggtcgtacttccatgcccatgcgcccatttggtccatgcagtcgtaaagttctcaaccagaagttctcccaatgtttccctataatcagacactagacgacgtgtcagttcagttcgttcctgtgagataaactccggaaaatgattctctagccgataaccacgacgtgcggcaaattctttcaagaaagcaggagtccaatcggctccgtacacctcatacgaatcattgaagaaggtacggggaaagttgaccttgtttgtcttgaaagccttatcaaacttctcaaagtaagattttacggccaccggactaaaatgatccataacatacccttctcccccgggagccgcacgctttactttctgaaaagtccgtcccacaaacaatgccaccagcttccagtctcctgtcggagcatcccactgtaaatatccgtctttaactttcctggtcagattcaccacttttccgtctgccccataagccatcagacaatccaggtaagccacatcccgctgtttctcttctttagtatcacgaatatcgatttccaactttaccgattcacctccctttacctcataacattcaaaaatagcttttgctgctgcttgtgagagagatacctcggggcctccgaaaggccatcctgttccggtattcatatcaatgtctatcccgttcatcttacccacctcctgcgtataacggaacatttccatccattcgggtgacagaaagcggatattatgagattcatttccctttaccccataaataggcgtaacctccagacttcccagcccggctttcccatattccttcaggttataattcagattatctttatcgacggcacttcctaaccaccaccagcggctgccgggacgtgcttcaggtctcacctccggccagttttgtgcagccgcccccatcgcagagcacaaaagaaataataagatgctgttctttttcatggaattacaaattaggtttcatacttgcaaagataaaagttatacagcccttacaactataggaatgtacagattcatggatttttgtacgcctgatacacaatcttccgagcaagatgtacattattccattcattcatttcatgaaggtgcgtatctttgtagaaaacaaatcaataaacacggatatgaaaaacaactttatcagactgaccctacttgccagccttttctgcaacgtgcctggcttgcatttgcaagcgcaagccccacatccggaacgaatttatctttcaggaaccggtattgacaataccgtgacatgggactttctctgctcaaaaggacaaaacagcggcaaatggaaaaagatagaagttccctgcaactgggaactgcaaggatttggagaatatacttacggacgatggtataccatcaaaggtgccaaaccaagtgatgaaacaggtatttatcgccacaaattcgaggctcccaaatcatggagcggccagcgggtaaaaatttattttgacggagtcatgaccgatacggaagtcttaatcaacggcaaactggccggagaaatgcatcagggcggattcaaccgtttttgttatgacatcaccgacttactcaccctcggaaagaaaaatacacttgaagtaaaagtcgctaaggaatctgctaattcatccatcaacgccgcagaacgtaaagctgactggtggctttatggaggaatttatcgtccggtatggctggaagttgttccacaggtacacattgaacactttgtacttaatgccgaccagcatggcaaatttcaagcttcatgtgaaatgtatggcgatgcgaaaggatatgaacttcacgtatcggtacgaggcctgaaagacggaaagactgccctgacaaatacgggacaatctgcactttccaagaaaattacagattccggcaaggaacaacagatagaaggacaatgggcagacattcaaacctggtccacagaagatcctaacctgtatgtagctcgtctggagttgaaatcaccggaaggaaaggtgattcagacacgtgaaaccagaatcggcttccgtaccgtcgagtttttcccacaagacggagtatatctgaacggaaccaaactcgtcgtaaaaggtattaaccgccattcattctccgtagacggaggaagagccaccagtgcagccatgagtcgtcaggacgcacttctcatcaaggaaatgaacatgaacgcggtaagatcgcactatgcccccgacgaacatttcctggatatgtgcgattcactgggtatcgtatacatggatgaactggcaggatggcagaattgctacgacgaaaaagtgggtagcaaactggtgaaagagatggtacagcgcgatgtcaatcatccgtccatcatcatctggagtaatggaaatgaaggaggatggaattatcaactggataaactatttgctcaatacgacaagcttcaaaaacggcatgtagtccacccatgggccgactttaacgacctggatacgcaccattatccggcttatctgacaggagtagcccgatttaccaatggctataaggtctttatgcctacagaattcatgcatgccatgtacgaccaaggaggaggtgccggattacgggatttctgggatcgctggaatacgaacccgttatttgccggaggatttatctgggtattctgcgatgaagctcccaaacggagtgacaaaggaggtattctggattctgacaaatcgaatgcacctgatggagtagttggtcctcgccgtgaaaaagaaggcagcttctatgccatccgtgcccaatggtcacccatccagctgaaaccactactcatcacctctcattttaacggtaatttcctggttaccaacgaatatacttacacgaatctgaaggaatgcaaaatgacatacaaagtattgtcatgtgacactccattgaaaggtgtaacacaatccattgaattaagccacggagaagttactctccctgctatccagccaggagaaaccggcacagcccatttcgaccttccggacaacttccatgaaggtgatgtactggaactggaagctttcgataaaaatggacatagcatctgcaactggagctaccccatccgcctggtaaaacaatattttgaccataagatggcacaatcacccatgaccctggaagcacttcccaaagctaccgcctcacgcaatgccagccacatcgtactgaacagtgcgaaggtaagtgtaacgtttgatgccactaccggtatcatcaagcaagtaaaagcaggagaaacagaggttccgttcaaggacggtccggtagctgtaggaatgaaaatgcgctatgagccttcactcagttacgtgcgtgagacacaagaagaagctatattctgtgccaaatataaaggagcagccgactccattgtctggcgtctgaccgatcaaggactgctttatatggatgccatcctactgaaccgcgcatccggaggaggaggatttgacgatgcctttatggataccaaggtatacaacctcggattgaccttctcttacccggaagcaaactgtaccggcatgaaatggctgggacgtggtccctatcgtgtatggaagaaccgtatccctggtaccaactataacatctggcataaagattacaacaataccattacaggagaaagttttgaaaatctgatttatccagaatttaaaggatatcatgcccacatgtactgggctacactggaaagcgacaaaacaccgtttactgtttattcaagaaacgatggaatcttctatcacatctttacgccggaagaacccgtaggacgtgtcagaagaactatgccgcaattccctgagggtgatatatctttcttgcttgacataccggctatttgctccttcaaacccatcgagcaacaaggccccaacagccaacctggaaatatccgcattaaacaaggggatgaaggattacatttgaacctgatgttcgacttccgcccgtctgccaatatcaatacctcaagatagaacaaacacactgtaacaaagagccgtcttgcattgcgaggcggcttttttacttttatacaaaaatcacggttttccgtgtttcccttcctcataagacagactatatttggccctaaaggaatagaaaacacaggaaagatggaaatgacagaaatacaacgatacaaaatagccttagaacgtcttaagcaactttccgacataagattggggaaacctctgcttattcaaaccttaatgggaaacctgcgtgtcctacactccaaccacatcggttatttcaaatacatctcaaccaaaaagagttgggagatagcattaaccgacggctcctttgtccggctaaaagaaaacctgcgcgcgaaaaatttatgtgcatataatgaccgatttatacaaatccatcaatcctatatcatcaacatacagtatctgtgcatgatacaaaacaaccactgcatcatgtatcctccttttcatcatatcaatgaactctgtatctcacaaaaatacaaaagggaactgaccgcctatttctaccaattctgaagcggataacccagctcacaatgtcatatcattcaatcatttcagtcaaaatccaagatattttcctctgaaatttgtatattccacaaaaaggaattattttgtcaaaatcacaaaaatacattacatgaaaaagcatatccttttacttggcatcttcttgagccttacagttttcctgtcagtacaagcaggaaatacggtaatcgacagtctaaaacaggaaatacgacaagccgaacgagaaccctcttccaaagaaaaattaattgaattatatcaattcctgggtgcagaatatgaaactctggaccacgattcatcctaccattatatacaaaagggactctctctttacccgcaacctgcctttgaggaagaaggctacctgcaactgctcaactcattggccaactatcttttcatggagggaaagttagaacaagccaaagaaacattcaagacagtagccgcacatgcccccaagctcaaagaacgaagatacgatctggaaggagtcgtagaatcttccattggcgtttgctaccgtaaattaggcatgttcgattcagccgtatatcactataatcgcgcgctcgatttctgtaagaaaacagaaaaatacgaagacatcgcctccacttattacaatattggcgtactttaccatctcaacaaacgctatgaagaggccttggaacaaggaaagttagcggcagactatgcccgaaaggcaaaagacacattaatggaattatatgccaacacgcttatcggcggatgctattgcaacatggggaaatatgcagaagccagtcagattctaaaaagaaatgtccaaaaagcattagagatagaatatcccctacttgccatgagttctctaagccccttactaagtacctaccaattgtggaataaaaaagattctgtcagaatttttctgaaaaaaggagaagaactgatccatcagattccggaaaacagtccgacagcacttgaattttatggcactcaagccagcctgtacaactggattggagaatttcagaaaagtctcgatatcctgacaaacaagtcgttgattcaaacgcaacttccatacgacaagtatcatattttgatggcacgtaattacgaagggctgggcaactatcagaaagcattccactgcatgcaggaagcatgtatttataaagattccgttttcgatggaaaaataaaaaatgagctgtcggagctgaatgaaaaattaagaaatagcgacaaggaattgaagattgctcttctggaaagaaatcaggcacaagagaaagaaacccgcctgcgccataccgtctactaccttacggttatcggactgcttttaattgccatctccatcctgctgcataaacggaaagtacagaagaaagagaccgaactgatagctgcacgtcagtacattgaaggcctggaaaatgaacgtaaacggcttgccaaggatttacacgatggagtttgcaacgacctgttaggagccatactccaaatacagcagcatatttcttccgaagaacaaaagacaactaccattcagacgctggaagaaatacgcaatggcgtaagagccatctcgcacgaattgatgccacctaatttccagtttactgatttgaacgaaatgctggccgactattttgcgaaaatgcaggaagtatcaggagtgaacatatcctatgctccccacgcccacacagactggaccactattccggaacacataggatatgaaatctaccgcatcatgcaggaaaccatcggaaacatcttaaaacatactcaggcaaagcagattcacattcaactaaaaaaagaagacacccaacttgtcattcacctgcattatgacggagactggaatccgcatgccgattcatccaaaggaatcggcctacgtaccatcaacgaccgattaaaaaccattggagggaattacaagatagaaaaagacgatacaggagtaaatatccatattcatacatttcttcattgaaaaaatcacggttttcagtgaaaatcttctcgatgaatctttttttctttgcagtataaaaatgcgacaaaatgacaagtcaaaaagccaaaatactattagtcgatgaccataccctcatactgcaaggcatcaagcatgtggtttcccaaatgcctgaaatagaaaaggtatataccgcctcatcgggcgctgaagcgatgctcctgatagacatgcagccatttgacatttatctgcttgatgtggaacttccggataccaacggatttgaactgatagacaagattctgcaaaaacatccggaagcacgcatcttggttaataccatgcacgaagaaatatggatactcaaaaggcttaccaaagcatccatcagcggagctatactaaagtcggcagatattaacgaactgacactggccatccagactattttgaaaggaggacaatatctttgtaaacggttcaaaacgattttaaaccggatgcaaacagaggaacaaatcaaggaacagctcacgctaagagagatggaagtattgcaagccattgccaaaggattcaacacaagagagattgcagatttacttcatgtttccaacaatacgattgaaacacaccggaaaagtctcatgagtaaactggaagcaagaaatgcggtagatcttgttctaaaagccattaaccttggaataatcccactggattcgaaataaaaatccacccgtttttagggctcatattctttttttcgtatatttgagcgcaatgaatctttgtatcaccttaatataaacgaactatgagtctcgaaaaaacattagtgattctaaaaccaagtaccgtacaacgcggacttattggagaaataacccatagatttgaacgtaaaggcttgcgcttggcgggcatgaaaatgatgcagcttaccgaagacctgctcaatgaacattatgcacacctggccgggaaaccgttcttttctcgtgtaaaagcatccatgatggcctgcccggttatcgtatgctgttatgaaggagtcgatgccattcaggtggtacgttccatgacaggagctaccaatggtcgtgtagcagttccggggactattcgaggtgactattgtgtaagttcacaggaaaacatcatccacacctccgattcacccaaaacggctatcgaagaaatagaacgattcttcaagcctgaagaactgtttgaatacgaaagagctgttatcgactttgtttactatccggatgaatataaactaacataattttaaaaagctggcagaaaattgctctgccagcttttttctattttaaacgtacaccatttactaccacattccgaagttgcagtccatgaatgtatcccttttggatagtccccgatttgcgtgccgtaatttcgagattctcaaacagaaaatccgacagtttatactgtgtctcgtccttcttgactgcaaaaagtacatcacagtccaaccgaatatcacgcatggtaacatggcttgaataagaaaaaggaatatcttttctatctttcaaatcaaaaaattgtgtccaaggctgggcaaacaagaaattgaccacagagcctgtaatattctccagtcggatatactcataattttgcggtgtatccggacgcattttcaaccaaagcaaacgctgggcatgttccaccgtacaacgccgcaccagaacattacggttatgaatggattcacttccgcaagtcaatgcactgtggcagcccccccatacacaatcttctatgattatgttcaagttgctcccgttatttaccttatcctgatctgcccaaggtccttttccgcctttcaaagctattgcatcgtcattcaccgacatataacaccctttcaccagtacattcttacagacatcaatatcaatagcatcactgctcggtgcttttaccggtgaacggggagcaaaaatggaaagattcagcaactttacattctcacaccggtataaatgggttgtccagaagggagaattctccaatctgactccagacaactgtacgtcttttgaatctgcaatatataccagtcgcggacgtaattcctccagattcgtacattgaggattgacctgccgacgcaaccagaaagatttccagaaacgaagtccgttcccgtttatctttccttctcccgaaagtgtaaatccgtccacccctatggcattgaccagggccgcgaaatatttcaagttctgcccctccaggcgtgtatcaatcacatcaaaatgactgatgtcatcactacctttcaacacagctcctttttccagataaaggtgggtgcgaggtttgaaaaaaagtgatcctgataaaaacgtaccttgtggtatacaaattactccgcctccttcttgagctgccttgtcaatgactgcctgaatctgttccgtctgtaacagtgtgctgtcattctgcactccataatccgtaatacggtaaattccgcccaactcctttaccggggtcacccggctgtctgcaaaccaatccggtattggagtaccgtcaggaaacttttcctgagcaaatacacttccagccagccacaaaaaacaacatagaaacaaatacttgatagaatattccctcatttttcaaatacttttaaatcaaaaccatacggaaagcaaaataggaaactttttcgacaaaaggaaatagaaaatcatgcaataacatgtctttttgtacaaaacttcacttgtattctttaatacttggagataactcctgaaatcatataacagcggcaattcttatgtacacctttatacaaaagaaagaatgacttgacaaattctctgtttcacactgtgggatacaaaaaccacagtgtgggatacatatttcacactgtgaaatacatatcccgcagtatgaaacagagaaatgtccgggagatttctgaaaatataaaccttacttcagcacttaacaaagagcattagcatgttttagaggaacagttactacatcaagtgaagaaatttgaatgattttcaatgtatttgcatgattttccatgtgcagatgttagtatatccgctacatttgcaattataaattttaaaccaataccttatttgatatgcgaaaaattcttgttgtattattgcttacaataagtgcaggatttactacttcttctgcacaaaaactaccaccacaaaaagaaacgctcgatgtggtaatgaaagtaaacaaatatttcatggagaaatatgccgattatcggactcccagtttcgttcgtaatgttacccgccccagcaatatctggactcgaggagtgtactatgaaggattaatggctctatattccatctatcctcgtgcagaattctacgattatgcatacaactgggctgaataccacgaatggggaatgcgaaatggcaacaccacacgcaatgccgacgactattgctgcggacaaacctatatcgacctatataacatttgccccaaacctgaaatgctgaagaacatcaagtcgaacatgaatatgctggtcaatacaccgcaggtaggcgactggacatgggtagatgctattcagatgggaatgcccgtactggccaaaatgggacacctcacgggagaacaaaaatatttcgacaagatgtgggatatgtacgagttctcacgcaatcaactcgcaggaaaaggaatgttcaatctggctgacggtctctggtggagagacgctgatttcttgcctccatacaaagagcccaatggagaagactgctactggagccggggaaacggatgggcctacgctgcactggtacgcgtacttgacgaaattccagccaatgaaaaacatcgccaagactacatcaacgatttcctgattatgagcaaagcattaaaaaaatgccagcgtacagacggattctggaatgtaagtcttcatgatgccggaaattacggaggaaaagaaactacaggtactgccctgtttgtctacggaatggcatggggagtacgaaacgaattactggataaagaagaatatttacctgttttattaaaaggatggaatgccatggtaaaggaggcagtccaccccaacggtttcctgggttacgtacaaggtaccgggaaagagcctaaagatggtcagccagtcacatacgaaagtgttccggactttgaagactatggagtgggatgcttcctactggctggtacggaagtctacaaactacaatgataagaataagcacaataggtagaaacgttttgcttctttccgtaaaaagaaatgggtgtgcctttcgcacacccatattttatttgcttaatgcccgggagcgttctcccaaataaccgccatgatggcgcttgctgtattcttcaatcgtaaaaccagtcttacgcatggtctccaccaccagaatatctccaataaccgtcatcacagtggtagaagtcgtaggagtcattcccagcaaacaaacttcatcggggtgtcctgtagccagacaaatatcagctgcttccgccagcggactatccggatttcccgtaatgacaatctttttcaattccggatttagacgtgcagccagctcagtcagttccacaatctctcttgtcttacctgaattggaaatcaagagtaacaagtcatttttttgcagaatacctaaatcaccatgctgcgcctcactgggatgcaaaaacacagaagggattcctgtagaacagaatgtagtggcaatgttcatggctatctgtccagccttacccataccgctggttaccagctttccgcctttctcatgcacctgttccacaatcaggtttaccgctttctcatatccgtctgttaccggaatgttcaacacggcctgtgcttcacgctgtaataaatcttttattgatgaattcataagattatgattaaattataattttattccaataagcgggtcagttcttccaatgtattcgccacttcaaaataatttttcaacggacggtgtacaaaatgcgtttcctccagccggttcaaaaaagccagcaggtcattccagaaaccttccacattataaaagatgacttttttctgatgatagcctatactacatgcagccatcacatgaaatacctcgtccagtgtacctattccacccggcaaggctaccatcacgtccgattcctgcaacataatatctttccggtcgctcaaattcacagaatggaatgtcacgtcaagcaaatcgctgactcttccgtgttcctccagctttgtgggaacaactcccataatcattgccccgttctctgtcgcacttcttgccagggcttccatcagtccggtattggaaccaccgtaaaccagccacttacgatgctgccccagccatgcgcccagttcccgggctttctccataaatacaggttctatcgcatctgaggccgaacaaaagactgcaattttattcatatattagttttaaatatcacacactgcaaatatctgcattttttgaagaaaggcaataggtatttattgtaaatttgcagcgaaaaagaaattatacttctcaatatatggcgtattcaacttttaccctccctaacggcttacgacttattcataccaccagtcctacaaacgtggcttattgtggctttgccatcgatgccggaacgcgcgatgagcttccacaagaacagggtatggcccattttgtagagcacctaatttttaagggcacagaaaagcgaaaagcctggcacattctcaatcgtatggaaaatgtaggaggcgatttgaatgcctataccaacaaggaagaaaccgtcatttacagcgcttttctgaaagagcatttcaaccgggcagcagaactactggctgacattgtcttccatagtgtatttccacagaatgaaatcgagaaagaagtggaagtcatcatcgacgaaatccaaagctatgaagacagtccgtcggaacttatttttgacgactttgaagaactgattttccccaaccacccattaggccgaaacatacttggcaatccggaactgctgcgtcagtttacaagtgaggatgcacggaaattcgtacattcacattaccgaccggaaaacatgatatttttcgttcaaggagatattccctttcagaaagtcatccgtacgcttgagaaagtaacctcggatattccccaatttgaagagggaagcaaaacgcgcaagctaccgtctgaatacaaacccagcaaactgattctccacaaggatacccatcaggcacatgtcatgattggcggaagaggataccacgcttacgacgagaagcgtaccggactctatctgctcaacaatattctgggaggccctggtatgaacagccggctcaacatctctttacgtgaaaaaagaggtttggtttacaacgtagaatccaatctgacatcctatacggatacgggtacattctgtatctatttcggctgtgacctgcacgatgccgaccactgtatctcactggtgcataaagaactaaagaaaatccgtgagaatgccctgactgaattgcaactagctgcggcaaagaaacaaatcatcggacaaataggggtggtcggagacaattttgagaacaatgcgctcaacatgggaaaatgctttctgcactatcatacttacgaagaaaaagaagaagtcttcaagcggatagaaagcctcacctctagccaactccttgacatagccaatgaaatgtttgccgaagactatctttctaccctgatttatcagtaaatttataccggatagtacactttttccgccacttagtagcaggatacagacatatactcttaaagctcagtttttgtcttttcatacattttcaaaacttcctaattttcgagaaaaaataggggaactatgaaaaagaatgaaatcattaaagacaggttggaagaatgggtagaaagtaaaggattcttaaactccaggtttaccatcatagaattatgtaaaattataggaataaaccggacttatctttcgaactatattaacaacacatacggcttaaacttcaacttatggatcaatcacctgcgcatcgaagaagccaagcaattgatgggccaaacccctaaacgaagtttatcggaaatagccgaacgaataggattcacagatctggctcacttcagcaaacaattcaaactccaggaaggagtctctccgtctgaatggagaaagaatatgtaataatacgcaacagaacggcaggaaaagcgtaaaaatcactatctttgtacgcttaagataggataattacataaactatatacacatgaaaatagaagataaactgaccgaatctatcctgaacggtataaagaccttatacaatcaggaagttcctgccaaaatggttcaacttcagaaaacgaaaaaagaatttgaaggccacctgacactggttgtctttccttttctgaaaatgtctaagaaaggtccggaacagactgcacaagaaatcggggaatacttgaaacagaatgaaccggccatcgcaaattataatgtaatcaaaggtttcctgaacctgaccattgcatctgacgtatggattgaactgctgaaccgcatccatgccgataaccagtggggcatacaaaaagctgacgacaatgcgccacttgtcatgattgaatattcttctcctaataccaataaaccgcttcacctgggtcacgtgcgtaacaacctgctgggaagtgcactggctaacatcatggcagccaacggcaacaaggtggtgaaaaccaacatcgtaaatgaccgtggtattcacatctgtaagtctatgctggcctggttgaaatatggtaacggtgaaactcctgaatcatcgggcaagaaaggtgaccacctgattggtgactactacgtagctttcgacaagcactacaaagctgaagtaaaagagctcatggctcaatatcaggctgaaggtatgaacgaagaagaagcaaaggcaaaagctgaagcaaactctccgttgatgctggaagcacgcgaaatgcttcgcaaatgggaagctaatgacccggaagtacgtgccctctggaagaagatgaatgactgggtatatgcaggtttcgatgaaacttacaagatgatgggagtaagcttcgacaagatatactacgaatcacagacttaccttgaaggaaaggaaaaagtaatggaaggtctggaaaaaggactgttctatcgcaaggaagacggttctgtatgggccgacctgactccggaaggtttggatcacaaattgctgctccgtggtgacggtacttctgtatacatgacacaggacatcggtactgccaagctgcgcttccaggattatcctatcaacaagatgatttatgtggtaggtaacgaacagaactaccacttccaggtattgtctatcctactcgacaagctgggcttcgaatggggtaaagaccttgtacacttctcttacggtatggtggaactgccagaaggtaagatgaagagccgcgaaggtacagtagtagatgccgacgacctgatggaggccatgattgaaactgccaaggaaaccagcaacgaactgggtaaactggacggactgactcagaaagaggcagacgacatcgcacgcatcgtaggtctgggtgccttgaaatatttcatcctgaaagtagatgcccgcaagaacatgaccttcaacccgaaagagtctatcgacttcaacggaaacaccggtccgttcatccaatatacatacgcacgtatccagtctattctgcgcaaggcaacagaagccggactcagcatcccggctgtcatcccaagcggtattgaactgagtacgaaagaagaaggtctgattcaaatgctggccgactttaccaacgtagtgaaacaggctggaacagattacaacccatctatcctggcaaactatgcttacgacctggtaaaagaatacaaccagttctatcatgacttcagcatcctgcgtgaagaaaatgaagccctgaaaatattccgtctcgctttgagccagaatgtaggcaaagtagtcaaactggctatgggcttgctgggtatcgaagtacctgaacgtatgtaattacaatcttgtatatcaggtggctggcaaaggagtggaccacactccttttgcacagccactttctttttaaagaccatcttatggctaaacaaaaattctacgtggtctggaaaggagtgaatccgggtatctattcttcatggaccgactgccaactgcaaatacaaggctataaaggggctatatataagtcttttgactcacaggaagaggcagaacatgcctttgcgactcctgcttatcagtacatgaaccgccaccgtgcatcgtcctcagaaaaaaccgaggtacaactccccgagaacttcaacttgaactgcctggcagtagatgctgcctgtagcggtaaccccgggcccatggaatatcgcggagtgtacctgctgacaggacaggaaatcttccatttcggaccggtttacggaaccaacaatatcggagaattcctggccatcgttcacggactggcacttcttaaacaaaagaacctgaacatgcccatctattccgacagccgtaatgccctctcctgggtgaagcaaaaaaaatgcaagaccaaactggaacgtactgaaaaaacagaagcgctcttccagttaattgaacgggctgaaaaatggctgaaagaaaatacttataccactcccctgctcaagtgggagactgacgtatggggagaagtccccgctgacttcggacgtaaataatcaaaaactcaaacagatgaaaaagagacttacatatctgggatgctttttcgccagcatactggggtatttcctgcttcagaaacctgtgttcatgctttataacggtgcatgtgagaaaggaaccgctttcacagactacctccgggtattgttccatggctttacgcttgatgctgctaccaccggctacctgacggctattccctggctggttattctctgtagtatatggttccgccgttttcctctgaagaagatacttatcggctactacgtcttaatcagtctggctaccacacttatcttcattggcgatatggccctctatccgttctggggatttaaactggacgcttccatcttcctctatctggactcaccaaagaatgccatggccagcgtatccttgggatttattctgatacgactgctgtgcatcctcatcttatcagccttagtaacatgggggctgtacaaaattaccccagccaatctgccacaagtccagaagcgcattgctggtagtctgataaccattcttttaggaggtgtcatcttcatcatcatacgaggaggtgtaaccgaatccaccagcaacgtaggacaggcctatttctgcaatgatgaatttctgaatcattctgccattaacccggatttcagcctactatcctccatcagtaagacaaccgattttgcccagcaatttaatttcttcgatgaagaaaaacgggccgacttatttgaaggattgtatgcagacacgggagaaaatgaagtttcattactcactaccaaccgtcccaatgtactgataattctcatggaaggttttggaggagtattcgtagaatcattaggaggagtacctgatgtcagtccgaatctggagcgtctgagcaaggaaggagttttctttaccaactgctacgccaacagtttccgcaccgaccgaggcacagtctgtaccttcagcggttaccagagcttccccactgtttccgtcatgaaatctccggctaaaagccgtaccttgccttcgattgccgaaaaactgcgggaacaaggttacgccacggatttcctgtatggaggtgacatcaacttcaccaacatgaaaagttacttactgggcagtggataccagcatctgacagcagacgtggatttcagcatggaagaacgaaaaaatccatggggagtaaacgatgatattacttttgagtacctctaccgtcaaataaaagaacggaataccaaccagccctggcatacagctttccttaccctgagcagccatgagccgtttgaagtaccttatcatcgtctgaaagaaaagattcccaatacctttgcctttactgatgattgcttggggaaatttatcgataagctcaaggctcttcctcaatggaaaaacctgcttgtcatctgcctgccagaccatggcttctattatccagaagaaggactggtgcacgacccgcgtatccatcatattccgatgctgtggttaggaggcgccatcaagcagcctatggtcattgacaaactgatgaaccaaagtgatatggccgctaccctactggcacaattgggaatcagccacaaggaatttaactttagtcgtaacgtgttaggaaaggactacaactatccgtttgcttactacacctataacaacggatttgctttccgcgacagcaccggtactacactgattgataacaattccggcaaggcattaatagaatccccagctccgaacgaacgacgcacagaactggggaaagcgattctacaatcttcttatgacgatttgggggcgcgataaatttttactccacaaacatcactttcgatgcatcacgcggtttagcagccggtgattcatccggatatccgaaggctatgcaatacaacaattcatagccttcgggtatattcaggcgtttcagatagtctgctacctgaggctctgtcttcataaagcgtatagggcttcccaaacagcaggaaccgatacccattgaccaggccgaaagaatcatattttctcccagcagtccacagtctatctgcgacatatcatacgaggtatcattggcaataaatactaccgtaggcgcattgcggaacatattcttgaatcccggatcttctgccattttgggattcaacttcttatacacttccgtaataccattaataaactccggattgtctaccacgcgtactgcccacgactgcttattctgtccattgggtgcatgaataccacagtccagaatcatctgcattgtatcacggtttaccggctgcggcagatattttcgcacactccgtcgcgtcatgatagtttcaatcacctgattcttagccgaagacttatcaaccgcaggggtctgttccgtctgcgtctgtccaccacagctggagaggcacaataaccctgctcctaacattgaataaattacttttttcataaactcttattttcacctagttatttcacccttaattcggcaaatcccatcggttcgcccgcacgaatcatacgcgtagccttcaactctatataacgggcttttaccggagtaaagaataccgactgcatcaccggattattctgtatatttgagaactcacccgatttgaccagttgattcactgcatccttgcttgtgccaacccgtatctcgtaattggcaatcaagcctttgttgggttcaccctgatcaggcaagaaatgaagagaagaaactagtcgctcttcctgtaaatcaatcaacaaacggtcaccttctacaaaacaagtggtctgcgcctgcttgtcagaagcctttgcagtctcttctgcttttacatccggcaaaaggtaaggtacagattcaatgtcttccaccttctctacaaaggaatcagaaacatttcctgcatcatacactcctacgttactcaaacaaagcggaccacgtgcatccgtaatccgaatacgtataccctttgtttccaccgtttcaaaacgtagcagacgtttgtatccaatggtagtagtttcttcattcagtttcaccggaagccatgtatccttgtcgaggtattccaccacaaatgcttttacacgctgccccaatggaatatattcctgaagcatcatacggttcattcgagtaggcgtatcaaacgagaactcaatatcagctgtagttaccccgtcttctgtagcccagtaagtatcaaaattatcatcggtcaaagctgatgccacaaaatctcctccacgttcatttgaaaccttaggcgtcattcctgccaccaaattcgtcttcagctgctgctgaatcatttcatggaaacgaaccgcattagcagaatctaccggatgaatcaatcctctccggtcaaccgggaagttcaacaacaaagtggcattatgccccacactgcggtaatacaaatccaccagctgatccggactttttactctgtcatcttcctccggatgatagaaccatcccggacggatagacacatcacactctgcaggcacccactgatttccatccggatgtccatactgcaattcatagctcttatcatatcccggatgcacctctccctttcgcaggaatgaccagttggtagccccggcaaaacctttctcattacctacccaacggcaaccaggtcctccatccgagaaaatgatggcctgaggctgaatactatccagcatttcataaatacgaggataattataatagttcttgcgatcgatggtacgtatgtccttggcaccgccataccatccgtcaccaccattcgctccgtcaaaccatacttcaaataccggtccatagtttgtcagcaggtcatgtaactgtgcataaaagtaaggcaaatactcaggtgtaccataattagcctgatggcgatcccatggcgaaagataaacggcaaacttaagaccatatttcttacaagcctccgacaattctttcaccacatttccctgtccgtttttccacggagagtttttcacactatagtctgtaccttcaaacggccacaaacagaatccgtcatgatgtttggcagtaagaatcactcctttcataccagctttcaccagcgtctgtgcccattgctcacaatccagattcgtcggattaaacgttttcggatccgtatctccatatccccattcccggtcattaaacgtgttcaaaccgaaatggataaaagcatacgtttccatctgctgccattccacctgcttgggttcaggtacaggaagaatcggttcaggcggaagcaccttgccggatgtacacgacaagcaacaagctacaactggaatagatagaagatgaatagactttttcataattaattagatttacgaattaaaactacgaccaaagatacaaaaaaagcggcttcccgaaggaaaccgctttcatatttaagattttgtaagtctgaattacaatttcggaccagcagcaaccaaagccttaccagcttcgttacctgtaaacttagcgaagttcttgatgaaacgtccagccaagtcttcagctttcttagtccattcagcagcatcagcgtaagtgtcacgcggatccaagattttcggatcaacacccggcaattctgtcggaacaacgaaatcgaagtaaggaatagtcttagtaggagctttttcgatagaaccatccaagatagcgtcgatgataccacgagtatcacggatagaaatacgtttgccagttccgttccaaccagtgttaaccaagtatgcttttgcaccagtcatttccatcttcttaaccagttcttctgcatatttagtaggatgcaagctcaagaaagcagcaccgaagcaagcagagaatgtcggagtcggttcagtgataccacgttctgtaccagccaacttagcagtaaatccagacaagaagtagtactgagcctgtgcaggattcaagatagatactggaggcaatacaccgaatgcatcagctgacaagaagataacttgtttagcgtgaggacccttagagataggtttcacgatgttttcgatatggtggataggataagaaacacgagtgttttcagttacgctcttatcagcgaagtcaatcttaccgttagcatctactgttacgttttccaacagagcgtcacgtttgattgcgttgtagatatctggttcagattctttatccaggttgataaccttagcgtagcaaccaccttcgtagttgaatacaccttcgttatcccatccgtgttcgtcatcaccaatcaacttacgtttcgggtctgtagacaaagtagtcttaccagtaccagacaaaccgaagaagatagctgattcagtttcttccatgttagtgttagcagaacagtgcatagaagcgataccacgcaacgggttgaagtagttcatcatagagaacatacctttcttcatttcaccaccgtaccaagtgttcaggataacctgttctttagtagtcaagttgaacacaactgcagtttctgagttcagacccagttctttgtagttttcaactttagccttagaagcgttgtaaacaacgaaatcaggttcgaagttttccaactgttctttagacggacggatgaacatgttagttacgaagtgagcctgccatgcaacttccatgatgaaacgaactttcaagcaagtagcttcgttagcgccgcagaaaccatcaacaacatacaatttcttgtttgacaattctttagcagccaattctttcaatacattccaagtttctgtagttacaggcttgttgtcgtttttatattcttctgaagtccaccatacagtgttttcacttgtagcgtcttttaccaagaatttatctttaggagaacgaccagtatagataccagtcattacgtttactgcacccagttcagttacctgacctttttcgaagccttccaaaccagcttttgtttcttctgcaaacaatacatcgtaagaaggattgtgtacgatttctacggttccagtgataccgtacttagtaagatctaaatttgccattgttcaaatgattaatttggttattatatcaaatgtttattgtctaaatctgtaagcctaatccgcttttctgctcttcaacatctccttgttttaggcgctacaaaagtagtagatatttttaattcaaagaagttattacagaaaaaaatccgtaatcatttaaagatttatacttgtgtaacaaaattgccaaatccactttacaaatcaattttattttgtttctttgcaaactggaatctaaataataaaacccctaagaacctgaaaatgtttatgaaaataatcaactttaaccaaagcaacagccttttcaaccagttcctttctgaaatccgtgatgtgcatatacaaggtgaccgcatccgcttccgccgcaacatagagcgtgtaggcgaaatcatggcatacgaaatcagccggacgcttccttaccatccggtatccgtacaaaccccattggctacagccgtagagaatgtaccttccgagcaacctgtggtagccaccatcctgcgtgcaggacttccgcttcatcagggcttcatcaactattttgaccatgcggaaaatgccttcgtatcggcctatcgtaaatacatcaacgaagataacttcgacattcacattgaatacatcgcttctccacgactggacggaaagattctgattctgaccgacccgatgctggctaccggcagttccatggaactggcatacgaagccttgcttaccaagggagaaccatctcatatacacattgcttcagtcattgccagtcgtcaggccatcgagcatatcaaaaaggtgttccctactgaaaaaaccaccgtatggtgcggcgccatcgacccggaactgaatgcccattcctatatcgtgccgggactgggagatgcaggcgatttgtgttatggagaaaaagaataaagacaaaaaaggagccagacgaaaaaatcactggctccttttctttttatcatgtcagatttatttaatctcccacgtatcattcgtttccagcaattcggcaaacgtgtgatactttttcttggctgaaacctcttcaatctgggcttctactgcctcatcgtatgtcggtgcatccacatcacgaatcacacccaaggctatcgggaaatccgggccttccatcagcgcaagtttcaactgaagggtgtgatcttcacaatgggcatcgtgcactaagatgtctttttccgtgataccgttctcacccagtttcaccactttcagcccgaagccttcctgcatcagaccgaattctttgttcggaccaaagagcataggcttaccgtgctccagataaatcgcattgcgttcacgatcttccttcttggctacggcattatgcgtaccgtcattgaagatgacacagttctgcaatacttccactaccgacgtacctttatgacgggcagctgctttcagcacttccacagaggggccgccatctactgccgcacaacgggcaaagaaacggccgcgagctccgaaacacaaatctgccggacggaaaggatcttccaccgtaccgtagggagaagatttacttacaaacccacgggctgaagtcggagaatactgtcccttggtcaatccgtaaatacggttattcaacaggatgatgttaatatctacattacgacggatagcatggataaaatggttaccaccgatggccaggccgtcaccgtcaccggaaatctgccagatagtaagattcggattagccaccttggctcccgtagcaatggcagccgcacgtccgtgaatggtgtgcatgccatacgtattcatgtaataaggcaaacgcgaagaacatccgataccggaaatcaccgcaatttcatggggaggtactcccagttcggccaaagccttgtgaaaagaattcaggaaagcgtggtcgccgcagcccggacaccagcgaggctgtccggatttgtaatctgctgccgtatattttgtttcactcattgttattcctccagaatatttattgatgaatcattaaaaaagttgactgaaagcctctaccagctctttcactacgaacggctggccttttacctgattgaactgatgcaggtgaataccttccactttcatgcggagatagcctgccagctgtcccatattttgctcggccaccacgatggtcttgtattttcgtaatacttcggctgtatttttcggcaacgggttgatgacacggaaatgtgccagcgctgctttctttcccatggcgttcaactgatccatggcagaatgcaagtgtccgtaagtacctccaaaacctacaatcagcaaatcggcatccggatcgccttccactgtaagcggtggcaatgaatcggcaatcttttctaccttttcggcacgcaacttcgtcatcaggaagtggttttccggttccgtagaaatggctccggtttcgttactcttttccaatcctccgatacggtgcataaagcccggggtacccggtgtagcccagtaacgcacgcctgtctgcggatcacgctggaacggtgtccacgaatcagccatttccagcttcacgtaaggcggacagatggatggataagtattcaaatcgggcaaacgccatgcagcagaaccgttggcaatataggcatcggtcaacaaaacgaccggagtcatgtgttccagagcaatcttgcaggccagataagccgcatcaaagcagtcggtcggtgaagaagccgccaccacaggcatcggactttctccattacgtccgaacagcacctgaagcaagtcggtctgttccgatttggtcggtagtccggtagaagggcctccacgctgtacgtctacaatcaccagcggaagttccgtaatcaccgccagattcatggcctcactcttcaaacaaatacccggtccggaagtggtcgttacagccaatgcgccggcaaacgaagctcctacagcagaagcacatccggcaatctcatcttcacactgcaccgttttcacgcccagcgatttatgtttggccagttcatgcagaatatctgtggccggtgtaatcgggtaggaacccagatacaattgcaaacctgctttctctgcagccgccatcagaccgtatgccgtcgctttattaccgttgatatccatgtattttcccggctctttctgtgccttgctcggcacggtatagctcatcgatacagaagcatgggtattctcaccaaaatgataaccgtcgtaaagtaccttcacattggcttcggcaatttccggtttcttggcaaatttctcgcgcagaattttttcgcccaccttcacatcgcgatggaacaaccagcataccaatcccagagcaaacatgttctttgttcgcaagatagacttgttgtccagcccgctgtctttcaggctttccttacacatggtagtgatagctgccgacacgacttcattcttgatacccagttccgagaagggattttccaacgtaaacttagccttttccaggtcacgtttggtaaacgaatcggagtcgataataattaccgcctgcggtttacaaaatttatactgtgttttcaaggctgccggattcatggctaccagcacatcgcacttatcgcccggagtatatacctttccggcaccaatatgcacctgaaagccagacacaccagtcaatgaaccttgcggggcgcgaatgtccgccgggtaatccgggaatgtactgatatcgtttccttcggttgccgaaatattggagaacatatttccggccagctgcattccgtcaccggaatcacccgagaaacggactactacctcgtccagttccttgacaatcatttcttctgccatatcgtatttatttaaagttcacaaaatcaattttggcaaaattggggaagttccgtaaaaaaacaaaataaatcgggagatattttctgcaacctctcaaaaaacgcaagtgcatttgatataaaacgcaagggcgtttcacttcaaacgcaaggacgtttgatcttaaacgcaagtgcgttttggattgaacgcaagtgcgttttttcacactcgtcaatacgcagaccttcacgatggattaagattgtataacaaactaaatatcaaacaattataaatcaacaataaattttgcagcagactattgaatcaagccctcagcaccaccttattatattatactataaaaattccttcaaaaactacctaaaataaatttaaaatcaaatctaagagcataatcaccgctctgtaaaaaagaaatttaccctcttgtatttttgctttctcaggcaaaaagaataactttgtttactaatctaaaaacgactgacaatgaaagaatttcttcgaagcaccctggccaccattacgggtgtactgatttgcgggtttatctttatcatcttaggtgtcaccatgctggcaggatttgtagcttcctctgaaagcgaaaccatagtcatgcccaattctgtttttacgcttgagctgaaaggcactgttcaggaacgctatcagcccagtccagtagaccagttctttgaggaccagatttccacatacggactggaagatattctaaattctatccagaaagctaaagaagacgaacagattaagggtatctacttgcatactggagcattgacatgttctacagcctctttgcaggccattcatcgtgcactggctgatttcaagcagagtggcaaattcctgattgcctatgccgacatgtacacacagggcggttattatctggccagcgtagctgacaaggtaattgtaaaccctgtaggaagtctctcctggcacggactggccagcgaaactatgttcctgaaagattttctggccaaaatcggagttaaaatgcagattttccgtgtgggtacatacaaatcggctgtcgaaccgatgaccaataccgaaatgagtccggccaaccgtgaacaaacacaggcctttctggaatctacctggaagagcattgtgagcgatgtagctgcttccagaaatatttcggtcgattccctaaacttattagctgaccagaatatggacttacgcccagccgaagactacgtgcgctgcggactggccgacactttaatgtataaggatgaagtgcttagctacctgaaatccctcgccggactgaccgaagaagataatcttcagaccctgagtctggacgaaatgactcgtgtaaaatcagtcactccgaaaagcaagacaagagacgtggtagccgtttattatgcttacggagaaattgacaacggctcttcatacgacgaaggtattaactccgagaaagtagcgaaggatttacgcgatttgcgtaaagacaagaacgtaaaagcggtcgtgcttcgcgtgaactctccgggaggaagtgcctatggttcggaacagatttggcgtgaagtgaccttgctgaaagctgaaaaaccggtcgtcgtatccatgggtgactatgcagcttccggcggttactacatttcttgcgctgccaacaaaatcgtagctgaaccgactactctgaccggttccatcggcatcttcggtatgatgcccgacgcttcagaattactgaccaataaactgggacttcattttgatggagtcaagacacataaaatggccgacatgggcagcatgagccgcccgttcaatgcggaagaatcggccctaatgcaacaaatggtgaaccaaggatatgccttgtttaccaaacgctgtgccgaaggacgaaatattccgttagaggagctctgcaagattgcggaaggccgcgtatggaccggaagcatggctaaggagctgaaactggtagacgaactggggggactggatactgccatccagctggctgccgaactgggtaaagtaaaagactataaactgaaaagctacccgactaagcaggatttcctgacagaactgctgaatacccgcgctgaccgttacattcacagccagttgcaggaaacattcggtgaatattatcaaggttttgaatggttgcgccacgtggaacagtctgaccgcctgcaagcccgtttgccattcaacatgcgtatccaataagcaggaggcgcattcatgagcggaaaatgcaaaatatattgggggctatggcccttcagtgtcctcttcggcatcggtgtgagggtgcggaatctcttgttcgatgtgggatggctccacgaagaacgttttccgttacctgtcatctgcatcggtaacctgactgtaggcggcaccgggaaaactcctcacacggaatacctcatccggctgttgcagaactcgttccggctggccgtactaagccggggctacaagcggaaatctaaaggtttcgtgctggcctcttctacctcccggatggaagacatcggtgacgagccttaccagatggcccgcaagtttcccgccattcacgtagccgtagatggagaccgctgccggggtatccgccagcttacctctccgcaaggagcacccgatacggaagtcatcctgctggacgatgcctttcaacaccgctatgtacgaccgggactgcgcattctgctgatggattaccatcgccctgtggaatgtgaccagcttcttcctgccggacgccttcgggaaccagccagtggaaagaaaagggccgatttgctcatcgtcacgaaatgtccgcctaccctcagcctggaggaatgcgaacgtatccgacaacgcatacagctacttccgcatcaggaagtgtttttcactaccctggcctacggaaagttgtatcccttatttatggatgctcctacccaacccctggatgtgttaaaagataaagaagtgctgctggtcaccggcattgcctcaccggcaccactaatggaggaagtcggccgacacgctgctcgtatcactccgctgctcttcggcgaccatcacaattttgacggtgccgatatgcaacagattgcacagcagttccacaagctgccggaaacccgccgcctcatcctgaccaccgagaaggatgcttcacggcttatcggtcatccgcagctctgcgaagaactgaaaccctatatttacgtgctccctatagaagtggagtttctgcacaaaggagaactagtatttaaccctaaaatcattgagtatgttagaaaaaattcaagaaacagctgcctttctgaaggctaaaatgcacactcaccccgaaacagccatcatcctgggtacaggattgggcagtctggtgcacgaaatcaccgacaagtatgaaatcaactattcggaaatcccgaatttcccggtttcaaccgtcgaaggacacagcgggaaactgattttcgggaaactgggtaacaaggatatcatggccatgcagggacgctttcatttttatgaaggctactccatgaaggaagtgactttccccgtacgcgtgatgcgtgagctgggcatcaagaccctcttcgtatcgaatgctgcaggaggtaccaaccccgactttgaaatcggtgacctgatgattattactgaccacatcaatctcttcccggaacatccgcttcgtgggaagaatatcgaatacggaccacgcttcccggatatgagtgaagcttactccaaaaaactgattgcaaaagccctggaaattgctcaggaaaaaggcatcaaggtgcaacaaggcgtgtacctcggtacgcaaggtcctacgttcgaaactccgtcggaatataagatgttccacattttaggtgctgatgccgtaggaatgtctaccgtaccagaagtaattgtagccaaccattgcggcattaaggtattcggcgtatcagtcatcaccgacttgggcgtggaaggaaagattgtggaagtatcacacgcagaagtgcagaaggctgccgacgaagcacagcctcgcatgacaaccattatgagagaacttatcaacagagcgtaaaaatactatgcacgaaggaaacagaacagaaatttcaacgttgggtgaatttgggcttatcaagcacctcacccaagatattaaattacagaatccggaaacgaaatacggtgtgggcgacgatgccgccgtactggaattttccgacaagcaggtactggtcactaccgacctactgatggaaggtgtacactttgacctggtatataccccgctgaagcacctgggatacaaatcagccatggtgaacttctccgatatttacgccatgaacggtactccgaagcagattaccgtatcactggctgtatccaaacgcttctgcatcgaagacctggaagatttctacgacggactgaaactggcttgtgcacagcatcaggtagaccttgtaggaggtgacaccacttcttccgttacagggctggccatttccatcacctgcattggagaagccgataaagacaaggtggtataccgcaacggcgccaaagaaactgacctgatctgcgtatcaggtgatttgggagctgcttacatgggacttcagctgatggaacgggaaaaagccgtgttccagggcgaaaaagatgtacagccagactttgccggcaaagaatacttgctggaacgcttcttgaaaccggaagcccgcaaggatattgtagaaagcctggctaaagccggcatcaaacccactgccatgatggacatctccgacggattgtcatctgagctgatgcacatctgctcacaaagccatgccggttgccgcgtgtacgaagaacgcattccgattgactatcagacagccgtaatggccgaagaattcaacatgaacctaagcacttgtgcactgaacggcggcgaagattacgaactgctcttcacggtaccgttgaccgcgcacgaagtcgtttctcagatgaaagacgtgaaagtcatcggtcacatcaccaaacccgaactaggatgcgcccttgtgactcgtgacggaaatgaacttgagttgaaagcacaaggctggaatcccttgaaaggataaagttcttttataaactaaattaaaaccttcctttttcaatctccgattttatttcggtctgaaaaaggaaggtttttaaggttattatcggtacttttcccacaaaaatgccgttttttgcacaaaaatcgtattttttctgctgaaatgtttgcaagttccaaaagtttgcgtacctttgcaaccgcaatcgagaaacattggttgcaaacataaaaatgctggtgccatagctcagttggtagagcaaaggactgaaaatccttgtgtccccggttcgattcctggtggcaccac

SEQ ID NO: 3821 - DNA, 169 bp, Unknown
  gut microbiota DNA sequence
aacgagacggaaaaagttttacaaaaaataggggaaaacagctgcaaagcctgaagctgcgaatggaatacggaaaaaggaacggagtttttacacggacaaggaggaactttttacgtttccgctacgaaaaacatacggttccgcaacgcaaaacgtacggttcgca

SEQ ID NO: 3822 - DNA, 6926 bp, Unknown
  gut microbiota DNA sequence
ccttttacccccaaaagagaacctgtggcaatgacatcgaaacgcccgtctatatgaaatgacttcaaggcagtccttgcttccctacactcttgaatctcgtcaagaataatacaagtcttcccttcaatgaaacgactgccctgaatcaaagcagagaggttgagaatgatggtatccacatctatattgccggtaaaggcagacttgttgtcaggctcaagaatgaaattcatatagaccacactttcataattctcccttgcgaatttctgaacaatgtatgtctttccacattggcggataccttttattacaagaggctttctgtcctcagaccgtttccagtcggctaaatatgtttctatcttccttttaagcatggtgtaatcttattttccaacgacgaaattacacttttttcagcgaataaaccaacattcgacacattttttcaaacgaataacattcattacagcacatttttgcaaacgagttatacagatatcgagcttctttagacagaaaaaggtataaggtatatagttaaaaggtaatagttaaaaagtaaaagcggcaagtgtattgcgttttcgcttttcattcttcatcattattgaaattatgtctttttgttcttatgtcataataaaaaaaacggaagagtcacccctcccgttcttcattattcattcttaattcttcattattctccattcttcgccttccggttaatcacatggtcaaaccagaggttcagcagcgtccataccaccacgtcaatcacgaacaccagcgtgttgttcatataaagaatcgccacgatggtaaacgcacagaagcaggccgacatcagctgaatcgttaccagcgccctccgcggtgagaaacccatggccaggaacttgtggtggatgtgcgtcttgtcgggcatgaacagcgaccgcttgttacgcgcacgccgcagcaccacgcgaatcacatccagacacggcaccatcagcacgctgaacgacaccagcaccggactcgtcttcatcgtgagcagcatatccggctcatacatacagtacttgatgacaaagaagctcagaatataccccagcgtcaagctgccggtatcccccatgaaaatcttccttcccaaatccgcactgccgaacacgttgtacgaaaagaacgggataatcacccccaccgtcacgaaagccagcatggcatagctccacatgcggaaatgcacgaacagcactccgaacaccagcagcgccaccatactcagccccgacgccagtccgtcgataccgtcaatcaggttgatggcattggtgatgaacaccaccagcagcatggtcagcggaatacctacctctgcaggaatcaggtaaatgccaaagagaccatagaaattgttgatatacaaacccgacagcggaaacatcgccgccgagataatctgcaccaggaacttcttccggtagcgcaccccaatcaagtcgtcggcaatgcccacgatatacagcagggtcagccctcccgtcaggaaaagaaactcgcacaccaggtccgttgtcgatgtctcggcaggtccgtggcccgtcatcagccgcacggtcgtaaacacacacaaggaaaaaagaattaccgggaaaaaggtcactcccccgaggcgaggtatcggacgtttgtgtactttccgttcatcaggcacgtcaaacaagcgtttgcgcaatgaaataatcagaatattcgggataatgattctccccagtatcactgccgatacaaatgcagaaatgataatatacagattcgccattgtccgtttggattttgaatagtgcaaaggtaggattttatttcgaatcctgaaaactttttaggcgccggacaccttctttttatgatttagaaaacttttgtaccgctacaactcctttttcacgtcaaaacaggggcaggccttggtccattcctccggttccaccgtcccgtcgccgtccagatccgggctcaggtcgcgatgccccaccacctgcgtgatggccgggaaatccgatttcagcaccctcaccagaatccggagcgaacgcttctgcagttccgtacgcgtatccgccggccgtccctgcgcatccagtcccccttcatacgcaatgccgatgctgtgctcgttataacccttggcatgcgctccggcccgttccaccggccgcattgtacaaatttcaccatccgtgcggacaaaatagtgatatccgcaacacttgaacccccgtttccggtgcatcttcgtcagttcggcaggcgagagcgggcggtccgctctcgttgccgtacagtgaatcacaatcatgtcaatttttctcatcacaatccggttttcttccggtcaggagacagagaatacacttcagcaccctgaccacaatccattttactttcgtcatcttctcacgccttagttccgattacacccctgcaccgtcgtcctcttcctctttcttatacttcaccggcacccgttcgaaagccaggttgttgatagcctcctgcatcaccgtacccgggcggaacagcacgcgcaccttttcaatcatgctgtcggtatacgtatcttccgtagcggacccttccccgctcaggctcagctgcagcgaacccagttcacccaggcgtacgatttcgccgccctgcaagccttccgacacgatgtcttccagtcccgtcaacaccgccatcacgtcggcacgggtcacggtacacatctgatgaatacgttccgctatctcacgaatacccatctcgccgcgagcctgcgactgtgcataatacttcacttcaccgctttcacgatcggccgggttcacacgccctacaaccgaataagtcactgttttcttcataggtctttcaattaaaaattaataataaaatgaagaattaagaatgatgaattaagaattaagaatgatgaatgatgaatccaggaaacgcgcgcacattcttcattattcactcttcattcttcattatttgattgttcttcattattcactcttcattcttcattgtttcttacataggcaaagttacactccccgtttccgcccatgtagacatttgaggacatacgaagacttacgaagacattcgaggaaatttgaagacttttgaagacattagaaaaaggaaacgccgccgcttacggctctccaaggaacctcacaatcagttccacctccgatttcaggaaaaacttgcggtttttctggtagcccgaccgctcgagctccctttccagttccgcacactgctttatccatcgccccagcccctgcagggcaccttttttacctgcctgcggaaaatacaggcccgccaactcacttttccggtaagctttcaggcagaaaccctcccgttcctccccggaaacaactcccggccccgttttcaattgcatgtagttcattgttccgttttattttagttacctataaatttacacaattccggccggatacacaagtttttccacccgttttttccggtatatttccttcttcggaacataaaaatccacatgaaaatcaaagcgttatcaccatccggcgaccgggcgatgaagactactcttcagccggcgcctcggtaaatcgtcccatggcacgacggttgcggttcacctcttcgatggtgtacatcaccacccgataccccctctttcccgccacgcgaacctgctcgaatcccgccttccgcaaggcaagccccaccttgacggcactgaggggattcttcatgcccccgttgatatgctgcagaatctcgcccaccgtcaggaacatacattcctcgccgggcatcggcacgcggaaaaaagccagcagcaagtccgtttccaggctggccgtctcaaaccgctcgttgcgtgcgttcacctgtgcgatttcctcctcgtcgaaccagtagcggaaccccttcttccacagcatcagggcctgcccgtacacccccgcatagtccacgggatgcgtgtaggggtcgtcaatgtgcaccaccgtgaagggcagccagcgccggcttcccgtggggtcgttcagaaactccggctggttggtcgtgccgcagaaactcgcgatgtgcgggcggttctccttgtagtgcccgtacgccctccgctcgttcaccgccggcatagtcaccatcgccttgagctggttgatgtcgcccaggcgcagctcgtcaatctcctccaggcaaatcagcgcaaattccgacagcgccaggttatcatccttcgtcagccgtccgctgttggaacgcacacagaaataccgctgcagttcaggcggcagcagacgcgccagccaggtcgtcttgtagcaaccctgccgccccaccagcaccagaatctggtggttcgtcacctctttcaccatcagcgacaccaccacagccaccagccacttgcggaaacaatcatcaaacagtttcgcgtcaccctccacgtgcaccgtggccgccagccgcccgatgtggtcggtcaccccgtcccacggaggcagcgagcggaaatactccgtaaaagggttgaactccggcacaaactccgactccagcaccgaacgcacatcgcacaggcgtaccgtgtgcccctccttggtcatgcggctccacagcgagttcaccaggcggtcggtcagctccacaaactcctcggcctcggggtgccgcatctcctccttcccggtaatcacgttcttccggaactccgcctgcgtggcgagaaactgctcaatctcctggggcgtggccagctgggaacgtccttcccccttcttctccctcttcgcacgaaacagttccgcctcccgccgtccgtgcgcctccgtatcggcataacacgagcggaaaatggccgccacgtcgccgtcgtattccggaaagcgtccgtccgcccagccgatggcctgctccagcggcagcccgaactcgttcatcagataccccatgcgcatgatgtactcgttgtgatgatgcggggcatacaccacgccctgctcgtccagctccctgcggatacgggccaccacacgctccacccgtcccctgcgcggctcatccgacttcttcatgcgcgaaaggtcgaagcggaaaggttccgccccgtcgtggtaatgcacctgcgcgtcatgcgccagtccgctcagtcgggtggcattcttgcaggcagggtcgaaactgcaccccgtcagttgcccataatactcgttcaccctgcggaatacccggctgtaacatgccacccggtcggtatcgggcgtctctccatccagacaatagcggcacaccaccctcactccttgcccgctgatggtggtataagccagcacagtgtgcgggtcggcacacaccttttcgaacacttcctccgcccgtccttcaggcagatggtcaaagtccaccatcgagagacccgtccagccactgatgtcggccttccgtttcccgttctcaaaacgcaccgccacggcaaagcagggacaggccgccttttcccggccggcagccgtcttctgcccctgcgagcggtagtaacggtatttttcggtgtggtcggccaacaccttgtcctcccgaatcagacggaccacttcatcaagactcaccgccacgggcatcgtgtcggcataacccttaaaaatacttagcatcattttgttcattttctcgtgctttatttaatgatttattaaatttgcaatccttttagttttaatttttttgttttcttttcaaaacagcgaaacgaatgtaaaacaagtttacagaaagtacaaacccatactgcacgcatgtgtgcaatattttaaccaataatttactataattttattttttaaacaaaattacgtatgaaacaagcgaaattgattgaactgggacagatgttggaagcgtggcgccaccaggtgctgtcgcacggccgtaccctcaccgtacaagagttgtgccgactggcaccgatgagcgcacacacgtttcaaaaagttaaaaagggctcctgacggatctgacattcctcggccgcatccttgccgtgtatcaccgcctgcttgccgccgacccgcagaagcaggacgagctgctccgcgactttttccgctcactaaccactgatttagagcgaattaaatcaatccaaggcatccaacccccacgcacaaaagacacagaacgacagtgaagaaccggccttccccgggccaccgcttgacgggttgtcggggttggcaccggttttgcaaactctctatatacaggtgtggaaaaatataagcgttgtatttttccacaccccgcgtatatacattttataaaaatgcctgccaaccccgacaacccgtcatgtttcctttccggaactccccgaaaacgcccttgcgttttgaatcgaacgcccttgcgtttgaagtaaaacgtacttgcgttttatcacaaacgcacttgcgtttcaggtaaaacgcccttgcgtttttctcacgctccccccctgtaccccatacattgttccagaattgttacaaagtccgccaatatgcccactttttcattgatttccacccttttcaccgacaaaaacccctctataagttgaataaaccaaaaataaggcttaattttgcagctgattatcggccgtaatttttaccgccccaatccatagctgggagtggtaacggcgaagcacgccctatgcacagggaaattcctttagaaaaatcataacaaaaccataagaaaagatgaagatacgcaaagtagtctgtatgctgacgttgtccaccctgctggtgagcgggtgtacgtcttacaagaaggtaccctaccttcaaaattctcaggaagtggaagtagcc

SEQ ID NO: 3823 - DNA, 765 bp, Unknown
  gut microbiota DNA sequence
ttccatccgctccgcgcggataaggaaagctgacgggcaattagtaatgctcggctttgctgtctccagctttacacctgcatcctatcaacgttgtcgtcttcaacgaccctcaagaaatctaatcttgtggccggcttcgcacttagatgctttcagcgcttatccgatcccgacttagatacccggcgatgcgcctggcggcacaaccggtaaaccagaggtcggtccaacacggtcctctcgtactagtgtcagagccacgcaaatttcatacgcccacgatagatagagaccgaactgtctcacgacgttctgaacccagctcgcgtgccactttaatgggcgaacagcccaacccttgggaccttctccagccccaggatgtgacgagccgacatcgaggtgccaaaccactccgtcgatatgagctcttgggagggatcagcctgttatccccggagtaccttttatcctttgagcgatgtcccttccatacggaaacaccggatcactatgctctagtttcctacctgctcgacttgtctgtctcccagtcaagcgcccttttgccattacactctgcggacggttaccgatcgtcctgagggcacctttagaagcctccgttacgcttttggaggcgaccaccccagtcaaactacccaccaagcaatgtccttctatccggaagttagaactcaaacaaacgaagggtcgtatttcaacagcggctccacgaacactggcgtgcccgattcaatg

SEQ ID NO: 3824 - DNA, 49112 bp, Unknown
  gut microbiota DNA sequence
agttgtgatttgctttcattttagtatctttgaaccattagaaacaactttccatatctaatatacatcaattatatagttgtgatttgctttcattttagtatctttgaaccattagaaacaacttgttgattgtttcttgttgtctatcagtaggttataagtaaatttagaaaaagaaaaagttgtttcttgaaataataaatcccatattaaccatgggatttattattttaaaagagttctaattgttgtcctggtgtttttaccccacttgctttcttgccataaaatagctcaatttctccaaactgtttgtctgtgatacatataattccaacttgaccatattcaggtagaaaggattttactctttttatatgcactgctgcattttcactgcttgcacaatggcgtacatagatagagaattgaaacattgtgaatccatctttttgtagatttttgcgaaaatcagtataagcttttttgtctttctttgtttctgttggtaggtcaaaaagaactaaaatccacataactctatattcgctgaaacgttccattagaattcaggataaatgatttttcgtgattctccagaaaagcatttatatagtgatgccgttgtttggcttgctgctatcataagaggacttcttttcccactgattctgacatctattgtggggatggataataaactggcttttacttcttttgtaagttccattttgttttcagagtatagttgatagactagccggtctatgaaggggcgatatggttccataatatcgtctgctaagcaataggcattgtatcggttatgatggtgaatgcctaatgtgggtaataatccgcttgttacaagagaacgtgcgataactgcacggagaatggcataaccataatttaaaagattgttagggggtatgccatctcggtcccttgtaaagttttcgatgtcatgaaaaagtgttttccagtagaaagctgcagcacgtgcttccagattgtcggggtctccacttcgtacatcgttagcccatatacgcatgcattttatatcttcgtttatacatatggataaggaagatgcttgattgttgatttttgcttgaatggtttgttgccatagttgtttctttaaaggcaaagaagcatccagttgtttccgaaaacgctcattttgggtagtgtttccatagagagggagcattaatcctacaggcatacttttactgtcacaagtaataagtgcacaattattttcaagcaatgcttcaatagctccggaagtaatggtgatttgtttattatccaaaataacaacgcctatatcttcaataggtttggttatttcagattgacgtttcatcgcttccggaagtgaaggacatttttctacttccggaagttttatgacaagttgggcattacgtaatgataggtatgctgggttaccaaaatataatgttttctttatcataggctaattgacgttataatgtttcctagtctgtctgttttgatggggatgcatatttcttttatcatttcatcttgccaagttttttgtgctttgttattacttcctaactcaatagtttgaattatgggctttgcaacgaaatatggaatgaaatgacattccccttcagtacaactcaccatcttataaattctatctttttgtattggttgattaatatgtccattttctatttcttcttttgttggtacatatactaaatcattgggtgataatataaatttaggtagattacccttttcgttttcgggtgctggtgacaagcctttttttagtcgttcaatgactacgtttaatggaatagaggcgaaactgcgtttatgggcagtttcatatattgcaaagaacaggttagtaccttttgctgcctctacaaacttagtggatttatttcctgtttgtccaacagcgaatttatcggcttgttcgtatgttctgactttataaattggttgatgaaattttccattattatttagggacataatatttttattcatttgttcaataccttcaggtgagaaggcttgttccggattattgccattctgctccaaatggcgcagtaaaatttgttggattcctgtatctgcaactttttcttctattttctttttattgaaagttgtatttattgattcacggcaagcaaagaatctgttggcagtttctttggtgaaatagtatactggtatcttctttagatttatttcttgccaaatatctttattgtcttcaaagtattttttgatttgtttttcattgagtccttgcgttaaaagctcttttatttttttctttaagtctttttcaataattctttgaggattctcaagaacggctttcaatgtagcagtggttgttctgcgcaggttgatttctccatatacggtttctttatgcatgggcttacggatagcccagctatcaccttgtttttgtgagcaacttacttttttcccgttttcatagtggatataatggttagttgttttattgataatacgcagattttgtttgaagcttacaatgatgttgcctaaaatggaatacacatcttgggtaaatgtatcccaaggtttgtcaatgagccattgatagtttcccaaattgtcggtttttgttttcttgcataatatttgtcgcaggtcttgacgtgaaatctttgcattcttgctggctgattcattatttaaataattgactatattccgattggcgcaggctatgacaatggcatccatggcatgatggcggtggtcaatacgttttttgttgaatcctttttgtaaatctaatggcatagcaggaattgtcttgttgcatgcattggttgtcgtaaagcgattgctttccgtaatttcgttcaagcgtatgaaacgaggtaaaatgagtttattccatacgtcgttgatcccccagtctttttttagtcggtctgtgatacttccagtacaaacaataacattcttagatgtagcttcttcttctccttcatcacgtacaatattagataataatgattttattagcttactaatataacggctgtcgtttaattgacgttcaataaactgatctggaatatcttccatcaatagcttttgcattttagtgcggttgtaggaataatgttctttcacaaatagctcataagcttcaaccgtctgtattttaacgttttgtccgaatcctagttctactattctttcttgattgtttttgatgaattcatagcctaacatattgccttttagcttattaacttctgcttcacaaataactttatttgtgaatgaatcatcaaaataacgagattgaggaattacatgttcaatttcgtatgcaggggtgaaaagttttcctaaaggaatcatagctccagtataaggagaacgatatttttgttccagccagcatttataacgtaagacatcggatgtagacgggcgttttttggtatcaacttcattgaatttctttaaaataacagcaatatcttctggtatatctttagtttcgtttagagcttcttcttcatatatacgcaataaatcttgctggcttggagagtgcgggcgtacgttctcaattcccaattctggattggcaaattcagcaagaagtgccttgatacgcagattggtgttttcgttttcttgtatttgttgggtgagttttctgcgtttctcggcaggattcttcatttcacgtcctaattcgacatgaatttcatcaatatgccctgtctgtttccaaatatctcgtacagtgcgtaaggtttccatgatgatttgttccacaataggattgtgtaaagaatgttgcttgaatgcgtttagaaaagcatcaatatctgaaggttgttgccatttagtaacgtcctttatctctgaatggcggttatatacgatatagcatgccagccaggttggaagtccctgaaatgagtataaattgtccaaatggattgttttttctctggttcggttctttatgttttcttcaaactctccagttaatattttttctatacggtcaagagttgtactgtcgaaattttctgctttccaatatcttcctatacgcataagtggcaatagttttttgatagctttggcagaataggaaccgtaatctttctcgaaaggaggaatttgctgaaaagtatctgcaaatttatcgcttaaatagtttttatcagcgaaatgctgtaaagcttttctgagttcattcttgtcagaaatagagtatagaatatgccatagtttctcttctatttctgatgttaaggctgattgctctattcctgctttttcccaatatgaaagtatcttgtagtgagtctcattacaaggatatgtcttgtcttctacataattccagcgataatttgctgtattcttttttaatccaaatgctgggtttttaagaaatgtgtcttgtctgatttcttttttctgattgagccagtcgaacaagtttgcgtaggcatcttcggttttcagaaattgacttgttacatctatgtcagtagtgaattttccgtttatggttccttccttttgataaattcgcaagtttgatataaattgccatagacgaaactcttgaaaaagaggatgtgatttggctatacactttaacggagaagtgcatatttctcctgtttctttattgatgtatgtgtattcttcgtaaggacaattactaataagcgattttttgcttttaagtggacgttgatagaataaaatatcctcaataagcaattgggcaatgctatattttgcaatagcattacgatgggcttcgttattaggatacagttcttcaatgcaggcttctaataaattggagtctcgcaattctgggtgaaattcttcttgtttctttaatatctgatttaattcgtctttataatacttgcgttcaatggtgcgaatcaattttccccgaatcttttggctaggagtttgtaatagtgtatcatagatgtatgcgcctactgttttatgagatgtgtcaagatctttttgagtttttgttttaataagctcccactgttcttcccattcttgttcggtaggaattttgaaacgacggcttaactctccattttcatcatatttgtcatttccgtttttatcaaggtctatgattgcaataatatcttttttctgacttttccagtcgggcatgtttttactgaaaaactttcctttctctccgttttcaagtgttattgtgaatatttttaatcctttataaacttgccctgtgtcagtaatatctgttacaatctggctgtcaaaatattgccgtgttttagaagatgctttttctgtttcctcttcgcgcagctgatagtatcctcttttctgattgaaatttaataaaacccaagctaattcttctttttcaattttctgtatcaatgcctttttgcgcaaataaaacaaagtccagtcgtatggaactttttttatttggctgttgttttgtaaaaagtcattgagcatctcctgaaatgaactttgaaagataaagtaaggaagtccatgcgtatttgttgtccaagcgagttttggctcagaattggcaataaattttccatacctgtctaattggttggcataatgcttgggaagaaatcctaataattgtaggatgcgatgcagtctttctcttctgagttttttgcgttcatataatcggcgtactccacgaaattgagtacggttggctgtttgtgaaactgtatttcctttattgaagtctcctaattgggcggcatccataggaattattctgcttcctgcagcctctataccttttagttgttctttttgggttgtttcgtcaaagcttgaactgataactgcccatcctatactgtttgtgcctaagtctaaacctaaaatgtgtttcatagttgtattttttcaattttctcaaaactactaattttttatgaaaaaaacttgtcttttgtattgtttctttttacttttgtaaaactaaaatgaagcaaatcacaataaggattattccgttgtgaaaacatttaggcgcttgcccatcgtcctttatcggtgggcttttttattgttttgtattttctataaataaaaatcccctccagaactcattcattacaaatagttccggaggggattaattttatctatatttttaagcggtacggattatttgtattcgtcccagctcttgatagcgatgtcgtcaatgctcatagagcagaaggcattgatgaatgcacttgccagacgggcattggttaccagaggaatgttcaggtcgactgcggcacgacgaatcttgtatccgttttccagctcggtaggagtgaggtcacgcggaatgtttaccaccatgtcgatttctttcttgtgcagcatttccagtgcctgaggctgaccttcttcgcttggccagtatacgcgggtgttttccactccgttttctgccaggaacttagaagaaccgccggtagcgaagatgttgtaacctttggccttgagggcgcgcgctgcctgaagcaaatctactttctgtttcagtgtaccggtagacatcaggacgttcttttccggaatgcggtagcctacagacagcatggctttcagtacggcacatgaagtgtcgtcgccgatacagccaacttcacctgtagaagccatgtctacacccagtacagggtcggccttctgcaaacggttgaacgagaactggctggccttgatacctacgtagtcgaggtcgaagaggttcttttcaggcttttctaccggcaagcctaacatgactttggttgccagctcgatgaagttaatcttcagcaccttgctgacgaacgggaatgaacggctggcacgcaggttacattcaattaccttgatgtcgttttcacgagccaggaactggatgttgaacggaccagagatgttcaactctttcgcaatctgacgagagatacgcttgatgcggcgtacggtttctacgtacagtttctgcggcgggaactggatggtagcgtcgcctgagtgtacaccggcaaactcgatgtgctcagagatggcgtaagctacgatttcaccgttctgtgccacggcatccatttctacttccttagcgtgttcgatgaactggcttactactaccggatgcttcttcgacacgttagcggccagctgcaggaagcgttccagctcttcctgattagaacatacgttcatggctgcaccagaaagcacgtatgacgggcgaaccaatacaggaaagcctactttttcgataaatgcgttgatatcttccatagaagtcagtgcgctccattcaggctggtctacgccgatacggtcgagcatagccgagaacttgtcgcggtcttcagcgttgtcgatgctcttggcagaagttcccaggatgtttaccttctgtgcgtccaggcgcaatgctaggttgttcggaatctgtccgccagtagatacgatgactccgtgcgggttttccaggtcgaggatatccatcacacgttcgaaagtcagttcgtcgaagtacagacggtcgcacatatcgtagtcggtcgatacggtttcagggttgtagttgatcattactgagcggtagccttccttacggatggtgttcagtgcctgtacgccgcaccagtcgaactctacggatgaaccgatacggtaagcacctgaacccagtacaacgatactcttgtggtcgcccaggtagtgtacatcgttggccacgccgctgtaagtcaggtataggtagttggtctgtgccggatattcggctgccagcgtgtcaatctgttttactaccggcacgatgcctacactcttacggtggttacggatttccaggataccgtcttccatatcgccttcgtagccgatggcacgtgccacctggaagtcggagaatccctgacgttttgccttgtagagcagctcgttcggaagctgtgaaagctgtgtatggttgttgccccactcgtggagttccttagaagtctgcatgatgttcatcagcttgtcgaggaaccacttgtcaatcttggtgaggtcgtgaatttggtctactgtgtagcctgcacgcatagcctttgagatgacgaagatacgcttgtcggtcggttcgcgcagtgctttgtcgatgtcttcgataaccagctccttgttttccacgaaaccgtgcatgccctgaccaatcatacgaaggcctttctggatggcttcttcgaaggtacgtccgatggccatgacttcacctaccgacttcatgctggagcccagttcgcggtctacgccgtggaacttacccaagtcccagcgaggaattttacatacgcagtagtccagtgccggctcgaagaaggcagaagttgtttttgttaccgagttcttcaggtcgaacagtccgtaacccaatcccaacttagctgcaacgaaagccagaggataacctgtagccttagatgccagtgcagaagaacggctcagacgggcatttacctcgattacgcggtagtcttctgattcagggtcgaacgcgtactgtacgttacattcacccacgataccgatgtgacggatgatacggatggccagttcgcgcagtttgtggtattcgctgttggtcagcgtctgtgacggagcgataacgatagactcaccggtgtggatacccagcgggtcgaagttttccatgttgcagaccgtgatacagttgtcgaaacggtcgcgcactacttcgtattccacttccttccagcctttcagactcttttctaccagcacctgcggagagaaagagaacgctttttcggccagcacgttcagttcttcttcgttgtcgcagaaacctgaacccagacctcctaatgcgtaagctgcacggatgatgaccggataacccagttccttcgctgcgcggcgggcatcttcaatgttttctactgcctcactcttgatggtcttcacgttgatttcgtccagtttctgtacgaagagctcacggtcttctgtatccatgatggcctgtaccggagtacccagtacgcgggtgttgtatttctcgaacacaccggctttgtagagagccacaccgcagttcaaggcagtctgtccaccgaatgacagcagcacgccgtcgggacgttccttgtcgatgaccttttctacgaaatatggagtaacgggcaggaagtagattttgtctgccacaccttccgaagtctgcacggtggcgatgttcgggttaatcaggatggtttcgataccttcttccttcagcgctttcagagcctgcgaacccgagtagtcgaattcaccagcttcaccgattttcagggctcctgaacctaacagcaatactttctttatgttttctttcattgtcttctttgttttttagtagattacagcaactttacaaactcatcgaacaggaattccgtgtcggtaggaccgctggaagcttccggatggaactgagccgagaaccaggggttctttttgtgacggataccttcgttcgaaccgtcgttcatgttgatgaagagcggttcccagtcggctcccagtgtattgttgtctacggcataaccgtggttctgtgaggtgatgaagcacttatctgtgcccaccatgcgtaccggctggttatggctgcggtgaccgtatttcagcttatagattttggcacctcctgcctttgaaagcagctggttacccatacagataccgaagataggaagtttttcgttctgcatggccttgcggatgttctgtacggctgcatcacaagtgtcggggtcgcccggaccgttggagatgaacagaccgtcgaactgcagagagttgaagtcgtagttccagggcacgcggatgatttccacgtcgcgcttgagcaggcaacggataatgtttgatttcacgccacagtctaccagcacaacttttttcttgccttcgccttcgttgtagcgaatcacttccttgcaagaaaccttgtctacgtagttcacacctgcataggtagcttcgggaatgttatttggttcatcgtcgaacacgatttttcccatcatcactccatgttcgcgcaatacctttgtcagttcgcgtgtgtcgatgcccgtgatgcccggaatctgttcgcgtttcaaccagtcgcccagactttccactgcattccagtgagagtatttttcactgtaatcgcttacgataatcgcttcggcatggattttctcgctttccatgaaagtgggcagtccgtttgcttcgaatgtgaagggaggcacaccatagttacctaccagcgggtaagtcagtgtcatcaactgaccggcatacgaagggtcggtcaagctttcggggtatccggtcattgccgtattgaaaactacttcaccggctaccggtttctcatagccgaacgacttgccatgaaagcggctcccgtcgtcgaggatcaatgttacatttctcattaccttgttactaataatctttatatcttgtattttttttctattctactctcgtatatacgaaaaaacgcccggacttgccgaaaagcagttccgggtgtttgaaaaaataggaaatcttaaatattcaggaaataagtgacataaaagaaaaaagaaatagcttccggcatttgtccatttcgccggaactccgaatgtgcgcttattctttttactatgtgctgaacagtaatacatcaaactcttttgtcacgtcataattcggagtgcaaagataatgttttctgctcaaatgaaaggatgtttgccaaaagtttttacaaaaatatttcattttcctctttttacttcttttctccgctgtggcgggcggctctttcgcgcatgatgctgtccgaccactcctgcaggcgcttgtattcttcttcggtgagccgcatgaacgagccgtgctgcggatgtttcacgccctccatggtgacgggggagtggaagttggagagtttctcgtcggcctgacagatgcggtatcttttgggtttggaggagtattcgatgtaggccacgcgccaggtagagtcgcccaccaactggaaggcagagcagccctcacactttttgttgccttcaaacttcacataatcgttttcatcttttattttataaagaccggtcagttttgtagctgtagcggcaaagatgccgggtgtacctccttctttcttgatgagcatgtgatagagtccgtcggccggcacatagttaatgtcggcatcgatggtagcatatccccagtccaccagcaggcggggtttagtgagacgtgtaaaggtggcgtcggcataggaatagaacacgcggtcgtactggtcttctgccggattaagcagtgaatagtatatcatgtatccgcccttcgtgccatcagtccatacgtacgaagggtcccagaaaatttgcggtgcccatacgcgtttgatggtgctgtagtccttatagacgtcgggcgactgagggtcacagaaaatgtccggtccccggcggaagtcgaaggtggtagaagtccagtgaatcaggtcgtcacttttcagcaggttgatgccgtagttgaaccacgagcggctcttggcgttgctcatgtcggtagtcaccatcagatagccttttccgtcggacgtgcggcagataaaggcatcgcgtgctcctccctctatttttgacatttcttctacattgtatacggggtcgccatcaatcaggtcgtgaaagtgtacgccatcacggctcagggcgtaggccgtccattctcctcgtccgctcatgtggcagtacaagtatccgtagtctcccttttgcaagttttgtgctccggctcccagcgaagccagtgccagcagtgaaattatcagtttctttttcatggtagtgtaatgtttcattttgcgggtaaaagtagaaaatcggcagaaggcagacaagggactattgtacaaattacacgtaataatgtgtcaaatgctcctgcgatgtaacggaaacgggttgtacgggctggaaaaatgtagtttctcggaaaaaaatctcttttttatttggctgttttcaagaaaacagtaattttgcaaccgttttcaacgaaacacgttgccgaaataactcagttggtagagtaactcattcgtaatgagtaagtcgcgggttcgagtcccgctttcggctccgacttaaaaccgcttattacattgtgaattaggcggtttttctattttctacagcttattacgatgattaaaaaaaaggatttgaattgtaaatttacaattctgtgagtatccctggagtatccttaaattttttaatcattatggcaactctatcacttaccattttcaaggcaaaagcattaaaagacggaagacataagataagaattgcactccgtcacaagcatgaaacaacatatatcgtcacacgattcattatttcagagaaccagtttaagaacggtcaggtcgtgaagcatccagaggcatctgcgataaaccggaaacttaggaacatccttgatgaccttcaagagaaactggactcaataaaacatcttgaactttattcctgccggcaaattaaagaaatcatttctacagacaatctttccgatgagcaaaccttttcatcagcatgtagcaattttgtagactatctcaagtctgagggaagagattcatacgcattatctattgaaagggtggggagatattttcgtgactttgcaagaggtgacatacttctctctgatttaaccccgtcactagtccagaattttgccgcattcatacggaagcggaaagtgactgaaactacagtaaacacaatgcttgcccaaatgaaatctgtcgtcaatagagcgataagagagtggaatatatcttacgatatacatccttttgtaacgactagaatatctgcagcccctatcaggaagcttgatctgacagtacagaattttaacaagattcgtgaatcttcaccagaaaagagaaagctgattatggcacgtgaccttttttgcctttccttttacttgggagggatgaatcttatagacattatgcaaacagactttagaaaagatgtattggaatattcacgctcaaagactaaagggcgaatgcagtcggatagtgtaatcacatttacaataccgtctcaagcaagagagataatatgcaggtggatggataaaaggacggggaaacttgattttgggtataaattcacatatcacaacttttctcagtatgttacgtattctcttggagatttggctgaagagttaaatattgatgaacgtgttacattttattcggcccgcaagtctttcgctcagtacgcctctgaaataggtattcctgacgggataatagactactgcttaggccactcagacaaatcaaaaggagttatacgatactacaccaaagtccggcagaaacaggctgatatggccatatctcgtgtgattgattacgtgaacaacccggaaaagtacaaagaatatatcgaactgaggtctgatattatgatgatgagagggtaatttgtctgacactttatctgttatgttatgtatgaggcaatggagccactacataatatttattgtaatatgaaaagaattatcaacaaatgcccatgctcgttagaagcttgggttggggcagatgaacctgtctttagcgaacagaatctttacttctctcgtaaggttgaagtgaaggagtatttatacaagagactccaaaagtacaaaggcgaaatggtggagtgctatgtatatcaattttacaagggtaaaccgcgtgaagtgcttgtatcttttaatgtaaaatagcctaaagtataagtcaataaaagccccttccggatattaatctggttggggctttcgtttgcaataaaagcaaacttctacactgcaaagatgtatataatttcccagaaaagttgtatataattattggaaaatattgtatatcagaatggctacaatcttaaatttaaaacatagtaattacaatgtaagtatttatatgtaagcactaatcattttttatatctatggatttatataatctgcttagaaactcataagatacatattcgttcttaactggattttgttgtaaagttgaagggaaacttatgtattccatacgtgatatattatttatattttctttcaatcttatatcttttagttcaaggttattgaataaatctgcatctaaatataattgtcgggttttgttgtttgacaaagaactaaaagagttaaagaataaaagtacgagttcatcttttgataattgagcacggaatatatctgaatactttttaggatagttgaatcctgagaccatttccagaatataataagcgtttctaaaatatgtaccaagttgatttatatatttagaaaaacaaaagtcagcagttttcgatatagcttctattattggtttaaagttattctgtttaagataagttcttatagctattaagcaaatataatcgtatgtatttaaattaataggtatttgattaacaacgcctccagatttactccaattatatccgttataaatattatttatagcaattgctaaataattgtatgaagaataccattgtattgtagatctatttgatggaatgatttcttttgcgaattcctctttggataaatagtttggtatattatttcttatttctacgtaaaatatacaacataattcaaaagttatttgttgataagtcttttcagtagtacaaaattcctcatattgaataatgttccaatcatgaagtgttttatcatatttccaatctattttttttacacgtaatgaatcacgataagaaatgaatattttaagcatttcaaagaatgtagatctttcctcactattcaaaaactgctgtttattttgttttgatgtgtataatactccgataaatgctattaaccctgtaatagctccaaggatacttccaaaatcaccccaatgaaatttactcctttctgaaataaaaaaacagcataaaatagagaatgctattattgatatggtaattatccatgatctttcattttttatatacttcttcaatcttctcataatttgtagtttaatgtattttccgcattaactacaaatatactacttcttgaatattttaagcaccaataatcctattatcactataattacaataaatgagagttcaccaagtctaatttttatcttttgatataaagtaagttccttttctactgggtaaggaactttttcctttttggaaacaaccacttccttcgctggaaggtaaaccgtatccggctgagttttcatcttcgccagtagattacctaggctatcaatggtaagctgcgcctgagcgttcttactgtttgcgatgtccaaccatttcagtacgaccttcccgttctcgtcgcactctaacaacgcccggatggtggcactgtcaggagggatctgtacttcaaccaatttctctattaccacgctatcagctttggtttcaaccggaacatacttcactgtctggcaggaataaatgagaacgaggcacataaatggagccagcgtaatacaccagctcaccttatccattatgtattcgtataacttcatggcttcacaacgatttcagggacaaaaggatattcgctccgcacatcgaagcaaggacacatcttcgtccactcttcaggttccacgataccatcaccgtccaggtcaggcgatgtgtcacgatgccccagcacctcgacaatctggtactttccgcaaagctccttaatcagtttggctaacgctttcttctgttccggtgttcgggtgtcagctgccttaccgtgcgcgtccagaccgcccacatagcagataccaattgaatgtttgttgtacgacacacctgagaatcccttgctattacagtgcgccccgtcaatagtgagcgaacggccaacttctaccgtaccatccagccggataacgtagttgtacccaatacactgaaagccacgggatacgtgcatctgattaatctcctttttacctatgtccagcccggcacgtgtggctgagcagtgaattattattgaatctattttgttcataataaaattacatctatatttgtggagttctgccaatggtaggatggttaataaaaaatttattacaaggagtgcagtggcactcctattttattttagttcagttccttttcttcagcacactaatccgtttcccgtctttgaaatacattcgtgacatgttcttatcacgaacaaatcttctgtccatcgaaaaatatccatgcttcccgtcactgaataccgccctttcgccggtcttaaaccgaatcggcatattaggcagtccattattcatggccgccagtataagcaatctgcgtcttaacaaaatcataaagtacctcccatcacagctatattattaagaatacttacctgatacgtcctgttggccctgacaacactgcttcctatccatttcacaccttcaggaagattcaggacggtaggcgtaacaccacttgaaaactggaacatgtactcattggcaatgcctggaaagccttttccaaatgtgacgttaagtacggatacttctccgaacacatggaacacgttcggaagaagctcggcactgacctcacccgtaccagcattcacgctggatatgcagccattgccataatattccccatgggtatagatagcccgtatctccttgatgtaggaaacggaatcaggcaatatgttaccggcttccagttctttcttgaaggtggcatatttcaaataattgttgaatctctttttcgccatgtcattgggatttatggggggctctgatacaaagcccccacatattattactcggtttcctcattccatgcaaacgcatcatcaagatcctgtttagtggcatactgcttcagagtctcgttcgttgcatagctggtcagttcagccttggtcgcataagtggaggaaagcccttcgatagcctcactcagtgcagcttttgtggcataggtgttcgccacatctacagccttggcatatccagccaaatcctcttcggtaagaaatccttcgaggtcagctttctttgcatacgctgtcaaatcgaccgtaccacccaaggaatcccagttggtttccacacttgcctgattggccgtttctccgatgtagacgaagttcgtttcagccggatatttcttgccgttcagggtaacttctgccgtaacgttatatacgtggcctttcgatacagaagacacccctttcagggcactaaggtctgccagagtaccctttggcacatatacggcaccaagcgcgttgaccttgtttgtcagtgtgtcaaccagacctttcagaactttaccctgctcggcggaaagtgccttattagtcccgcccgttgtgaggtcattgataatctggatgagtgtctgtgcaccgacgtcaagacgaatccatccgccataatcagcctgggtaatctttgtcatgtccttcaggacatacagagccggtttgccgtccccgttatctccaacaacgaccaacatgccgttataagtattctttcctgaataggtagctgcggcaataaggtctttcttgtttggaacaagctgacgggcatccagtggcgcctgtcctccaggctcaaagttcacggcaaaggaagcaacacccgcaggacggtttcctgttgtcgaagccatcggcatgacattgttcatcggcatggcaaagggaacttcacggctgtttcgtgcaagcatggctatcacttcatccgtaatttcctcgccattatatgtgtccggctcgtctacaagttttttcccggcatcggaaactgtgaagcgaagttgtaatgcaccggacatggcacctgtcgttgtcagcttcttgtatgcaatctgaacactttgtacggtcttgtttcctgcatcagatacggtgtacttgtccgttccgaagacttcccactttccggacaccgtattatagaactcgacttttgatacattcttttctgaagggaagtagaattcaaggcgggttccggttgctgcttcagaagcaaacttcgctccaattaatgtatcagtccatttctgcagcggaagctttgtatcaggagctgcggcagacgggaaattggtatctccggcagaggtagaagctgaagaaccattacagtaaaacggataggtaccataaaggtagacagcacctgatttcacagtaccttcaggaagcggattaggggacacggtcgccttgtttccttttgaagtgagcaaggtgtcacctgcgccatgatgagcctggtaattgtactgcatcgtaccgagtgtaactttcgtcggcaatgtcttgttgcttgtactgtttcctacatagatgaaagactggtcatcggagataagttctcctgcacggttcttgtttgcctggccaacaaccgtacaattaccacggttaaatcctgtctgaatctgttctgaggtaggtgcgctttcaccaacctccagaatcttgttggcggtaaaaggagacttgaatgatattgttgcacttggtgcctgtaccgtcggctggatttcctcaaagagaatatcctcgaaaatctggctcagcgtctttgtcttcaaggtctcgacctttgtcccagccggaagacctcccagtttcgaaggagtggcaaggctgtctggcaatgatgtcttgaacctgatgagttccgtcagatcatattcggtcttgcctgatgatttggtaacgataagtttattgctgcctttgtcaaaactgacatctgtgacaccgcttcctccataattcacaccgttcatcaacagttctttggtgtcggttgcaaaatagatagcatccagatgttttgacgctgcatcataacgggcctttaagcccctgtagaattttaattttgttgttgccataaaagtctgattttaactgtttgtttcttcattccatactgcttctgttatctcctcccattctccatccttccggccgtatatcttcccgtcttttggcgcatcgggaatgggaatgcttccaccggttgatatgtcaatggaagaagcaccaaggttgacggtggccatttcaaggttagggacacttatgctgtcctcttcacaagttgttgcaacaagcctgaaagcctcacacatgtcaacggcagtctgtccttccttaccatagttctcccacaaagtcagcgaatacgtaccaaggtgtttgtggtctgttccatgaaaagtaaatttcagcttgtttccctggtatatctcaaaatggaaatcgagaaatctgcctagaggattcttcagcatgagtttcaagtcccttccttccagtggaacaggctccttgttcgtgagtatctgccaggtgaagtatatatctttccctatccttatctttctcatatcaactaggtcatgaaacttattgtcataagtaatattatgattacggagtagatgatttccgctatcaggcgtctatctgtcttcttcatcctttgtaactttttcgataatttcgccagccgttgtgtacttctttttaatgtagcccaccagcaggcgcttaatggaaaccttgttcttgattccgtgaatttcacatacatgttccatgattgaatcaaattcaaatacaatagctatccccagtccgcacattgacgatgtcgtataggaacaaatacctacaggctggagaatagcaacaccaaaaccgaatcccaacactaaatacgaattatattcgatgaacttgcacatcgttcggcggcctgctctggaaaagcggaaatcctctcctcgcttgaccacgctgtcaatgataccaaggacaaaatccgctataatcatggctacaatgaagaccagcatccagcgaagctcaaagacaacgcttcttatctctcctacaaaggagtaagccccggcaacaagaatctgcggggctatgacggttataaggttctgcatcactccttatttaccttaccaccgaacaacctggacagccattcacttgttacaaccgacacgataccagtagatgccagggcgacaaataacgcatcaatcagcacaacccagacacttgcatctgcaggaggaaaaccgagattcatccaccagctgaaaaaagtaacaagcataccgacaactgctgtcacccacatagtcacccacttgttcataggattggatagcttcgaagcgataaatcctactacagcaggaaccacgaccgtaacaagcccggtgaagctggcaaatccggtcaggaactccggaacggaaggttctacactaacggaagtctccgcgaaaacactcactacgcacatcagcagtgcgaccatcatgaaaacgaatcttttcatcttactaaggttttagattaaacaaaaaatgcccataagcgcatcccaacttaatggaacacgctcatgggcgtaactactatttcacacacaaaactactcatttaccatcctttttcagcgaaggtaaatgatataaaaacgaacaaagaataaaaggtttcaaatcgactgacacgccttgtcagtaagttggtagaagccgggtagaataagcaagctagttactattttctacccaatttctaccactcaaataattttcaatacagctttctttatttcagttgttttcattcatacccataagtcctggcggaacttattggaacggctactttaaaaaatgatggattaatgtcaaaatcaggtttcctgagtgctattggattaaatttggaaggtgatgccaataccgtaaataacggagtttataaatttgactcacaacaggacaatatgcccgtgaattatggcatattagttgcattttcttgtgacggatggattcgtatgcaattatgtgcaggtggagataatggattagcatatataagaatgcattataatagttggacatcatggaaacaactataatattaatttccgaagagaatacttcagctcgacagaagatacattcccagtcttatatgtaattttatatttgtcagtaccggttctggatacctctagcgtaacattacttgtgtagctatattcagatattttagttataccagcagcatatacggatgcccatgctaatatgtacgtagctagatactccgtattactagcactagcacgaattgaaagtaaatatatacttgccgtgttagtttctcctatttcaacggattccccaacttgaagtattgttgttaccgtgctattaatcccaataagtcccgccaggcagatttagcactggcggaactgatgggagcggttctactgaaaggagttacaaaaagtgacttggataatgggcttaccagcccatcgcgcatgattgtaatgtttgtgtcagggtatatcaatcaaataaccccaaccgccaattacatatcaggatatgcagtaagatacacatctcttaacacagaaatgcaggttgttgtcgattatgcaggtaaattatattcgagaacaaagaacttatcggatggctcatggacagtgtctacagctagttataacttatatgcatatattattagctcttcgtttactctatctattgttaaaggacaagatggcaacgggcttattaaaatcaatagggcctaatattataatcgagtccatttaaactatgattaaaattctctccactctccccatgaattaccaccattagaagacatacgggtaaaccgtttattgtcatatatggacattgctatttgcgtgtgatattcaccttgactgaaatataataaattcccataagtgaataaatcgaagttaatagttcctagagatatattaatcatatataccctattattcaaacaattatccggatttatgacaataccaccatccctgaaccaagtattgttaatcccaataagtcccgccagaactgacgcaacctgctcttttgtcattactccgacggcatttccggcggcattcacggccacaaaactggagatgtcttccaaagctgggagagccagtgtagacttcttcaaaagttccgttttcgacaccttatgcggcacgccgtttgtatcgtacacctgtaccgtttcaccatcttcttccgttgtctgattcttcatactttctgtatgtttcaatagattgtcagtttcttcacctgtaaagcttaatacaaaatcttcttctgctgccataattgtttttaatttatagttattaatgatattaccaacattgtatattataattatctcattgcatcattaagcccagcaagaaaccatggaagaagcgacgctgcatgatgtcttaccctgttaacttcatcatctgaaaattcggtatcgtcatcgctggaaaaaattttctcagccaattttaaatcagcaataccaactcctgtcacattgaaaatgttatctgcaaacatttctctgacatcaatctccacgaaatcggatttatctatcttcgtgtacttcttaaatttcttaaaatctattttcatgattaatcgactaaaattccattttcaaaaaccagtttatacgttgaaggtatcgaaccattctgtatagtccatgatattgttctcgttgctccttttttgtatgtatatgatccatcggcttgcaatgaccatccggtaccgaactcattagacaatatcgtattggtataaagatttccgtttacatgtactcctccgtcaaaatatccggcataagtattagaactatgtggcttgctagtaccgttccttgaagcatagatgcatgctccaccgtcattgcttccaattactttaaccccaaatttcccgtcagtcgcaccattgaaatttatgtcaatcataccactgttatcatccgtaggaacaccaatccgtatactcctgctatcattgccgaaaaaatcccttcccttccaattcaaggaaccgttgtctatagtgaaacctccaatcttagcaccatcggcagatattgttccggaaaaagtacctttagcggctttcagttcacccgaaaatgtaccgtccgcaccatccagatgtttcacttttaacgagtttacatctatgcactctgtaagaagaagtggtttcccatttttaaccgtaaacacggctattcctttcccttcagaacttttaattttaaacttatctgaagaaataacaatctcatttttttcgatgtcaatacccgtagcaccaagtttaattgagatatttttctctgctacatctacaacgctttcaccatttgacaacaatattcttgctgcacgtacctctatttctccagaagcaagtctgatataatttgtcttgtccctattaccgatatatgtctttccataaacattaaagtatccttctttagttagacgatcatatccgattgaaactatatctttccctgagagggagtaagaacttatcccctgatagaaggtaagagaaggcgcaccgtctccgtatgcagacaacacgattgcagcctgatagtccgggtcggctatgtctccaagttgtaccatcacgtcacccactttgggtatatcgcttccttcgtcacaatgattcacggatacatctatccagttatcaccaacattttccaccagacgccaccaatagtgattggatacgccgtcatacgcgccttccttaatattaaaggactgtgagcgtactaaattccctggcttaaaacgattttctatggctttctcaccatcatctgcaaggaagtaacagcgataaacagaaccataagttccaggagatgagtaacctcttttcccgtctgagaacttgactcctttaccatccttgaaacgaattccttttttttctataaactcgaccttagtaatcgttgctctggccccgctggcgttgaacatgaaggaagctccggccagctcggtctccattattgaaagtaactggaagatagctttcttgcgcacgtacagtttgtcaatccatccgacagactcgccgcccttttctgaagagaatgacataccagcacccatcataccggtcacgaagtcaattgattccaggaaaggagatatgataccgccaagaagcttaatgagatagtttgtctggtcttccttgtcctttctcaataatgttgcaagtgaccgttttgccgaaaatacgttactgtccgatggggcagtagaatcattggtcttaatcacatatatgctactacctccgcctccaacataagtatgccctttatacgtaatcgactccagtttctcttccacatcattaaggcgagagtagggcatactttccccaatagtatataccggagaatcccatggaatgtcaaggttaaactcccatccgagaacacggctttcacggccattctcaaaaaaggctttattgaccaggtttatcttttgcccgaactcgaaaaagcgtttcagcttgtcttcattaacccattctgaccggagggtagtgtagtatgtaccatcgtccttttttcgctggtctgctatcttctgtgccttctctttcagttcctgctccgcgtccggaatcatttgtacagaaacaaactttggatcaaaaccggaaaggatatacttgtcatcattttcaggatatatggtatcatccggcaatggacgtccgtagtcttcgctgcggacaatttcccaaagctggcttccgttgttgtccgggtcaaaaataacaccgaactccaatccattcattttgccggactgaaagataattgtcagctcttgtcccggaagtatgtagtccttggagaaattcaggccagtatcacgatagcgatagtaagtcacggtttcctgacctccgtcttcatttgtaacggtttccgtcctcgtagatacacttgacatcgtactttcaagtcggggatatacctcgtcaaataccacgatgtcttcaattgcttcttcctggctcatgtcaggatacacatctatgtatggcgtaccagcgggaagcataagtcgtctttgcacaactccgtttactaccgtctgctcttcaatggaacggtagttctcaggtatgtttcttgtagatccgaatgcataaatgcgggtggcataagtgcctttgctctcactgcgagtcatggcagacgcttcaacccctaactcgattttcacggcatcaccgaattcgtttcgcccaaaatgaattacgttgtccgttatccagcaatcacagttccacttatcctcacccgccattgagaataaggcatccagcaggttcatattgtcatacgtcattgcaactgccttattctctactgttgaatctatttcaaatacgaattcttttcccttataggtatatcccaaagctttcaggttacgtaagaacacaccaagctgtacatcaagggctgcggtgagagaccatgacgcttcatatccagcatgttcaggagtgtatttgaaaattttgtttttccacttccagtagtaagcatccagtttcagctcataatcatatccagcggtagaagcattgaaagaaggtttctgcaagtcagttacctcatatacttttgaaagtaatccgcccagagaatcatccagaaccccagaaaggtctacatagtcaccaagtttaaaatatataggttcaggcacggaaaaggggagaacgatgtagtcctctttcatcagtgtaaactttcccttcgcccctttgttgataggggtagagaaccttgtttttccggatatgtccttaatttcaatcatatccccaaagttcataaataacaaatggaagccctaaaaatccggacttccatttgaaacaataaaggaaatgtttgttattcgcttctgtccatgggattcggttcgcaaaacttacttgaaaccttaccgaaacacctgtcaatacttaacccgtaagagatgcttttccccaggtaaaccagcttgaagacttcgctcccaagagcggggattttgatgtttacggctcccttctccagttctgactgaaaggctttcttctttgtccgatagtcaccttctgagtctccttctatggtgaactggagagtgatttcacgcgatgctacttttgcattgtcggttattattcgcttcccgtgctccagacggctctcatcttcgatgtagtctttcatctggttgaatccgtcgatagcatcgagaaaactgtcacccatgcggacaccccatgtgctccaggcatccttcccgttaataaataaatctcctgtcatagtcttgctgtattacgtttcacttcggcaatgtcggcctgcatctgtttgataggtttgacaatttcgcctgtgttctctctgatttgctgtaactccaaataggaattggccaggatagtacgtgtctcgtcggcaatgttgtacagaccggtcacttgtgatgtcagggagccgatggaacctcgcagttcggtaatagctaccgtttgctgctgttctgccgtctcaatacgaagattggactcatacacggctgtaaaccgcccactcagttccccggcatcctcgtgcgtcatttctgtaccgaatccgcggctggaggccgactgcttggaactgctgccagccttgtcgtatccggtagctgcggcaagttcatcccgtagtttcaatgcttcattcacgtaccccatatattcgttttggagtgaattacgttcactctcactcaggtttccgtccttcatactttcaccgaatctgttccaccagtcttccagcttctggctgtacatgttaccgattttatctgaaagcatggcacgcataaagtattctgataggttatccgcaaaatcttccgccgatgcatccatatccataagggtatcgatgaaactatcatacatggaatcaaaacttattccggtaagctgttcgaaaagtccctctttcagtccttcgaggtttccggccagatctgcatattcatctagtgcatcaacgacagcatttccatagcctccttttcctgaatcggccattttctgccacaagtctacattctgacgtaataagtccatctgctccggcgacatctgccacaaggaatctgtacctgtgaattctgccatgacattttctcgaatccattgtatgtcactttccgaccagcccatgtaataggcccagctatgatgcttactgtgatagccagcatttgcctgcgcttttgcaaggacattcttgttgtattcctcctgatacttgatggctttattgtactctgctacggatttctcgcttcccttgctggacttcatttcttccgtaagggattcgatggcagactgcaacttttcgtttctgtccgtgagtctgttgatggtatcctgcacctctttttcgtttcctccaataccgaaaagtttgctgaatccgccgaaagtcaaagtatcccatattccacctacagacttaaagacactactgaatatgttacctacgaaaccatccagcccctgtgtcccgatagcatctaaaagagaaaatgcagctccaattatacctccaagtttctcgctctcttctgcaaatatgtctactatatttccggccaaatcaccgacctgagagagtgaaatttcagaatttgaaccaagctgggtaatgacgttcgacaatgtgacaaggttgcttgtcgttttatctgtcgacttttgtacattgacctgagcgttctgctgtcttttttgggcatcattcagtttcttcgtggccgcttccttctgctcatctgttccgcttctcatggcttcgttgtattcctcctgagcttgtgacagttcttcctgtgccttggctaattcgcttaactgtttgggtaggtcggccagcaatcctcctttgtcgataagggttgactggatgttgcttaaagcctcgtcaatgaccttcttctggtcaacagccatattcttgtattcttcggagttcttgaagtccctaagctgctgctttaccttgttcagggactttttggataccttgtccaagtcaccgaagataagttcccagttgattccctgtttcagcttctcaagatcaagggaggagagtgccttatccatttctttctggagtatgtccttgtctccctgggtagtggcttccgagattttacgggtgtactcggctatgattgcatcacgtttctgcatgaacgtaccgtagcttttcaggtaacgttcgttggcctcgattgcagcttgattttcagtttctgtaatttcggccagacctttttcacgcgacgtcatggcattagacgcacgacttcctaatacttcccgctgttcagacgtaagctttcctccttgcgcatcttcccattttttgcgctgtttcctaatttcatcgatttctcgctggtaatccagctcaatctgtctgcgcttcttttcagaaccttcttccatcaggttgatttcttcctgctgatttgttctgcgaagctgaaggagttcttctgcaacctgttgctgctctttcttttgtcgctcggcatctttcttcgcattattctcttgtttggccagagtgtctcctgttacaccaccgagcgatttatatgatttttctgctgcttccaactcttctacagctttcttataagcagattcagtgccttttttagcatcctctacggcctttaattttgcttcgtaaacagcttttgcttctttatatgcttgctgatacgtcttttccgatgcttctctttgcgattccaggccagatatggtgccgtcaatcccttttaacgctgcttgcgcattattgaaccgtatttgaacgtcaataggaattgttgcaaaaggaaaattcttaattttttcttgctcttcctgcaatatttgtcttgctatattgtattcgcgtataatctgctcacgattacttcttgcttccatcagcttgacttcaacaggtttcgagttttcctctgtttcctttttcagtcgattatattcgctcaaggctgatttccacttgttaagatttgcttttgctgattctatttgtgaagcgattaatggggcaccttgtcccgcattttttaaagaagcatttaatgattttattttctcctcccattgttgaatattctttagtatgttttcataactgttcttgtctcgttccttattcagttctttatttgcttctgcaagattgagtacagccagttgttcacgggtataagcagaagaaagtgcaggagaatacctttgtagttcctcataggcctttatctttgaaaactcggtttctgtctcatcttggataacgcgtatcagctcttctatttttttcttgcgttcctcttcctgattcgcaaaattcttttgttcttcattgaatttttgctgtgccttttccgatgcggttgtgctgtcatgaaaggcccacattgtagcaacaagcccggcaagaaccgtagctgccagtacatacgggttagctttcataaccgtattcaaagccttttgtgctatcatttgagctttggtaaccaagattgcaagttccattctggccgttaatgtatcctgagctattcgcactacaataagagcggttttatatgtcccgtatgtagcaatcagtcctatcaaaatcttaccaacagtttcatagttctcaataagacctttcaatcctgaaatacctgcagaagcaattccctgagtatcttttccaatctcattcaacattgtatcccaagcatctccaaggttactcaactgacctgtaagagacttagactgttcttgcatcaggttataatagattcctgattcactagtcatatttttgaaggcctgttctacttctttaaatcctaccttgccttcctttactaaaccggaaacttcatcttttgtcacaccaagcacttttgccagttcctcgtagatgggaataccacgtcctgcaaactgacgaatatcgacagcataggctctcccttgtgtccttaatgtgccatagagataggctatttcactaagctgggagccaacaccggcggctacattaccaagcatgacaagttcatcacccacattctcagctgacgagccgtaagcaatcatttgcttggcagatgatgccaccccttgaaggtcgaagggtgtctttgcggcaatatccaccagctctgacatcagtttatctgctttttccttacttttcagcatggttgaaaaagcaatttcaagctgctggaattgtcctcgtacattaacaagttctgtaacaaagtttttcaaggcagttactccacctattataccaagtactttggttaaggaaacggacatcttttcatttgcttcgaccgtttcgccggcttcttccttaaaagctgcatattcatccttcagtctctttactgaaagacgggcttctgcctgctgttgagtaagtccaaacaaaatatctttctgctcccttaacttatcggtttgagcttttatctgctccgacataccgctggtattaccacccgactttacagtttctcggtatttctctttcaataaagtaagctcattttgtaattgcctaatgacacccctttgtgaagtaatatttgcagagaggttgtttactgtttgtgaagcgctgtaaattccatttttgaaatcacgctccattgtagctccaactttagccgcctcggttaccagccccatcatttgttggcgagcagatgccaattgggtttccaaagcccttgccgctgccggagatttgttcacgtccatctttttgagttgggcttccagcttttcacattcttgtcttagctttacgacctgttcccagtcacttgatacacggaatacgagtgttgccataaataaaaatctaaatattaatgcttaaaattatgatataagcaaatagtattcagactttttgaaatcaaaaacgaaacaacttggcaattgtcgtgtaatttaacttctatttttgaataattagactccatctcggaatagaacaaaaaaggcgcaccattatgatgcgcccgattgtcaatttgttctttaatttatatcagagcctcacggctggaatatcaaaacttgacatttgccattcttttaagtatctcattgtattttgattgtatgatagctctttgcttttctgatgctgtaattatctttcctttatactttcgcattacagattcatttatacctatttcctttgcaaacttacttgcattaataaaagggaacgcttcaaaaaatccacttaagtcatacacatactccacagaatagccagctttataccaacttggaaattcaccatgtttttctttgtaatattctgcctgttcctctaaaacagaaacaaagtcctctttcgcttcttgttctgtaagcccaaagccatacgcaccgtttacatcttcagaatagatagaaattcctccatcatctgctttttcaataatagcctgaatcttcttcataatcgtgtattttaagttttgtcaattaaatgcacccaccgaagtgggtgctgttcttttacttctttaaccccgcctttttcatcatgctgtcaagagtacctttaggtatctctttggctggatgtctgcctacagggataaagtagtcaaagtcgggatgaacatacttgtgatgtttctttcccttttcgattgtccagcctgctgactcaatcaatttgtaaaactctgaaaacttcataaatcaaagaacttttaattgacaatgcaaaggtaacattttcgttactattaagcaagctttgtaacgtaaaaaagtaacgtttctgttgctttttaacattctaatagagccatatctatttcttgtttcttcttctgcgtgaagccatatccttgcctttcaccttcgtgacttttgtcccggttacagtatgaagcttgtcacgctgcattaatactaaattcctgtatggtatctcatagaccacttcccggtatgacagatgcagattttccatgaacgatgcaatctgtcccaagagagtatcatttcctacaacctcggtttcgctgccagcagacttacgttcctcgccaagctgacagctttgagaaaaacctttgagtcaatcatagagagtgtttcatccaatgcgtccacattctcttcgtatgttccttttgccagttcttcgctcaagttttcgtcaccagctatcagccaggaaagagccctgctgtaggcctcactttctcccagggagagaagaacttctttcaaattgtctgcttcttgtacacctgacaaatgggagattgctccggccagtttgttgatagtaggagggtagaccgtgtaggctttcccagcgacaaacaccgttctgaaatcacttccgataatggattcagttactatttttgctccttgattcattctgataaaagataaaaattaaggggtgaagccataaagcccacccctgttatggaattcaatctctacctattggataggcattaagcacctgctgttacttcagatgagtcaaaccagtattccggtgcaacttctgcattttgtggttccagttccaccgcacttacaggaataccgacagccttgtctgttgtggcttcacgtgcaccgatgtcagcacggggaatcacacaatactggtcatcgtcagtcaaagcgacaagtaacttctcaatgtttaccttgcctcttgctcgtttccaacccttatcagtgttaattacatcaccacccatgaggtctttcttggtcggatagtcgtactcaccaatggtgaagttcacggttacatcgcccatttccttatcactacgataagtctgaccggtaagctggttcttgtagttagtgcggcttgcttccgcttcttcaagtgtccatgtatcctgatggatattcttcacctcttttaaggtttcaccttgtaaaagagtatataaagcctgcccagtcaaatctgctgtgatagcatttgtctcgccataccaaagtttcttgatattcacagctgtgattttctttgattctgccatattatttcacatttaaaacttcaaacaaaattcttacattcacatagtgacactttaaggatgtgtcttcctcaattccgattgactcgatggaataatgataggttgttccgtcatagcgtccggtcactccgtcaaacaattcttgcgcctgtttctccagctcgttcagacgtattgtgttagcttcaccttctttcaagtcaggaacgcaaaggttcacttctacgaaagacttcttccagtacgtctccggttgctgcttcttagagtgaatgacaatcctttcggacttcatcggccccgtcagcttcttaccgtgtggaacgatgtcaatttcaaaaggctggcaatcacgatagagtatgttcgctatgtcggtggtaactatcattttatttcctcctttaatcgtttctcagcatatatggctgcaccagtcaagacttcgtaacctttggattcaacgaaagaagcgtattcagcttcattcctcaactccagtccatcatcctgaactgagtatttgtttgacttacggagtgttccggtatgattctgatagcttccattctttacagcgtaatcgacagcctctttaccaaccttctccttaacggctttcacctcggcataaccttgtttaaaaaagctatccatgtccgaaaaatcaaactttacagccatatttctgagtaaccaaaatagttagtattttttaccgtataaaccttgccagttcccctggtattatcgccatccatacatctgacttcatcgccagccttcagggaggttttcttttcacagactatgtgatagttcggtcggtacacctcgccgttctccgaagtaaactccttggtggagttatcatcacaccggcacttacatacgtcctgccagctttctccaccggttccgggaataggccggccgaactcgtctgtttccattggagtagtaaccttgatttgtaatatatgtggcgcgaatatcataggaatctgactttaggtttatctgacagtgtgtcttcaaggccatacttcttgcacaagaatgagtagtattccttcaagcctttggtgtcccaggacatagagaaaccgttctcgctgatggaagtagcacgaagtagaagagaggggataaacttcgccatagacaccgaaacaagtccgatgtttgacgggcccatctcatcctctccgcttacttctgaagacaaacttatctccaaaaggtcagcctccgacaagttgatgccgaaggtctgaaacttctgtgatatgtagtcatttactgtcatgcgttcatggttgacaaatcaaagttcacaatcagattcgggttcgtaatctgaggaatccactctgcggtgtattccagataacgaccgttcttgtccttgtaaccggaaataagcatatcaccgtctgcctgggtgtagttacgtcccggtacgccgtccactgcttcgtatggagtgtggaaacgcatataaccgaccttatcctgcggaagcaaggtgatacggtcgtcggcgtaaatctgcacgttctttccggtctggtcttttacgtaatcttccttgatttcaatggccggaagcccgatgccagtgaacacttgggaagccagttgagatgtaatcaacccggttgaaagatacatctcatttcctgtaagctgcatcttgaacttgtcaccaaactcagccgacccgatgatattcttcacgaaagttcctcgtgacataatcatcttctggaaattaccgtagtccgctttcagtgcattaatctgctgctgcaaataggtgatgaagttcgtcttcgcaccagtatcaggcttgatgaacttgaacggcaattcaatgttaagaaggtcaacgcctccggcattgtcatccttattcttgactgttgcttctccggtcatcagaagtgaacctacaataatatccatgcgcttgtgggctgccaaaagtacctgacggtaatcatcatagatgaagttcacgatttcctgcatggctgctacctggtcggcaggtttagctgcattgaacttgtcaatcaagtcctgaagttcggacaggcggtcaatggaaatctggtaagcatcgccaagataagcgatttcaccatatcctgagccgatattccggcgttcacggataggcttctcaccataacgagagttgatagaaccggccatcactccagtaacctgaccgatgtagtccttgaatacacgggtagtcgttctacggaaatcaagatactgctgccagtagattgtatccttacgagtctgaaggacacgctgaataacggcgttaacgatgttggggtcgttaaacagagtatgaatagttagcatcatgttttacctcctttctttatttgcttgcaattacacctgctgttctcaaagatgccagaagggcattcaattttgtatgtgcatcttcctgcccagtagcatcatctactttaacaccttgctttacacctccgagagcagaagatgttgttgcagacaaagtgaatttgttggcttgggatgcgataccatccaatttagctttgtcttctttactcatcaagccatcttgactggaagacgctttggcaactacagcctttccaccttgagtaacgtcaggagcgttgaactggaaatgcggcatgttggccttgtcaatgtcagagaaaggcataaccaatttggtaggctcaatctcgaatgctcgcatcaaaagagcaactaatacaatgccttcttctacttgtactcttccgtacaaggctgagttagcaatgactttcggagttgtgccgcttaccgctgtagcttcatagagtacagtaccagcttccaatgtttcgccaaagtcggcagacagcgtcaacttatcgaaagctttgtctgatttgtcaatactgttgatggtagctccatgagaaccattacccagatgcatacccacataagccaaagagtttttcttgatcttcaaagtggtattggaaccggtggtaaacttttcatagacttctacacggatggccacctgagcggttttctttactaagtcggcggcaatgggagtgaaggatggaagaaatgaaccagcgacaaggttggtcgtatccagcttgtaaggccctctgcgtcttactccggtagaaacatcatagcgttcctcgatggacggttcaggctccatgttgtacttaaatcctgctgacataaattacttgttttgttgttcgacaatagattttgtgtccgcctcaatcattttggcgaactcactcgcttctttctcctgcttctgttcggcagtctcaggagctttggagaactgaaacccgttgttagacatatcctgcttcatgtccttgaaataagtatccaagtccgtgttctcaggaatgttgcggtctttcagcataaattcgggaataccgtacttcttcgccactgctgaaatctgagaattgcgctgcgcctgcgcttcattttcctccattttggccagcttgtcggcaaacggcttgataccggcggcaatgccatcggcaatcatctttgcgatgtctgtctcctgcggctttggagggtcgtttggtttcggtggttctggtttcggattctcgattggtttcccgtctttcagtccatgcttcttctcgtagtttgaaacagcggaagtctgcgcctgtcctgcacggaaatcaccatagttttgcatcacgtcctgaaatgagataccctcaacgatggaggtcaccttcgtttcgtccgttacaccctctgccttctttgtggcgatacgggtgagtgtggcagtgtccaccccagcgaatttctgttgcagtcctgccaagatttgttcaaagattgtcataccgtatgagtttgattaataatttcatacggtaaatttacttatagagaaagggaaggggaaatttaaaggctaacgatacgaaacaattagggaaatgttcgtttttaggtaaaaagaaagcgtgactacctaaataatcacgctagatcatcatccaattatacttttaaaatttcaatatagctgcttctatttcttttttgtcagaatcttttacgttccttaaagcattcagaaaaggtaatattaaagagtcatcaacgatgaaccagactgggtttttaaataatttagggtatccaggatcatctccataaccattccatctcattgccattcttctttccccattttcccaaatacctatcgctatagaaaaatcatcattttcaaatacaacattctcaaccttaaaattacttggatttacatcttttgctttcattgtactatcctccattatatttaattaataatcataacaaatttatagctgccagttcctctgtcagcgcgttaatacctttctgaatcttctccaactgctgtttacggggtttgtgtactccagccgcataatgccataactggcgctcattgattccggtgatccggctcaaagcggcctttgtgaaaatactgctgtaatagttgatgaaggtggcagcatctatcttgaacttcaatgtgaactctccctgcaaaatttccactggagcgatgttcatctccttgcatgactccaggtaaagttcaacagcttccttcatgttcttctcgatttccttcacgtcgttaccgacagtaatcaccggagcaccttcaatataggcactaagattatttccagcatgttctacaatcacttctacggttttcatactgacctcctttttatcgttaaacaaaagaggcgggggctattttagccccgcttgcctcagaatgttgtaataagtgcctttctcaacgcctttcttgccgtggtcgggtacaatcactacatggctaccatcagtgtaaaccatgtgactgcctttctgcctcacgaaccaaaagccattttcagtaagcagcgttacaacgtctttaactgatttgtagctcatagcgtttaagacttaattacgatgcaaatatagtaaaataacgaataattacaaagaagtattcatgtttttactatgataaaggaaatagcgatacctcgaaagataccgctactcaaatagtcaatattttagatttatatcattctgttttgtattatccccgtaaatattctgactgggttgttctattcttcagatttactgctggaacttttaagagaggaaagctgtttctgcttctcgatgtcgttcttctgtttctcagattgctcttccttgatggcttcaatctcatccagaactgcatccacgttccccacaaaggtaatggcccgctgttgagaccagatttcaccgtccttggccttgatagctgtgtctatcttgtctttgatgtcctccagcttatacggctgcatctgcacatccacatcgatggtttcggaggcttcttcaagggtggaattcacggaacccaacgcggagacaaggaaatttacacgtcgttgcatgaactcgccgacgatctcgttcagattttctacgttaaggtgggtggacataaacacataatcgaaagtcacaccggaaacggcgtttcctgtacctttcagggagtcaaaagagattctgggtgtattggtcagtccatatatctggctcagcaaggtttctacctcgaacttgacagtatcaggtacctgtgaccaggtaagatactgggcatttgctccctggccggtcaactcgacaacacggttcttgaactcacctgagaaattctccacgttaccaaaaagcatgaggatagggaagaagtggtagtcgatacagtctgcatagtttgagagaagcttctccagtcttacacggaggctctttatcttttcacagtacgcttccggacggtacatataaatcaccggcatcttcttgaatccatgtgcaaatgagcctttgtcagtccagttgcttgtcagttcccactgataaaccatgtccttggtaatggtcatgaagcaggtaatctccacgtcattcagatctttcttcttgtattcacgggacagggccaccaaatccccctggtcattgaagaaagggtagagcttgtcgccacggaacggagaccagatggcactcttcagacggtattcaggttttgatttgccgaagattcctgaaatctttcgtttgagctttgcccagaagccgtcatccttcaccacataccagtattcggccacttcctgctcggccagccatgcccggactactttcttgttctggtatttcaacttgtttttcttgaacacctgcttcaatgtggaaagaaggctttcttccgactggtccggctggcaatcaaggaccggttctgttcccacggtgaaggcagtctgaatgttcacgatgtcctgctcgataggaagagcaatcctgttcgggtcaacttctttccttgccgccggctcaacatattctttcccggttgtagggtctgtaatccgtttctcaggctgggtcgtaattttgattttcgggtatttctcttcatctatcactatctcgtgcttgttcggattccagtcgttgtaaagagcgtgagcgtttggttgctcggtctttcgtcctttcttcagatagtagatttttctctctacttccggcatagctaaaatttcttctatagtcatatctcaaagtttaatgtccaaatattcctgaaacgtctttgggtttcataattctaccgagaagttctcccagcacatagtagcgtgcagcatctatgccatgattatcatggtcttcaggtttgttgatgtagtttccatccttatcttttgcccagacataatttctgaactccctttgcaggttataagaacgcttggtaatgaatatttccattccctgcatcttgtcaataccggcattgacagaaccttgccctttctctaccgcgtatattttaatccctccgttatgaatctcctggatgagtcgcgggtccgcactgtcggcaatcactctcaaattccacgggcgtagcgtctttataatatccccagaaagtaatccagttctataatccacttcatccagataaagcgcattgtcaatgattccacaccggatagaagccgatgggtcattggtataaccaaagtcctgtccaatagccactttcttgcaccacatggggaactcgtccacaataccccatttcttgaacacggcaccttcggccacgtccgcccatcgaccgataaccacatgagcgtacttctccggattcttctctttcatttccttgacttctctcaggaactcaggagaaaggttctctatattgtcgaagtaagtcgtatggatatgaagtacattcggatgggtggaaatctgtacctggacgccgtcaatctccaccagccggtgagtattctcgatgtatttcttgtagatgaagtgattggagtcacagggattcatgatgatgataatccggttctggattccctttttacggatggagagcataatcttgtcaaactcgtcctcactggtccattcctctgcttcatcacagacaaaggtggtgataccctgaattgatttcaacttggccgtctggttccctgaagaggttttgataccacggaacatgatacggctgccggtcatccggtttactatatcggttttggtggtcttgaaatacttcgtggttccatccaaatctatcttttccatcatttcaggaataatagacatcccggcagataccatcgtgtaacgggtataaagaatctggtggactatcttctctgtgggagtcatctcgaacgtcagccgctctatgaaggtagaagcgttgaaagactttcccgatccacggccaccggtaatgagaatgataaacttctcgctatcggtatataacggatgatatatcgcttggggtacaatcatttcagcttgtctttaatccatgagtcgatagaaattccgtggtcaatatcctttggaatgtctgcgtcttcgtcttctcggtctccaaaaccttcttttcttcctaatgtggaaagtaaatagcgaatcatatacccatctggacgttcacgccatccgataaagttcccattttcatctttctcagggataccaagcgcaagtacacgtgcagatacaaggcattcatctaccagagaacctctttcgtcggtgatagcatctttgaactggctgtctgctctggcccaatcatacacggtttttcgggttacattgaatacagcagcaaccttagagagatttccacctgttttatgaaggacctctctgaatttcgatatgtctggcttctttcccatgcgcgcgtatctgtttattttgattactcaatcaatttcaaaacctcttctcctttggcaaatttttcatccgtactgatacccaacaaatcacaaaaatctgattttgtctcaaaagaagaaaatgaaagtattatataagcatcttcatcctgcctgtgctgaaatgcagattcttttacttgttgctttaccgctttcatgtgttctttcttctcttcatatggcagtgcagcatcttcaggaataggattttttataccatcgaagtctgttggcaataacaagtcatctaatgactctgataaggaattggcatcaacttcacttatcgcaagtatatcattcaactcatcaggactcaacccgacttcggaatagtctatatcaggcaaataactcgcgagcaaatctaaatcaggcttggtgtttcctactgccatataagtaagctgttccttttcttttttttcgtcaaggttcacaacctccacttttaccttatagtctgtatcagaagtaccatcgtatttgtaatacatatccatagccttgatacgcctgtgcccatctattaggtttccgcttaattcattccatacaataccaccaagaaaaccgactttttgcaggtttttcttttgcagtctaatacgttcatccgaatgcctcttagggtttatcggattcagatttatctgcgaacgttttattattcttgtctcactttgtttcagttccttcataatcatgctcaaacaacaatcgttctaccatagggtattcctctataacctttttcaagtctgccgggaaattacttctgagccacaaaagatagttcatatcgcttatattcgttcctgccgactggctgttaccgtatttctccggcttaataagacttttcttttcgatatagttcagaatatcaaaattcttgtaagctgataggggataacatttcttttgcgcttcattgatagcttcatctttgtacgtccttagcatcaaccgcctgttcattgagtcggattgtttgaacccgaaaaatgcccagtctatatgatatttttctctgactatctctgtaagctgcgccatactgtactgcctctgcttttcgttctttatacaacccatataaccactcttacgatatgaatataccgcaaagtgaggcacttgtatgaacttcacattatcatatttcttgcaggtgtagttgatgtacctgcttatatgctgcaaatccttgacaacatacatatagacgcatacaatttctttaaaatagggcgacataaggtccaaaagggctatactatctttacccgatgccgagtgaaatagtataaccctctcagtctgttttgaaatctgcttaattatgtttattgccttgtccataattaaacaaccctaccaccgactttcttgttgattcttgctctttgggcagcatttgtacccattgattgaaagcgtccggcttcatagtccgctcttgttcggtacttcttaccatccgagcctgttgcgtaaacttctggcataatcctgaatttaaattaaacaatctttttacctatatgcagacaaagccgcataaagcggcttgacttattttaatccttcatggttaatcacttcactaatatgcaggtaataaaacaatggaatttcttctggtggatttttcttgaactcttctaactgttcgtcgaaatcgtgaaaatcaaattcttcgtgcatgaactttatgccctcttcagtaacctcaccaatgccgatttcatctatcgccacatcaagaaaccatggggcgcctgtgctataaaaatgaattgcttctatatcagtacgcagaataggctggcactcattttcacgtccttcttttctcaatctctcgttttcttcaagttgcttgaaatttgtaaacatcttttcgtatttagaacttagcttacgagcttctataactttcttgccattgagaatatccaaagcattagccttcgtcattatcagcgagtaggcttctacttcttggccattatatttgattgttttcatttgattattaatattttactattcaaaaatagtatatacttacctcaaaacagaataaattgctagtacatacgaaacaatatgccaattgtttcattttatacacacgccaacttaatgacgtgtgtatgaacggtttttaagctgccgatttactgtttactaaatcaagtataaactttctaccaagttgcgtccaacacaagtattgctttgcaacctgcataccagtggtatcacttgtataggtgtgtgtcctgtacttgtcataacctaatcccctgtatttggcataaagcatgtaaaccccattctggttgtacaatacgcctaaatcttttaatatcttgtacagctttttggcactcatgccaagttcgttggctatgatatttgttgttatcaatccttcgctttgaaggacattgtcgaagtaggcagcttttggcgccatcagtctgttctgttcttctaccagattcttttcggtttcaagtacagatattcgttctttctgcctttcgatggttgagtttgctaacaggatggcttttgccatgatttcttctggcgtatcatccgattttactgccatataaccgcctttagttcggatttctttcagtatggcttttacgcctttcttgaactgtttggctatcggtttgcggctttgcatcaggacttcatataaaccgttctctgtgagcatccagacttgacggttctgacctgatacgaaaattgttcgtaccagcttttcatcttcatcaacagtaccaaccatacgagatacatcatatttatcttgtgatgtttttgcatattcaatccattcagctacatctttagcaagaaacaacggattctctgcactgccataaacggttagttctttacccaacaaggtagttttctgtaaaacctgtatttcattcatattatttgaatttaaattaccaatctgattctttacacactctgtcaattctctattatttgcgaaatacatcaaggctatgccgatttctagatactggccaaaatacatgatttctcttagtttcaatccgttttcggctgcatacgtttttatttgcgacatgttctttgatttccatttgcttatgcttatcccgacatcagaattaagccccttgcaagaaatatatatcctgccattgtaggtacaataagaaatttgcttatctttgtaccgtatgaattgggattcatttatggtttctttgttcatacgctgtaaaacctgaattaaacatatcctcattgatggccggtcaattcatcaatgaggattttattttgaccgtagtagcaagctgggattcgaacccatgcacacctgaatgccttgccttgacctgccacgcttgacatataaaaaaggcaaatcttaaaagaggtctgatgtggcagtttaccccttgaaagaaatgccttgaatatctttgcagcgcaactgccacgaagcgcatttcattctatggcaaaattaccaaccgccaaatgtttatcctaaaaattgccgtaatcagaacaaacatttggctgattgtttcaaaataatcgtgtgagggatttacattgcagttttcatcatgtttggattaaagccttgcataagattaccttcgcagtcaaaaaaggtgtcttctcgtagcagactaccaataagttcatttgcaagcctaaatatcgggtaaacttcatcattagagtctatcatgccatctttacaacatttcttttcactcagagaacgcaacagccaaagtgttttcatgtaatactggtatttttcggggttgttgaacattcgttttaataacataatgtttgattcagttattactgtttcttgtttgttagtaaatgttatcttgtgcaattcaggattaaagtctataattctcataagtcatattcttttaaatattaatactaagctatctttataaggttgcattttttgaaacaacgccattcttctttttcacaatcgaaatacacctggcagttatctgctgttttctttgtaccctttttttctggtattctactactcattaaagtaccgaaagcctgacgtagcgtgccgtctgttttcttgaaatagaactcaaccaccttcttatgaagcaatgcacgaagtttgatattagtccacgcacatttcaacgcctcactcatagaataaccgttcttgcgtacaaatgaccaagcaagactcataatctcttttaattgatttctcttttctattgccatagttctttatattttattaattatactacttcgttttatttgatactgcaaagtaagactatatagtttaattatgcaatagttacatagataatttatgttaaatataaaactatatagatttatttttcacgtttcattgtattatatagtataaacacctatatttgtgcaataaaactatgtagtattatggattttagaacaaggataaaagaactttgccagtctaagggtcttactcaaaaagatttggctgataagatgggtatatctgatattagtcttaataagacattaagaggtgattatccgcaattacaatctttagaacgtattgcaaatgctttagatgtagacatttcggaactatttgtgagaaatacacctgattcagaagtaaacggttatgttaaagtgaaaggaactctttatgaagttcactcttttgaggatttaaggaagttattagaaatggatgtttaatcaataaaaccaaagtaaaatgaagaaaatgttatttatactgcctatactagtggctttgttttttgtagggtgcagtagcgatggtgatggagagcccggaggaaatagtggaaataaagttctgtctgaaattgtaataaacgaacacgaaaagaaatttggcgagataaatgaatatggagaactatacgaacagtatatctataatccagacggaacattgcaagaaaaaaccaccaattactataatgctttattggatgataggattgattacaattacaaatatgaatacgacgacaaaaagcgtgtagtggaaatgaacgaatatacgtttactttgtttgaaaaaaaacgtaaatatgaatataacaacattgattccgtgtcacgcatgttggtatatgatgacgatggagacctgaatgaagaatggacatacgaatatgatagtcaaaaaagattgataaaaacagtagaaaaagacatttgggttagtaaaaattttggctatataagcgaatatagatacgaagggaataacgcttatatagaaaagacaatgcttaatgacggttctttgttcgggaactttatctttgagtacgacacacatggaaatctactacaagaaacatatatcaacggagatacagggagagaatcattagagcaaaaatatgaataccaatatgactcttcaggtcgtattcaaagaaaatctaaaaaggaatcatattcagattcttggacatattatgactacttttataatgaagatggtacaataaataaaatttccgtatcatatagttttaagaatgatgaatccgaactaagatataactatatttggaaataactattccattatgctttacagtttttgggagcataaaaatctgtcacttgataaattcaatgctttattgtatctttgtagattaaaataaaattctagtataattaatacgattatgaaactgaaaagtctcgaatatgttacacctggatggtctttagatggtctcaatttgtcagaaacaagtctcatcgtaggccgtaatgctgttggaaaatcaaaaacaatagaagccttaaattctttagtctctgttatactccaaactaaagaaattgctgagcacgataattttttctataaaattattttttcagacaatgatacagaattgacatattcatttgcatgttttcaagggaatattaccttggaacagctaattgatcataacgaaaacatcttaatagaaaggaatgaaaactctactatcttttttaacgacgaaattaaccctccaagtaataaacttacaatcaatgtaagacgagatacaaaattatatcctcaaattgaaaaaatagtaaattgggctgaaaattcatatgggatattatttaatcagattaatatgtttcctaatggtaccaacctatttagtactatgtctaaaggagaaagtattatcccaatgtttgaaaaattaaatgatgatttgaaactaaaggttcaggaggaactaaatgctttagattattctattgacgaaataaagattgtaaaaattggagatgagaaatctgatataagagtcttacagattaatgaaaaagatgtaagcacatttttatgggaaggattgttatctcaaggaatgcaaagaacactatacattcttgttcttttattctatattgtttctcaaaaaaagaagacacagacaattgttattgatgatttttgtgagggattagattatgatagatccataaaattaggtaaatacctatataaattctgtttagaaaataatatacaattaattactacttcaaacgatagttttttaatggacgttgtcgatttgaaatattggaatattttacaacgtaaaggcgataaagttactgcaataaatatatataattctcctgaattatttgaagattttgaatttacaggacttaataattttgatttattctcatctgattttattgcacgacataaaaaatgaagaaagtagcagtttttgtagaaggacaagctgaattaattttggtcagagaattacttctaaagatgtacgactaccaagatataggaatcaattgttataacctgatttgtgataatctggatgaagctccttatcaatatggtgataaaatggctcataactattatatgcttgtaaatgttggtaatgacaactctgtattatctaaaatctttactagagcaaatggattgcatgaaaagggatttaccaagattatagggttaagagatgtatatggggacttttacaagaaaaaaa

SEQ ID NO: 3825 - DNA, 4593 bp, Unknown
  gut microbiota DNA sequence
acctggctcaatatataaaattacattttgcaataatggaggttgaagcatggtttttaggatttaacatatttgaacgtattgatggcacattgtcaaatgattttattaagtctaagctaaattatgatttggagaatgatgatccagagattacctattatcatccagcaagaattatgggagatatttatggcctgattggatcaaaatatgacaaacatgaaagtgatgtatcctcccttgtgagttgtcttgaaaaagaagattataataacttaatagaaagtgttaaatgctcaacatttacatctttcgttcaagaattgctaaattgatagtgaacaaaaagccggaagcataacgttccggcttttttacttgattagttcttttactaattacccatcattaagtcccatgtaagtacgttttgaaacttgtgtattccaactggttccacttctattaaagctcccaagatacctgcctgcaatcctatttacaagattattaggattgtcagagttacttccataacgctgttgagctaatctgtcggcttgtcgaactatttcccaacctgattttgttcttcttctgactcggctttaaaatttaaatttgttagacataaaaatttaagcatagggactttatccccattagaaacattctgttacttgattagtcctttggatttcaatctttctacgatttggcagtaaaggtactctatatcctgccggaaatccttatactgctggtagataaaggaaacatcagcgatattgtttgatattacacacggagaaacatccgggaacacgccggaaatttctgctcggataccgttcggcagccgtccgccggcaagcacactaggggcgaacaagaacaacacaatgaagaggaacttctttcgctgggtaacactttccggattgggcggacaatctgccccggaaagtatctccctgaaccactcataaatctccgggatgagagaaaaatcagtcaggataggggaggataactcctgctcgcgttctgataatcttgatttctgttcacgtattgatttcaactccacgattgatgaaaattcttttgtcatagcacgatttatttagttggaaattcttatatttgcatcataatcgtgtgggggagttggcttctaatcgtgtgggctggctcccttttttattttatgccaagtgatatgcattcaggatggcgaaagcgtagatgataaccgttaccagactgtccaggaacaccgcccatgctcctagcttttggatctggctgaagctcatgaccaggacaacaaggaaacacacccactggcttgaaaacaatcccatccccagcaataaaagtccgatggtatccatgaagaatgcaacatgaagccatggatgcgccatcagataccagctttttgctgtcttatccagcttctgaaagacttttacatgtcggtataaggatttacatctgaacagcttcacaaactcgtacagggcttgtatgatgattaaggtgtagaatacgtgtttcatggtcagtagcttttatctccgtgcttatacggacgtagttcattatatttcatcttctgcttgatgtgccagaagatgtcgatatttctatcgcggcagaaagcgaatatctcattcaggaggataaatggttcatccctgtagaagttgtcggtgacatagacacagattctaaacatggactccgtgaagctcatatcggaatagtcttccgtatcgcttccttcgtagtcaaagctatccaaatcatatcctctcaatccggccaaatccaacagacgaatacaggcatcggcaagttcttcctcgacagtccctttgataaatgcctcaaagtcttccatgaatctccttttcctagtttcttcagtcaatggaacgctattcccttgccattctttgaacattgcaactttcgcatgtttccctttccgatctgcttctaccgcttccataagttcggatatgaccagacaaaggaaatgttcgtcactcaggttttcttcatgccatccgtgggctactgcacactggtaggctttatctcttaatttgtttaagttcataattttctatatttatgacattttgacatcgtttctatggcacacatattgtatgcccataataaaatttgattatatctatatgaatgaatttgattcttataagaatgattttggttttgaaataggctctgggttctcaggaaactctgattacatgaaggctctggatgagaagaaaagacgtgctctcatggaagagcaatacaactttcttcaaattcagaagtcagaaattctcactcaacagaaatatcgtgagttgcatcagaaggaaatacttgctcaacagaaataccgcgaagagcaacgtaaaggggccaaccttgaaaaatggcttcttatagtcaatacttttattgccatcgcagcattattggtatccatattcaaataaaatacccgataaccgccacaaagcagttaccgggtattcacaaagcactgacaagggctgtcagtaagttataaactccatatcatccaccattttcgcttctttgcgtattcaagttctctcttcaaatccttacaaaggtctatctcttttccccattgagtgtgataaaatgtcgcatcatccttaagcttgtttacttcttttttaagttcctcgttctccttttcaagcccggctataatatggcttttcagtttcaaatcacccaacagtctttctgccctttcaaagttccttcggctgtcttttatcagcatcaccatgtaagtatcacggctgaatagccttcccgtttgatgtcttttgtgtttcatactcataactcatactcccaaaaactaagttttcctttcacattcataatcggcttatcaaataataccgcatccttcagtacccagttccagcaacctttctcagcccaaacggacggatgattcagtacgcagtcggctattaccacactgccgatgatagcaccttctggaagttcctttgattctagtatagagcatatctttgaattaataaaaagccttttaggtatgaaataatcttttgtcctaaccttactcgcatgtatcagtatcttctgtccgatgtacttctgaggacacttccatgtccggttctcaatgtctttgataccgtgagcgattagactcgcccacggctgtttgatggatattgctttcatttcttatcctctaataattcagggttatcaaaaatgttaccgattactataaaactatcttcacgcagccactctcctaaaggtttaactcctaaacatttattatcaatcgaaatacaccatgcgccaagatttatattccagtcaacaagacaattatatttgttttccttacattgaagttgaataatgtcaccctcgtaaatatcatttccattcttgtcatgcaatccagtaaactggccgatagtgtcaatatctacaatacaatctccattaccgtcatatatacacataacttttttatttaaaatattagcataagataaatagccgtatatccaacctattttgtttttcgctctgaatttaatttctatgttcataattattcctccgtattaggtattaagtctttaatgtatgcccatcgtttaaatgggtactgattcataatgcgtttcaaatccttttcatcttttgcggtaaagtcaaaccagtcttcgtttacaacgtgcctgttgtactctggtaattctttgtcaacatcatgccacacgctgttgatgcgccagtctgcgccatctatgaaaccgtgttcaaaatatgaaccatattcagggttgagattatattcatcaatagtacgctttgctgctttttcaatatcttctcttttcatagtttttcctttccacctaccccagcagccaccacatgactgccaggaacaggtaatacaatttcgttttcacttattaattactattgctatagttttagttccagttccgctttccttgaaagtgccttctttaatctcgaatttcttccctccattatcctccagccattgtctaaaatccttacactcagattcacttccaaattcccagtgaggaccagttattgcagccaggacaccgccgggatttaaacactcatacatacgccttacatgccgaatgtcctggtttttactaaatggtggatttgctataatcttatcatactgtgcaacatcacacttcgtgaagtcatctccaagaatacatatattatcctttttcgatagaatctccttattctccggcataagttcatagcaatctacaattacgtccggacagcttcgatgaatcgcatctatgatagcaccagtaccagcactgggttccagaatcttttcatcttcatgcacgccaccggccaacataacaagccagtcggctacttctggaggtgttgcaaaaaactggaagtcctgctgaaggttacacctcttacccttgtgtagtattg

SEQ ID NO: 3826 - DNA, 272 bp, Unknown
  gut microbiota DNA sequence
tgtgccgcagccagaatcaccgcatccggctgttcctcgtcaaagaacttctttaccgctatcgggtccagcaaatccagttccttgtgcgaacgtcctaccaggttattataacctctttccttcaggttattccagatagcggaacccaccagtccgtggtgtcccgctacatatatcttcgctgatttgtccatattcgacaaattaattgtttattgtttcagagacagaagaacaaaagaacatataatcttcattattaattcttc

SEQ ID NO: 3827 - DNA, 188 bp, Unknown
  gut microbiota DNA sequence
aaataagattacaccatgcttaaaaggaagatagaaacatatttagccgactggaaacggtctgaggacagaaagcctcttgtaataaaaggtatccgccaatgtggaaagacatacattgttcagaaattcgcaagggagaattatgaaagtgtggtctatatgaatttcattcttgagcctgacaa

SEQ ID NO: 3828 - DNA, 200 bp, Unknown
  gut microbiota DNA sequence
ccccagaatttctttatcttgagatgctgcttgagccatttgaagaacagttcgattaaccatcttttcttataaagattggcggcgtccagtgcagaaagttgttttgcattcgtcaagaaagtgaactcacggtcatcctcttcgtcgtaatatcggacgagtctgaatgactcaggatattttttctcggagagata

SEQ ID NO: 3829 - DNA, 7464 bp, Unknown
  gut microbiota DNA sequence
tccttccttttccccttgctttcctttgtttccttaccgcttatccggacggccttcagaaatgcgcctggagacgttttctccgcaaaggagagtcattctttattggagcatccagacttcctcagagcgaatgaaaacagtttgagaagagaaactatattgaagatatgtttacttcttcataggattattatcctgcttggaatttctgacatgttggggatgtagaaggcactttggaagaaggggatagagaaggggctgtattgtaccaaccttcctgaagtataaagacaaaaaaatccccgaacttcacagtccagggaattttagattgatttctataatataattaggttaggttagtgaatcattgtattggtgccttccacgatttttccttgagagaatacgcagcgtacattgatgtctttgtcaagaatgacaatgtcggcgtcttttcccttttggagagttcctttgtgtgattcgataccaataagcttggcgggagtttcggaagccatgcgaacagcatcggccaatggaatggaggcttttttcaccatggtttgaatcagtacatccatggttgccagacttcctgccagtgaggagtggtcggctaatttacaaactccgttttcgatgatatatttcggatcatcaatggttcctccctcgttggctgcgtatttaagtgcgtcagtgaccagacaggtttgctctactcctttgagcttatagactaatttcaggatggtagcaggcaggtggataccgtcggcaattacttctacactcattccgtctgtcaggtatacgctttctactgtaccctcatatttatattcacggcgtttgtgaaatcccggcattgcattgtagaaatgtgcggcgtgagtgaatccggcttcgaatgcggctttgatttccggatattcggcttcggtgtgagtgactgctgtcagaacacctttggaacgagtatatcttgcgaagtcatgtcctccagggagctccggactgatgtcccagcgtttgacacactgtgtgctttccagtaaaggaatatattcttcaggatctggatctttcaggaactcttcccactgtgctccagccattttcttattgaggtacggaccttcaatgtgaagtccttgaataatgtttccaggtgctttcatcagttcctcgcatgtagttactgcacatttgatattatcaaagctggtagaacttagtgtggggaagatagaagttgctccgtgggccaggtgagcttgtgtagctttctgaaaagcttcggtagtaccttctgtaaaatcgtgtccggcacctccgtgtgcgtgcatgcttacaaatcctggtacgatgtacatgcctttggcatcaattactgttgcaccgataacagccaggtcgctgttagttacttccaggatttttccgtcgctaatgaggacagagccgtctttcaaccatccttgtggggtaagaatatgcccatttatgatttgagtcaacataatcgtcgagtatttaagtcgttaaaaaagtttgttggtaccttccaccagttttcccattgcccatacggcacgaacattcaggtcgcggtcaagagcgatgatgtctgcatcttttcctctttccagtgtacctttgcggtcgagcacacccataatgcgggcaggtgtttctgaagccattctgactgcatcttccaatggaatctcagccttttgtaccatggtacgaatcaggcggtccatggtggcgatgctacctgccagtgcagaacggtcggccagtttacaaactccatcttcaatgatgacacgagggtcgaaggcttctttgctgtcgctggctgcacatgccagtgcatcagtaatcagagctgtcttttctactcctttgattttatgtaccagacgaagaatggtaggaggaacatggatgccgtcggctaccacttctactgtcatgtcgtccattaggtagatactttctacagttccttcgtacttgtattcgcgacgtttgtggaatcccggcatcgcattatagaaatgtgtggcatgagtatagccggcgtagaatcctgtatagatgtcttcaaattcagcttgtgtatgtcctactgaggctaatacaccttttgaagtgatatacttaccgaattgcatagcacccggaagttcgggagcagcatcccatcgcttgatgcagtgagtttcttccaaaagtggaatgtattcttctggatcagggttcttgatattttccggcatctgtccccctgccattttcatattgaaataatgtccttccaaatggagtccgagtaccggactgtcaggttcactcattaatttttccgtagtttcagcagcagcacgaatcataggaatggtagacgaagaaagcgtcgggaaaatacttgtggtaccatgctgcatgtgagccttgatagctgcacggaacgcatcttcagatccttccatgaagtcacgtccacctccaccatgtacatggatctcgactcctcccggcacgatatacattccttttgcatcaataagtgtcgcaccgacgatagccaggtcacaattggttacttccaggattttgttgtctctgattagtacagaaccgtcttttaaccagccttgtggagttaaaatacgggcattaattatttgagttaacatacagataaggttttatttctttgatatgtgccgcaaagttacttaatttgctaattaaatgtgctattaatactatatttatttacgatattagggttaattatattaaaactctattctatcagggggcaatgttgcttctttaaagataaaggagaggaaagcaatagcgttttagtcttaatgattaggaaatatgggtatattataataggtattaagaaggcagattcgaagggaaacaagtatttttaataaataaaaagtagaaagactagataaaatgaattattatttgtatctttgtcgcccgatttatatagtattgcgacttgggaaaacttgctacatataaaatagaattgaagaacatgaaggaaaactcggctcattatgagttttcactgacaaatcagttcttcgcggatattgatgctccggagattcaaaaaggaaaactgcaggtacagttggatgtgaagaaaacaatgggcatttatgtcttgaatttccatattgagggttccgtagttgtgccgtgcgatcgttgcctggatgacatggagttgccggtagaaacggatgacacattgaaggtaaaactcggactcgaattctcggacgaagacgatatggtgattgtgccggaagaagacggctatattaacgtcgcttggtttatgtacgagtttatcgcattgagcataccgatgaagcatgtgcatgctcccggaaaatgtaataaaggtatgatgggagccttgaacaaacatttgcgtacttctgcagatgaagaagatgaaatggatgatttcctggatgaggaggaaatgacagatgagccttcagaagcacgtgagatagatccgagatggaacgaattgaagaaaatattagataataattaaataaaagtttagaaaaatggcacatcctaaaagaagacaatcaaaaacgagaactgcgaagagaagaactcatgacaaggcagttgctcctactttagctatttgtccgaactgcggcgaatggcatgtttatcacacagtatgtggggcttgtggttattacagaggtaaattggctatcgaaaaagaagctgctctttaataacttgacgctttgtagaacatctttgcatgttccagggaaattaaagccggagagccatttcggctcttcggctgtttttttataagccacgaaattaagaaatgatggaaaaaataaatgctgtaattacaggagtcggtggatatgtacctgattatgtcctgacaaacgaagaattgtcgagaatggttgacaccaacgatgagtggattatgactcgtatcggggtgaaagaaagacgtatcctgaacgaagaaggtttgggaacttcatatttggcccgtaaggctgccaagcagttgatgcagaaaacggactcggatccggcttctattgactgcgtgattgtagctactacaactcctgactatcatttcccttctactgcttctattctttgtgacaaactgggattgaagaatgcgtatgcatttgacttgcaggctgcttgtagcggattcttgtatgccatggaaactgctgccagcatgattcagtctggtcgtcataaaaaaattatcattgtaggtgcagataagatgtcttcaatggtgaactatggagaccgcgctacatgtccgattttcggtgacggtgctgcggcttgcatggtagaagctactacagaagactatggtatcatggattctatcttgcgtacagatggtaaaggacttccgttcctgcacatgaaagcaggtggttcggtttgtcctccttcttattttacaattgacaataagatgcattatctgtatcaggaaggtagaacggtatttaaatatgctgtatctaatatgtctgacgtaacggctcagattgcagaacgtaatggcttgaataaggacaacatcaactggattgtacctcatcaggcaaatctgcgaatcattgatgcggttgcttctcgtctggaagttccattggataaggtgatgattaatatccagcgttatggtaataccagtgctggaactctgccactttgcttatgggattacgaaaagcaactgaagaagggcgataatatcatcttcactgcgtttggtgcaggatttacctggggtgcctgctatgtgaagtggggttatgacggaaataaataaagaaagaattaacactacagataaaaaacgcatcccaatcgatgcgtttttttgtctgtgaactaatatttacttatgcacaaagccggatttgtgaatattgtaggtaatccgaatgtcggaaaatctactttgatgaacttgctggtgggggaacgtatctccatcgcgactttcaaggctcagacaactcgccatcgtattatgggtattcttaatacggaggatatgcagattgtcttctctgatactccgggggtattgaagcctaactataagcttcaggagtctatgctcaacttctcggaatcggcattggtggatgcagacgtgttgctgtatgttactgatacggtggaaaaaccggacaagaatgcggagtttatggaaaaggtgcgcaacctgaaggtgccggttttgttgctgattaacaagattgacctgaccaatcaggaggatttggtgaaattggtggatgaatggcacgagatgctgcctgaagcggaaattattcctatctctgcaatggccaaattcaatgtggatgtggtgatgaagcgtattaaggagctgttgccggattctcctccttattttggaaaggaccaatggacggataagcctgcccgtttctttgtgacagagattatccgtgaaaagattttgttgtattatgacaaggagattccttattcagtagaggtcgtagtagaacagttcaaggaagacgagaaaagcatccatatcaatgcggtaatttatgtggaacgcgattctcagaaaggtattattatcggtcgtcagggaaaagccttgaagaaagtagctactgaagcgcgtaagacattggagcacttcttccgtaaatccatttacctggagacatttgtcaaagtggataaggactggagaagctctgacaaggaattgaaaaattttggttatcaattggattaatatcggctgcgaagccgtaaatgaagataattatgggaaatttagttgcgattgtgggacgtcccaatgtgggaaagtcgacactgtttaaccgtctgaccaagagtcgtcaggcgattgtgaatgaacaggccggtacaacccgcgaccgacagtatggtaagtcggaatggctgggaaaggaattctcagtagtagataccggaggatgggtagtcaactcggatgatgtattcgaggaggaaattcgcaaacaggtaatgctggcaattgatgaagccgatgtcattttgtttgtggtagacgtaatgaatggagttactgatttggatatggaagtagccgaaatcttgcgccgttccaagactcctgtacttttagttgcaaataaaacggataataacgacctgcagtataatgcggctgagttttattccttaggcttgggtgatccttactgtgtttctgctttgagtggaagtggtacaggtgacttgctggatttagtattgagcaagttcaagaaggaaactcctgaaattttggatgatgatatacctcgctttgctgtggtaggacgtccgaatgccggaaaatcgtctattatcaatgcctttattggagaagaccgtaatattgtgacagaaattgcgggtactacgcgtgattctatctatacccgttacaataagtttggttttgatttctatctggtcgatacagccggtatccgtaaaaagaataaagtgagcgaagatctggagtattattctgtaatccgttccatccgctcaatcgaaaattcggatgtatgtattctgatgctggatgctacacgtggtatcgaaggtcaggatttgaacatcttctctttggtacagcgaaaccagaaaggacttgtggtcgttgtcaacaaatgggacttgattgaggataaaacggctaaggtaatgaaaggatatgaagatgcgattcgtgatcgtctggctccttttactgactttccaattgtctttacatcagcattgacaaaacaacgtattctgaaggtgcttgaactggcgaaggaagtttaccaggcacgtacgacaagaatcccgactgctcgtctgaacgaggaacttctgccgctgattgaggcttatccaccaccttcaaataaaggaaagtatatcaagattaagtacatcactcagttgccgaatacacaggttccttcatttgtgttctttgccaacttgccgcaatacgtgaaagagccttaccgtcgtttccttgaaaataagattcgtgaacgctggaaactttcgggaactccgataaacatctttatccgtcagaaataaacggtgaaactatataatctcttgttgctgcttgtgtaatacaaggacaacaagagatttttttgataaaaatcagcattttccttgtgtgtttagaaaattgtgtttacctttgcacacgcaaacgaaaaacaaatgcccagatggcggaatcggtagacgcgctggtctcaaacaccagtggagtaacatccatcccggttcgaccccgggtctggg

SEQ ID NO: 3830 - DNA, 549 bp, Unknown
  gut microbiota DNA sequence
gaagtgatttaaacttatgtatatcaattaaaatgttgtcaaacagcgtacaaatagaattattcattatattatgggtgaccaaactcattcataataaacaacctatgtacgctgtattggacaaagatacgataaaaaacgaaatacttcctcatctttctgtggcaaaacgcggttttcaatcaaaaagtagtctgattgaagtcatcaatgccattctctataagttaaagaccggatgccaatgggaatatcttcccgtgaaagaactgttcagcggcaaggtcctgaaatacggtgctgtatttcaccattacaataagtggagcaagaaaggtgaatggaagtcgctttggctgcaacttttggacaagcaccgttcggaacttgacatgtcaagtgtggatcttgacggaagccacactccggctatacgcggcggggaagaagtcggctatagggaaggaaaaaacgcaagacgaccaatgccctttatcttacagacaggaaagggcttcctctcgccatgtccgttccgaaaagcgg

SEQ ID NO: 3831 - DNA, 265 bp, Unknown
  gut microbiota DNA sequence
ggagaaaacgtctccaggcgcatttctgaaggccgtccggataagcggtaaggaaacaaaggaaagcaaggggaaaaggaaggaaagaaagaatccggcagcaaaaagaagaagcggcctgccgcggaaacggacgcaggcgtacagacaaaaaaagtcctgaagcgtttctgcctcaggacttctgttaaaacggcgactacctactctcccacttgcgcagtaccatcggcgtgacgaagcttaacttctctgttcggaatgg

SEQ ID NO: 3832 - DNA, 2893 bp, Unknown
  gut microbiota DNA sequence
cccggggttcgaatccctgtctctccgcaaaatactgaaaatcagtaaatttaaataactacacccagccttatacattacaatgtaaagctgggtgttttgtttttcatatcctcttaccgtttgcacgattcagaaacaaatcgtatctttgaatcagagttttaatcaagcaaataccttgtatttacctcaaattatccatatcatgaaaatgaatcattatgtaaaatgcgtaaccgccggcattgtgtgttcactgatgtacggcaatgtatgcgcgcaagacacattcgatctgtcttcccagcgctcggagaagcaagatgtacaagctgttcccggaaaaaaagtagaccacaaaggacttatcctgaatccgcagcctcatcagattgtgacgatggccggaaaaacatgcaacctgtctcagggtatcaacctgaaagacaagcaggataaatttgcgggttaccttgatttcctttctccgaacaagaaaggagttaaactaaccatcgatttcggacagaaagttgccagtaaggccaatgtaaaagcagtgtcgggtgcctatgcccttgttgtcaatgaaaaaggaatcaccatcacgggatttgacgaacgcggtgctttctacggcatacaaaccttgaagcaactggtggaaagcccggtttcttccggcagtgctcttccctttgtagaaataagcgattatcctgacctgcctaaccgtggagtagtggaaggtttctatggtactccgtggtcgcacgaggtacgtttgtcgctcattgatttctacggaaagttcaagatgaattcttatttatatggtccgaaagacgacccttatcacagctgtccgaactggcgactgccttatccggagaaagaggctcagcacatcaaggaactggtgaatgcctgcaaccgcaactacgtggattttgtatgggccatccatccgggacaggacatcaagtggaacgaggaagattatcagaacctgatcaataaattcaactggatgtatgacttaggggtacgtcattttgccatcttctttgacgatatttccggagagggtaccaacccgctgaagcagacagaactgctcaaccgattgacagaagagtttgtgaaggtgaaaggcgatgtttctccgcttacggtctgccctaccgattactccaaactttgggcgaacccgaccgagaaaggtagtctggccatctacggaaaaacgcttaatcctgaaatcaaggtgttctggacgggcgacgtggtgtgcagcgacctgacacccgaaacactcgacttcatcaactcacgcatcaagcgtccggcttattactggtggaactatccggtaaccgactacatccgcaacttcctgcttcagggtccggtgtacggactggacaccagtctcacggctaatgaaacctgcggtatcgtgagcaacccgatggaacatggagaagcctccaagctggctttatacggagtggccgattatacctggaacattgccgactacaatgccatcgacaactgggaacgcggactggcggaactagttccggaagcaaccgatgcctaccgcacctttgccatccattccagtgataccgaaaacggataccgccgggatgagtcgtgggaaactcagactttccgcctggctgactggacagacgaagcggctaacgcactggaagaagaattcaagaaagtagaaagtgcaccagcacgtctggaaagcagttgcaagaacgcggccctaattaacgagctccgcccctggctgacagagttcggtaaattaggtacacgcggcaagcaggccatcgaactggcacgtatctaccgctcaggtaaagacgatgcgctgttctgggaaaaatacatacagaatatcatgactcccgaagaccggagaagctatgaggctcacaaatcgggtacgctgaaacttcagccgttctatgagaatgccatggatgacatggcacacggatacctgaaaaagctgtcgggcaaggtaccgactgactacagaggtatcggttctttcagcagtgcgcataccgtacaaaccaagctgatgttcgacaatgattctactaccttctatacctcgggaattgctcagaaagcaaacgattggattggtgtagacctgcgcgacgtgcgtgacgtgacagaaatctcgattcttcagggaagaaattccaaggatgatgtggactatttcgaccatgccatcgtggaatgctcggcagatggaagaacctggaaggcactgaccggagaactcgacaagcaatacatcatccactggcagggagctccggaaaaagcacgctacgtacgcctgaaacgactggattccaaacgcaccaactatgcctctgtacgctcgttcgacgtcaacccgctacgtccggaaaacatgggattctcacttgaagcggacagcctggacaaggccatctatgctttcgataacaacctggcgacttcttacaagagcactaaagcactgactttcggagtaaaggaaaatgtcaaggcatataccctgctcatgaatcgcccgtctgccccgttgaagtgcatccagctggacaagaagggtaaggtcgtatcagaaaccatgattgaaactccttttgcaagaatcgaactggccaacaagaacgtagccaagattcgcctggagggaactgcggaagtgtttgaaatcgtggcgattgactaatttaaaaacaggcataaaaaaacgcctttacgtttcttctaaaactgtagtgtactaaataagttgacacaatttatttagtaacatgcgtaaaaatcgaaagtattcaaaagcagaatgtct

SEQ ID NO: 3833 - DNA, 478 bp, Unknown
  gut microbiota DNA sequence
gaagtgatttaaacttttcttttccttgcacattttctcaatagcataacggaaaaagcgatgtagttccatgattcccagtttctgagcgttgtatcaaatcgattcaaaatagttctgaaactgtccatccacgcgtttgtccgttctatggagtatcgttccctatacaacaattcatcaaggactatactgtcatttgtcgttccatttcttttgttgatacagatgtttgacacaattccataacttttgagcacggagcggagggctgcacaatcaaatccggcatccgcattcaggaaaagcccgtccgttctgatgttggcttttgccatgtcttccatcatgttctgcattacagcaacaatattgtgcgtgtcatgatgttccccgcttttcggaacggacatggcgagaggaagccctttcctgtctgtaagataaagggcattggtcgtcttgcgttttttccttc

SEQ ID NO: 3834 - DNA, 596 bp, Unknown
  gut microbiota DNA sequence
tttgtcagtgcgtatttctgattttacctgtttcagttcctgctctgcaagatttatctgttcttctttgtgccgtttggctgcatccatgcgttgcagctcggctttctgtttctctatgataaaatcgttccgttccagatgctccttacccgtgacagcctttgactgtccacgttccatcagcagaatgtcggatgccaatgtctgcatctgcatcatgtcattgtcattgagctttcggctctttccggtttcgtggttcatccagtcgaaaacgatatgggcatgatagttcggcttgaaccatctgtccccgaccttgaaactttccttgtcttccgcttccggctgaccgttcagccaatgcccttcatccttgtgcaggaagatttgcagcggtgtgattccccagcgtctttgacattcctcaccgaatttacgcacgtctgccagtgtggtgtccgacctgacaagcagcactccttcacgtatgggggagcatcccgcaatcttgactgtcttgccgttcttgcctttgcgttcccgttccttttcctgcatggcacgtccggtcttttcctttaccatctgtc

SEQ ID NO: 3835 - DNA, 40394 bp, Unknown
  gut microbiota DNA sequence
acatctttttttttttttttaaaagaggaaatacgtattcggaatagtttttctgtttctattatttgcagagttctcaaattagccctatcttcgcacgataaaacattcaactttgttatgacccgaatgaacaaaataaagaaactaaaaaaaatccgtctccatcatgaaggaactcccattctgattaccagtgcaatcttgctgcttcttgtaaacgctgctttatactgggggatagagtgccggattccattttatattgtggcagcagtaagtatcgtagtgtacttgctgatggtcaattttttccgctgtcccatccgattgttcaaaggagatacggaaaaaaccgtagtcgctcctgccgatggacgtatcgtggtaattgaggaggtggatgagcatgaatatttccatgaccgccgactaatgatttccatctttatggacatcaccaatgtacatgccaactggtatcctgtagacggggtggtaaaacatgtagaccatcataacggacggttcatgaaggcgtggcttcccaaagccagtacggaaaacgagcgttctatggtggtaattgaaacgcctgagggtcatacggttatggcacggcagattgccggtgcggtggcaagacgcatcgtaacatacgccgtaccgggtgaagactgttacattgacgaacacatgggattcattaaatttggttcgcgagtggatgtgtacctgccgttaggtacgaaagtttgcgtcagcatggggcaaaagacaaccggtaacgaaacggtaattgcccgcttgccttaatcctgcaatacaatatttacaccttattatatttataccttttatatataggatatggctaatgtgataacccggaatattcccaatacgattacgagctgcaacttgttttgcggatgcatagccagctacatggctttccatagcaaatatgaattagccctgcttttcatcgtgttaggagctacattcgactttttcgacgggatgactgcccgtctgctgcgtgtttcttctcccatcggaaaagaacttgactctctggcagacgacatcacgttcggactggcaccggctgccattgctttttccttgtttaaagaggtacattacccggattttctacagccgttgtcaggaatcatgccttatacggctttcctgatagcagtcttctctgccctacgactggccaagtttaacctggatgaacggcagacctcttcctttatcggaatgccaactccggctaacgcattattctggggctcactgaccgtaggtgcacacagttttttggtgtccgaccatttcaacgctttatacttgttcatcttggtagtagtcatgtcactgctgctggtggcagaactcccgatgttctctctgaagttcaaggacctgtcgtggggacataacaagataagctatatattcctgatagtcagcattcctctgttaatcatcttccaactgagcggatttgcagctgtcattgtctggtatatcattctgtcattactgacatataagaaatagctgagaaatcgtatggcacattttttgcatatatcacattaaaaacaaaagacaatgttccatattttaggctttctattttttatcatactggttgttctggtgattggattgctcattctttccaaagtcgtcagtctggtattcggattcaagcgtcgtatgcaaggtaagaattcgggtcagagaacaacttactcttctcaaaattatcagtcgaaccctcgtcaggaagagacaacagattcttactccacacaaggagatgtacctgtgcgtcaacgcaaaaagattttcgataaagacgaaggggaatacgtggaattcgaagaaatcaaataaatcttcatcttctctttcggaagaaatctttcatcagcccggcacattcatcggccagcactcctttcacgaccacggtcttcggatgcagggcttgaggtgcatagcgctggtaacctcttttctcgtcttctgcaccgaaaacgaggcgaccgacctgtgaccaggcaatggcaccggcacacatcacacaaggctccaccgtaacgtagagcgtgcaatcagtcaaatattttgctcctaacgaattggcagcggcagtaagtgcctgcatctcggcatgagctgtcacatcgtgcagtgtttcggtcaggttatgcgcacgtgccagaatacggtcacgacagaccaccacggctcccaccggaacctctcctctttcggctgcccgtgcggcctcagccagagcctgtttcatgtaaaaagaatcgtctgccataacttatctgcgcatatcgtgttccttgaaaagtgtaggataatcttcctccatattctgatggataaaagccaatacggtctcgcgaagccaacgtgccttgttggttatctggtatttctccagataacggtctacaattcgcacctcttcttcgctcatcagacaaaccatccgctggcggcggggaggatcactgactggtactttttttcttttttttccgctatttaccatcttcggtgcaaaattagcgtattctgttaaaatggaagcataaaaatgcgtatttttgcgaaaaagcggaaaaatggcatcacataatgaactgggaaaagaaggagaaaatgcggccgtgaagtacctgctggaaaaaggatatgaaatcaggcaccgaaactggcactccggacaccgcgacctggacatcgtggcacagaaagacggtgagctggtcattgtggaggtaaagacgcgaagcgatgcctgtttcggacagccggaggatgcggtggacaggcgtaagataagaagcatcgtagcctctacggatgcgtacgtccgaaagtttgccattgaccttccggttcgctttgatattatcacggtagtaggaaaccgccctcccttccacatagcacacattgaggacgcctttttcccgcccgtgtggaactaactttgaaacagaaaagaacaatgacatatcctgaacctattgtattggcagaaacgacttctaccaacacgtatctggcggcactctgccagaaagaagcgtgtgcggaactgaccaccgtgtattcatcttttcagtcggctgggcgcggccagcgcggcaacagctgggagtcggaagccggaaagaacctgctcttcagttttgtagtttatccggagtttctggaggcacaccgccagttctatctttcacaggtgactgccttggcactacatgatgtattgtcctcttacacggagggcatttccatcaaatggcctaacgatatttactggaaagacaaaaagatttgtggcacactgattgagaatgacctgacaggcatccatatcagccgttccatttcgggtacgggcgtaaacctgaaccaggaacgtttcctcagcgatgctcccaatccggtctcattatgccagattacgggcaaccaatataacccgagggagatactggaacagattatggaaaaagtgacggagtactatcaacttctgaaagagaaccggacagaggtacaggaaacacgctacaaggaggcgctttaccgaaaagaaggactgcatctgttccgcgataaagacggtgacttccgggcacgcattgccgacattgaaccgaacggacgactgatactggaagacgaggacggacagacaagggggtatttatttaaggaagtggaatacatcttatgacacgtactgaccgacagattcttcacatcgcccttccttccattgtttctaatattacggttcccttgttaggcctgattgatgtcagcattgtagggcacttgggagccgcatcttacatcggtgccattgcagtgggaggcatgctgttcaatatgatttactggttgttcggtttcctccgcatgggaaccgggggattgaccgcacaggcctacggcagacatgacctgcaggaagtgacgcgtatcctgcttcgttcactgagcatcagcctgctgctggcgcttgccttgctgttactgcaatatccgatacgaaatatcgcatttatgtgcatggacaccagtaaggaagtccggcaattagctacattgtatttccacatctgtatctggggggcaccggccactttaggcctctatggcttcacggggtggtacatcggcatgcagaattcccgctttccgatgttcatcgccatcacccagaacattgttaatattgcggccagcctgttctttgtattcgtactgaagatgaaggtagaaggcgtggccttaggcacgctcgtggcacaatatgccggactgggcatggcctgtctgctctggctggcttattaccgtccactccggaaataccttcgccagaaagccttgttcgaccgtatggaaatgaagcgtttcttccaggtaaaccgggatatttttttccgcacgctctgcctgattgcagttaccgtcttcttcacttccacaggtgcggcttacggggatgtggtattggccgtgaatgccctgctgatgcagctatttacactctattcttatttcatggatggatttgcctacgcaggagaggcactgaccgggaaatacatcggggccaaagacaaccagtcgctaagactgaccatacggcatcttttcaagtgcggaatcgccttgtcactgctgttcacgttactctacggagcaggaggaaaaagctttctcggcttgctcaccaacgacacttctgtcatttcggcttctgaagaatatatctattgggtactggccattccgctggcaggattctcagcctttctgctcgatggaatctgtatcggtgccacagctactcgcgtaatgctccgctccatgttagtggcttcggccagcttcttcctactctattatggattccataccacgttaggaaatcatgcattgtggatggcttttattgtgtacctggcattacgaggcattgtgcagggaggaatactctaccggatgccacacaccaacctccaccgacaggtatagttttaacgacaagcctcgggatatatgcaaattattactaactttgtagcaatctaaaaacaaatacgattatggcaaaattcaaacgcatcctgttaaaactcagcggcgaaagcttgatgggagaaaagaaatacggtattgacgaaaaacgtctgggcgaatatgcacagcaaatcaaggaaatccacgacatgggggtacagattggtatcgtgattggtggcggtaacatcttccgcggattgtctggagccggaaaaggtttcgaccgtgtgaaaggtgaccagatgggtatgctggctacggttatcaacagcctgggattaagttctgccttggtagcagccggtgtaaaggcccgcgtgctgacagccatccgcatggaacccatcggtgagttctacaccaaatggaaagccattgaagccatggaaaacggagaagtagtgattatgtcagccggaacaggtaatccgttctttactacagacactggttcttctttgagaggtattgaaattgaagccgacgtgatgctgaagggtacgcgcgtggacggtatctatactgccgacccggaaaaagatccgactgccaccaagttcgatgacatcacttacgatgaagtactggcaagaggactgaaagtaatggacctgaccgctacttgtatgtgcaaggaaaacaacctgccgattattgtattcgacatggatacagtgggcaacctgaaaaaggtaatgtctggcgaaaacatcggtacgctggtacacaactgattattcatttgaatcaaaaaatatacggcaagactggaaacgcatcctggtcttgccgtttttgtttattcacgtgtcagttcataacggtgaagttctgcatttttcatcagtggaaccgtacgcagttcctccagcggaacgcctgtaatacgggcttccaggcaacggttgatttgtccgtgtgccaccactaatacccgcttcccgtcataatgctgccacagatagtccaagaaagcaccggcccggtcgtacatcatctggcgagtttccactccagcaggaggattgcttaaatcgacactccccacgggcagcccggtccaaggtccccagtctatttccctcaacaacgtagtctgctgccaaggcagctgccggtcgcctacagccagttgcacggtatccaccacccgttgcagatcactgctgaccactgcatccagtgcaatattccgcagggactctcctaaatccatcgcctgcttttttccttcttctgtcaatgtgccgggcaagtgcccttgaaaaatacggctcaggttttccaccgtctgcccgtggcgcgccaaataaagtgtaatcatacaaccgtgctgttttatagtgataaaacaaagataagaagtttttcaggatatttccgaaaccggaagacacaaacttattttcagaagtattgcaaggaaataaaaaatagcttatttttgttcacataaatacttatcaacgaatataaaacctataaatgcaagaaatatatggcagattctaaaacaattatcagcgaagctgaagagaaaatggatatggcagtcatgtacctggatgagtcactggctcacatccgtgccggaaaggctgacgtacgtttgttggacggtatccgcgtagattcttacggaagcatggtgcccatcaacaatgtagcggcagtaactactcctgatgcgcgcagcatcgccatcaagccgtgggacaagagcatgtttcgcgtaattgaaaaggctatcatcgactctgaactgggtatcatgccggaaaacaacggtgaaatcatccgtatcggtatcccgccgttgacagaggaacgccgtaaacagttgagcaagcagtgcaagggtgaaggtgaaactgcaaaagtaagtgtgcgcaacgcacgccgcgacgccatcgacgctctgaaaaaggctgtgaaagatggtatgccggaagatgaacagaagaactcggaagccaaactgcagaaagtacacgacaagtacatcaagcagattgacgacatgctggctgccaaggacaaagaaatcatgacagtataatcttattcaccatacacgaggagagaggaggccttatggtctcttccctcctctttttaattttgcacatattcattttggaaaaaggtctggtcattaaaaatacgggaagctggtacctggtcaagacggacgagggaaagctgattgaatgtaagataaaaggaaatttccgcctgaaaggaatacgcagcacgaaccccattgcggtgggcgaccgtgtacaaatcaatgtcaatgcggagggaaccgcattcattactgaaattgaagaccggaaaaattacatcatccgccgttcttccaatctttccaaacagtcacacatcattgcagccaatctggaccagtgcatgctggtggttacggtgaactatccggagacttcgacagtcttcatcgaccgctttctggcctctgcagaagcctatcgtgtaccagtatgcctggttttcaacaaggtagaccgctatacggaagaagaactgcattacttggatggcttgacaaacttatacacgcacatcggctacccgtgttaccagatttctgccttggacggtacgggagtagacgaaatcaaacaggcattagaaggaaaagtaaccttattttccggccattctggtgtgggaaaatccaccctcatcaatgccatcctgcccgaacagaacatcaagacgggagaaatctctaccgcacataacaaaggtatgcacaccaccacattctcagaaatgtttccggtggcaagcgacggttacatcattgatacaccgggtatcaaggggtttggtacgttcgacatgaaagacgaagaagtgggacactatttcaaggaaatctttgaattctctgcccaatgcaaatatggcaactgtacccaccgccatgaaccgggatgtgccgtacgggaagccgtagaaaatcactacatcagtgaatcaaggtatgcttcttacctgaatatcttagaagataaagaagaaggaaaataccgttccgcatactaatatgccactaaaatacacagccccgctctgacgccaacgactgtcaaagcggggctatttttttataataaagaatggtatcagaaacgtcctcctcccaaagaacggtaaagaagagtatgaagctgacaataagctacattcaagtcgatacgttccagctcgcaatccagataacgttcatcggcagacaacacatccagatagcccacaaaaccggtacggaacaattcgttcgcattctcaatggaacggcgatgcacgcgactttccttggctttcaacaatttacgttcgtccatccgttcagatgcctccagcaaatcggctacttcctgataagacttcaacgccacccggtgatattccagcaatgccatacgctgacgtgctttcgattcattccacaaagccctgatttcatgccgcttgaataaaggagcactgataccagctgctaagtcgtagaccaaagaggccggtgagacaaaccatttgctcaaatcaaaggcattgaatccgcctcctcccccgataagcaaggaagggaagaaagtcttacgggctgcagaagcatcggccttacaagccaacagttccagttcggccgctttcacatccggacggttacacagcaactgggccggtataccggaagcagcagggagctgcgatgcagaaatttcctcaaaagtggaacgtttgatttcaaaaggcagctttcccagcaacaatgccagtgcgcgttctgcttctgcaatctgctgacgcgtgtcgagaagcatctcttccagcttcagtccacgcgactggaactggtcgactgacaaacggaaaacttcgccttccttcatcagctcattggtcagttcataagcttcctgtgccttatggatttcttctttcagaatgacacatttcttatccagtcctaccaagtgataatactgtacggccacttcggaaaccaacatggcttgtgccaagcgtgcagcctccaccgagttcatccagcgaagcgctgctgcacgttttttatctgtcagttttccccatacgtcggcttcccattgaaagcttacgcctaaattcagatttttataaggatcagggatatgcttgtctttagccaaatcgggggtattggtcgtactgtttcctaccccatccatggtgtattcaccaaaacgctgtacaccggcactcaagcctaaagatacttcaggcagcaaagctccccggcccacccgtaattgttcacgggcaagcgacaccctctccaacgtttgcaagaaactatgatttcttaccagtgccgtatcgatatacgcctttaaataggtatccggaaagaattctttccatgacaaattggccatactcagcgtgtccgaggttcccccgacaaaagtctcaggcagagtcgccttctcttccgaaaggagagaaggcgacttacagccactagacaacagtataacaacggcaattgcgatataatttcgtaaatgattagtcttcatcttcatcatattttttatcggtctttaaacgagacgaccaggtttcaaacaagatatacaaaccggggactaggaagattcctacaaaggttccaataaacatacctccggcagcggctgtaccgatagaacggtttcctaacgcacctgctccagtggctactagcaacggaatcaatccgcagataaaagcaaacgaagtcatcaagataggacgcagacggcttaccgctccctttactgcggcctccataatcgaaagtccgctctgacgatattggttggccatctcgataatcaaaatcgcattcttacccaacaaaccaatcaacatgaccagagccacctgtgcataaatattgttctcaagtccggccagttgcaggaagaaataagaaccgaagattcccgcaggcaacgaaaggatgacagggaaaggcaacagcagactttcgtattgtgccgccaacagcaaatacacgaacaacagacagattccgaaaatcaatatggtctgtccgcccgaatccttttcctcacgggtaatacccgaccattccacgtcgtaaccacggggaagcacttccttgctgatttcttctacggcctgtatcacctcacccgaactgattcctccttctccttcacctgtaatcaaagcagaagtaaacatgttgtaacgggtaatctggctggggccgaacacacggtccatggtcatgaagtttgaataaggtaccacattaccgtcgttgttcttcgcatacaggcgatacaaatcctccggattcatacgatactccggtgaagcctgaatcatcaccttatacatctgtccgaaacggataaagttggacgaatagaaacttccgatatacgcctgaagtgtttccatggccttatccaagtctacacctaacttggcagcttttgccaaatccactttcaacaaatactgtgggaagttcggattaaaaccagacgtcactccctgaagacgcgggtcggcattcaacttctccaccaatgtattggccacttccgcaaaatcatggaaatcgcctgccgtcttgtcctgcaaacgaagctcaaaaccactggcgttaccgaaaccgggcacggaaggtggcaagaagaactgtatgtcggcgtctttgatatgagaagtacgctccttatacagttgcatcaactcctctactcccttatcacgctcatcccaagctttcaggttgatcatacccataccgtaactggctccttctgtctccgtcatcaaactgtagccggccagtgtagagatgctttcaatctcatcaaaaggcagcaaagcagcctgaatctgattcagcaccttttcgcttcgttccactgtcgctcccggaggagcatccacgtttacataaatcataccctggtcttcattcggaataaatccggtaggaagcactaaattgatgccatacgtagccaggaagaacaacactaacgtagcgtaagtaaaagatttccgtcctaaatacttgtgtaatcctaactgatagctgcgttcaaagcggtcgtaacggcggttgaacaccacaaagaacttacggagccaggtagctttcttgcgtccgtgacctgccggtcggagcagcaaggcacaaagtgcaggcgaaagcgtaagcgcattgatacccgaaatcacaatagccacagccagggtcaaagagaactgacggtagaaaatacctaccgtaccttccataaagcccaccggcacaaataccgccgacatgaccagtgtaatggcaatgatagctccaccaatttctttaatagcggccacagatgccttataaggactcagcttttcttcgtgcatcttgacatggacagcctcgaccaccacaatcgcattatcgaccacaataccaatggccagtaccagtgcaaacaaggtcagcatgttaatggagaaacctaacatctgcatgaagaagaaggttccaatcaaagacaccggtacggcaatggccggaatcagtgtagaacgtaaatcctgcaagaaaagatacaccacgacaaatactaacaagaaagcttccagcaaggtcttcaacacggaagtaatggaagcatccagaaagcgggatacgtcgtatgcaatattatagtccataccgggagcaaaactgctttccttgatttcctccatgcgctgcttaatgttttcaatgacttcacgtgcattggaacccggacgctgcttaatcataatagaggcagaaggacgtccgtcggtcatggacaccatgttatagtcttctgagtcaaactcgatggtagccacatccctcagacgcagcaacgaaccgtcgggtaaggccttgagcacaatttccccgtactcttcgggggtgctgaacttcccagtgtactgcaatacgtactgcaactgctggggtaatttatcggaactgatacctgtctttccgggagccgcctcaatgttctgccgacggatagcatctgtcacatcctggggcaccagattataggccgccatacgagccggattcaaccatacacgcatggcatagtcacggcttcccatgatttctaccagccccactccgtcaatacgtttcaactcacgaagcacattgatgtcggcaaagttatacacaaacttctccgtatgcgtggtatctgtactgaacacattcaagtacatcaacatactgttcacttctttctctgtcaccacgccggcacgaattacctcttcgggcaattcatccagtacggtggtcacacggttctgcacatttaccgcagctacatcagggtcggttccaaccttgaaataaacggttgtgagcgacataccgtcattcgtacataccgtggtcatataggtcatgcccggtacgccattgatggcacgttccagcggagtagctaccgtcttcgccatcacatcggcactggctcctgtataacgggttgtcactgttaccgaaggaggtacaatatccgggaactgcgtaataggcaacgataccaatgccagtcctcccaaacaaacgatgatgacagagataactgccgaaagaatcgggcgacgaataaacaacttaaacataggcccttatctttgcaacatgttcaacttcaattcctttctcacatcttcaaacggaatggtgtctgccttaatctgcataccgtccttcaccaactgtacgccctcgtacacgattgtcgtacccgccgggaaatcctgcgtcacataatagttctggaaacgctcaatcggattaaagctgcgcacctccacctttccttcttcattaaacaaatacacatacgtaaagtcctgaatttcaaaggtagatttctgaggaatcatgtacacatcctccatgtgagtcatcatacgtacctttccggttactccatgtttcaacagtccgtctggattcggaaagcgtacacggaatgcgatagaaccggttccccgttcaaagtccccttccacggtttcctgctttcctttatgtgaatacaccgaaccatcaggcaaaatcagttccacgttatccagctgctgcagattttctccgcttaactgcgcacgcttcaagcgcaagtattcgctttcgttcactttgtaataggcaaagatttccgaaatatcactcacggtagtcaacagactttccgggttcaccagacttcccactttataaggtatacggtctacataaccggtaaaaggagcggtaatcgtggtgtaactatattccatctgtgcccgttgcatctctgcacgtgcctgctccactttcatccgagccacttcccgttcacgcctcacctggtccaaacggatagaagaaataatctgcttgtcgaccagacgttgcacgcgttccgtttcataattggccatctccagctgcgcctgggtctgtttgtagttagcctcggctgcttttaatacttccatataattctctgaattcaaacggaacatgggttgtcctttttttaccaactgaccttcgtcaaccagtacctgctgaataaagccctctacacgagcttttatttctacaaactgaatcgcctgaatatcggccacatacgaccgtggcaagtcaatggtagtaggctgaagtaccgtcaccggtatggtttccttactctttacttgtttttcgcctgatgactgacaggcaggcaacagtccggccacacatgaccagattgcaaccttgtgaagaaaatttttcataagatgacaaaataaagattactatgtaatttgatttttaaaaacaagaataaccttccgatcaggtatcacaccaaaccggaacagactttttttttacgcagtgtgcgaaaagactaaatcaataaggtacaaaaagtcacatacgggcgtacaggaaatacgcgtaaggatacagtacggactattacagaaatatcagcaataaagtttcgaaagcaaatgaaaaataaaggaagcgaacctaatataaaccaccagaaaaaagaacgcacagaggtttttgaataagataaatcttcccactcaaggacattcacatcttcttcctgaaaagtatcagcagcagaaggtatcgccatttcgtcctgtgtatcaacctggcatgcactgattacctcatacgcatacgcatccaaatgtatgagtaacaacatcatcatacataaggcacggaaaagcttattttttctgacaatatgagataacatagtataaatacacaatcggtatgcaaagatagtagtacaataactaatataaaaaagcctttctcagttttccataaaattaacaacctaagcctctgttttttacaaatccctttccgataattatgatttcgcttctctaaaagggttcttttaactataaaaaatataaaaaacatggtattctttcaataaatcaatatgtttgccaaataattaattaaccagactctaataaacacatggacaaacgaattaaatggggaattatcgttttggcaggtgcagggctgaccgccttgggcattcatacatttactcccggagagaacaaggaactggctgctgccgagaagaaatcgccagtcgacaaaaataaggcgctaaatgtaaatgcgaagattatcaagcctcatctgcttacggaccagttgttcgtaagcggaaagctgatgccggacgaagaggtggacctttcatttgaaacctccggaaaaattaccagcatcgaatttacagaaggtagtttcgtatcaaagggacagttgctggccaaggtgaacgacagtcagttacaagctcaattgaaacgcctggaagctcagatgccactggccgaagaccgcgtgttccgtcaaaatgccttgctgcaacgcgatgcggtcagtaaggaagcctacgaacaggtaaaaacggaactggccaccctcaatgccgacatcgaaaatgtgaaggccaatattgccatgacggaactccgtgccccattcgacggcatcatcggattgcgacaggtcagcttgggagcctacgcctctccgactacagtcattgccaaactgactaaaatcaccccgttgaaagtagagtttgccgtgccggaacgttatgcccgacagattcagaaaggtaccaacctgacctttaaaattgaaggccggctggaaaccttcaattcgcaagtatatgccactgagtcacgtatcaacgaggaaacacataccctgaccgtacgtgccctctatccgaaccggaacggagaattgctccccggacgttatgcggacatcgcactgaaacaacaggaaattcaagatgccattgctatcccctcggaagccatcgtgccggaaatgggaaaaaacaaggtattcttgtatcgttcgggactggctgaaccggtggatgtagaaataggtatccgcacggaagcagaagtacaagtcttgaaaggcctgtctgccggagataccatactgacctccggtaccctgcagttacgtaccggcatgccggtaattcttgaccaaatcaactaaccttctgccgtatgaacatatccgaacttagtatacgaaggccggtactggccaccgtactcaccatcatcatcctgctattcggactgattggttatacaactttgggagtacgtgaatatccgtcggtagataacccgattatctctgtgacatgcagttatccgggagcgaatgcagaagttattgaaaaccagattactgaacctctggagcagaacatcaacggtattcctggtatccgttccctgtcgagtaccagccagcagggacaatgccgtattacggtagaatttgagttgtctgtagatctggaaacagccgccaacgacgtgcgtgacaaggtatcacgtgcgcagcgttacctgccacgcgactgtgaccctcctaccgtttccaaagccgatgcggatgccagccccatcctgatggtagccatccaaagcaatacccgctcactgctggagctaagtgaaatagccgatttaacggtcaaggagcagttgcagaccattccggatgtcagcagtgtatccatctggggagaaaaacgttactccatgcgtctgtggctggacccggtaaaaatggctggttacggaatcacgcctgtagacgtcaagaatgccatcaacgaccagaacctggaacttccttcaggaagtatcgaaggaaataccatggaacttaccctgcgtaccatgggacagatgcacacggctaaagaattcaacaacatcatcttaaaggaacagaatggacaggtagtacgcttcagcgacatcggttatgccgagttgggaccggccgacatcaaaagctacatgaagatgaacggtgtgcccatggtcggtgtggtagttatccctcagccgggtgccaaccacattgatattgcagatgccgtatacgaacgtatggagcagatgcagaaggacttgcctgatgacgtggaatatacctacggcttcgataatacccgtttcatccgcgcctccattgcggaagtagagagcacggtatacgaagcttttgtactggttatcatcatcattttccttttcctgcgcgactggcgcgtgacactgattccttgtatcgtaatcccagtctctctgattggagcgttctttgtgatgtacgtggcaggcttctccatcaatgtgcttacgatgctggctgtcgtactgtccgtgggactcgtagtggatgatgccattgtcatgacagaaaacatttatatccgcatcgaacggggaatgaagccttttgaggctggtattgaaggagccaaggaaattttctttgccgtcatctctaccaccattacactggcggctgtatttatcccgattgtgttcatggaaggaaccagcggacgtttgttcagggaattcagtttcgtggtggccggttcggttatcatctcctcttttgccgctctgacattcaccccgatgcttgctaccaagcttttgaagcacagggaaaaacagaactggttctaccggaagacagagcctttctttgaaggaatgaaccgtgtctactcccgttcactcaacgccttcctacgaaaacgtgtcattgctattccgtttaccatcatcacgctcgtgctcatcggttatttatggggagaaatacctgccgaaatggccccattggaggaccgttcgcaaatcaatatccgaacccgtgcggcggaaggttccagctatgaatacatacgcgattatacggaagaaatcaacacattagtagattctatcgtaccggatgccgctttcgtctctgcccgcgtatccagtggtagcggaaacattcagattaccttgaaagatatcaaagaacgcgactatacacagatgcaggtggccgaacagatttcgaaagctatccgtacccataccaaagcacgttctttcgtgcagcagcagtcttctttcggtggacgaagagccagtatgccggtgcaatacgtactgcaggctgtcagcatcgaaaagctacaggaggtactgccggagtttctggcacaagtgtacgacaacccgaccttccaaatggccgacgtagacttgaagttcagcagtcccgaaatgcgtgtcaccatcaaccgcgacaaggcgggtaccatgggagtaagcgtacgcgacattggagaaaccttacaatacggattgagcggacagcgtatgggatatttctatatgaacgggaaacaatatgaaattctcggtcagattaaccgacagcaacgcaaccagcctgccaatatcaaatccatctatatccgcagcgacaagggtgaaatgattcagctggacaacttggtggaattcatagaagcggtagcgcctcccaaactgtatcactacaaccgttttatctcagctacgatttctgccggactggctgaaggaaaaaccattggtgacggtctggacgagatggacaagattgcagccaacgtactggatgataccttccgtacggctttgtcgggcgactcaaaggaataccgtgaaagttcctctagtctgatgttcgcctttattctggcactcgtgctgatttacctgatactttctgcacagtttgaaagtttcaaggacccgttcatcatcatgctgactgtccctctggccattgccggagcattggtcttcatgtattttggagacattaccatgaacattttcagtcagattggtatcatcatgctgattggtctggtagccaagaacggtattttgattgtagagtttgccaaccaaaaacaagaagcaggcgaagacaagatgcaggccatccgcgatgccgcccttcagcgtttacgccccatcctgatgaccagtgcttcgaccattctgggcttgctgccgctggcttttgcctcgggagaaggatccaatcagcgcattgccatgggagtagcagtagtgggtggtatgctggtatctaccttcctgaccatgtacatcgtacctgctatctattcgtatatttcgacaaaccgtgctaaaaaagaaagaaaatgaagaaacggcttatttatttcatgatatgtctgctgggaagtggaataaccgcacaagcccagtacacctatacgctaaaacagtgcctggaagagggactggcaaacaactattcactccgcatcacccgcaacgaggagcagataagtaaaaacaatgcgacgttagggaatgccggctacttgcccacggtggatttgactgccggatataccggaaatgcagacaacagcaatacgaaggcacgggcaacgggtgaaaccaccaagcttcgtggcgtgtatgaccagaccttggatgctggagtagatttgaactggaccatctttgacggcttcaatatcagcaccacttacaagcaattgaaagaactagaacgtcaaggtgccaccaatacccgaattgccattgaagatttcattgccagtcttactgcggagtattataattacatccagcaggaaatccgcctgaaaaacttccgctatgccgtgtctctatccagagaacgcctgcgtatcgtagaagaacgttatcatatcggaaatttctcccgactggattatcagcaggccaccgtcgactttaatgctgaccgggcacagtatatcaaacaaagggaactggtgcacacttcacgcatcaatctcaatgagctgatggccgccaaagacatggaccgcccgctcagtgtaaaagattctgtgattgacgtaaacgaaagcctggaattcaatgatttgtgggaaggggctcttcagaccaatgcctccttattacaagccgaccaaaacaccgtattggctcagttggactataaaaaggtattgtcgcgcaactatccgtatgtacgactgaatgcgggttacggatacaccctcaacaaatacgacgtaaatgccacacgccaacgaagcaactgggggttcagcggaggcgtcactatcggattcaatatcttcgacggtaaccggaaacgggaaaaacgaaatgccagcctggccatccgcaatgcacaatttgcccgcgatgaactggaacaaagcttacgggccgacctgagcaacctgtggcaggcttaccgaaacaaccttcgcctgctggaactggaacgccaaaacctggtttctgccaaggaaaaccatgaaatcgccaaggaacgctacctgctgggcgatttatcaggtattgaaatgcgtgaagcacaaaaaagtctgcttgacgccgaagaacgaattctttctgcagaatacgataccaagatgtgcgaaatctctttactacagctcagcggaaaggttacacaatatctgaaataagatattcagtaatttttcctacctttgtcggacaataaaaaaacagacaaagaaatggggctttttattcgaaaaagtatagaggctttacaagcagaagccaaagaaactggaagtggtacccttaaacgagtgctgggccctgtcagcctggtagctctcggggtaggtgtaattatcggagccggattattttccattaccggaaccgtagccgcatcgtataccggaccagctatcacactttcctttattattgcagccatcggctgttgttttgccggactctgttatgcagaatttgcttccatgattccggtatccggaagtgcctatacctactcctatgccaccatgggagaacttatcgcctggattatcggatgggacttagtattggaatataccgtagcagccactactgtcagtatcagttggagccgctacatgactgtattcttgcaaggagtaggcattgagctaccccatgcatttacagcatgtccatgggatggaggtattgtcaacattccagccatgataattgtggtccttatgagcttgattctgatgcgaggcaccgccggaagttctttctttaacggactgattgtttttctgaaaatagctgtcatcctgatttttatggtactcggctggcagtttattcaaaatgacaactatactccttacattccagccaataccggtacattgggagaattcggtgtttccggtattttccgtggagcagcgattgtcttttttgcctttttaggattcgatgcggtaagcacggcggcacaggaaaccaagaatccgaaacgggacatgcccatcggtattctagtatccttgctggtctgcaccatcttatatattctctttgcccatgtcatgacaggagtagcccattacactgacttcagtgggcaggtgggaattgctccggtagctgtagccattgaaaagatggggcatcccgatgctgcaggtgtcatacaacccgcttatccgtggttgaacaaggccatcattctggccattctgttcggatactgctcggtaatcatggtcaccctgctcggacaaagccgtgtattcctgagcatgagccgcgatggtcttttgccaccgttcttttccaaaatcaaccagcgtttccgtacaccggtacacagcaactgcctgtttatggtacttgtcagcctgttggccggatttatcccggcacaagtagccggtgaaatgaccagtatcggcacactcctggcattcaccttggtctgcgcagccatcctgattgtacgcaagaccatgcccgatgtaccccgtgccttcaagactcccttcgtacccttcgttccgattatgggtatcctcacctgcttgtgcatgatgagcttccttccggccgatacctggatacgtctggtactgtggatgcttatcggactggatgtctatgcttcatacggaattcatcacagcaaactggagtatggtcaaaaacaccggaagggagatattgtattaaacctgaccggacttattttgtctattctaagtgtgattaccggactatggcatcagcagaccgtaggatgggatgctgacaagaccctgctgaccatctcttttgtgtttgccttcacacactgtgctttttacatgtggcgaatctggaaacatccgcacaatcggatcaagatttcttaaaagaagttataaaaaatcgtcaggaacagaaaaaacgaataataaaccacaaccaacatataaaaaagcagttattttacagcgatttatactattatggataagaatatattgtacacggccattcaggccgcccttgctgcgggagcagaaattatgtctgtctacacagacccgaaagcagattttgaaatagaaaagaaagcggacaattctccgctgaccattgccgaccgcaagtcgcatgcaattatagcccaagcactggctgcgactccttaccccgttttgagcgaagaaggggctaaaatcgctccagaagaaagacaacaatggaaagagctgtgggtagtcgacccactagacggcaccaaggaattcatcaagcgtaacggagaatttaccgtaaacattgcctatgtgaaaaatggttgtcctgaagcgggagtcatttacattccggtaaagcaggaactctattttgccgacattgaactaggagcctacaaaatcaaagacattaccgatacagaagcttttccgtcgctggatgcactgatggagcaagccgaacggttgccgtatgccaaccggacaaacgatacgttcgttatcgtggcttcacgttcacacctgactcccgaaacggaagcttacatccatgaaatgcagcaaaaacatgcacacgtggaaacaatttccaagggaagttcgttaaagttgtgcctcattgccgaaggaaacgcggacgtatatccccgcttcgctcccacgatggaatgggacaccgcagccggccatgccattatccgtgctgccggaaaggaagtctatcaggctggaaaaacagaaccgctacaatataataaaacagacctgctgaacccctggttcattgcagaataacccccaatttatgtctactgagattatcatcgtacttctttcactcgtggccatgctggccgcactgattatggacaagatgcgaccgggaatgattttgttctcggtggtggtgatttttctttgcacgggtatccttacccctaaagaaatgctggaaggcttcagcaacaaaggcatgattaccgtagccatgctgtttctgataagcgagggcgtccgtcagagcaatgccttgtcacagcttatcaaaaaactgctgccacagcagaccacttcggtcttccgggcacaaatacgcatgctgcccagcattgccttcatttccgctttcctgaacaataccccgatagtagtcatttttgcccctatcatcaaacggtgggccggctacgtcaaacttccggccacttatttcctgattcccctttcgtatgtgaccattctcggaggcatctgcaccctgattggcacttctaccaacctggtagtccacagcatgattcttgacgcaggactgaaagggttcagcatgttcgaactcggaaaagtgggagtctttatcgccctggccggcatcatctacctgcttctgttctctaaaaagctcttgccttccgaccgtccggaaaccaccagcgaagaagatggcgattcttcattgcacctggtagaagccgtaatcggtccccggttcccgggaatcaacaagacggtcagcgaatttgatttcaagcgccattacggagctgaagtaaaagaacttcgccgcagcggacgcacctataagaatctgagcgaggtcagtttccgggagggtgacacactggtggtgctgaccgatgacagtttcatccagacatggggagaatcatccgtcttcctgatgctggccaacggaaaagaatacgaacctgccggcaaaaagaaacgctggtttacccttttcctgctcctgttcatgattgtaggggccaccgtgggcgaactgccgggtattgaaaaataccttccagaaggcatcaagctggatatgttctttttcgtttccatcactacggtcatcatggcatggagcaaaatattccctccacagaaatacaccaaatatatttcatgggatattctgattaccattgcctgcgcttttgccatcagcaaggccatggaaaattccggggtggccgatttgctggccggatacatcatcaacctgggacataattacagtccctacgtattgctggccgtgctgttcatcattacaaacatctttacggagctgattaccaacaatgcagcggcagcactgtctttccccattgccttgtcattgtccacccagctgggcatcaatcccatgccgttcttcgtggtcatctgcatggcagcctcagccagcttctccactcccatcggctatcagaccaacctgattgtacaaggtatcggaaattacaagttcaccgacttcgtacgcatcggactgccactgaacatcattacgttcctgatttccgtattcctcattccgctgatatggccgttttaaaacagattaaatacgctttaaaccatgaataatcaagaaacaaatcatatctatccgatattcgaccgcatgctgggccgtgctgacaaagaagaactgctgaagcaacacggactcatgatctggtttaccggactgagcggttccggtaaaagcaccatcgccattgccctggagcgtgaattacaacaacgcggcctgctttgccgtatcctggatggcgacaacatccggagcggcatcaacaacaacctgggattctcggcagaagaccgtgtagaaaacatccgccgcattgcagaagtcggcaagctgtttgtcgataccggcatcatcactctggctgcttttatcagccccaacaatgagatacgtgaaatggctgccggaattattggaaaagaggatttcttagaaatctacgtcagcacgccgttagaagaatgtgagcgtcgtgacgtaaaaggcttgtacgccaaggcacgccgtggagaaatcaagaacttcaccggcatctctgccccgttcgaggctccggctcatccggctctttcgctcgacacatcgaaattatccctcaaagaatctgtcgaccagctgctcgacctgattcttccgaaagtaatcaaaaaataaacatatataaccatgcaagaagaatacaatttaagccacctgaaagaactcgaagccgagtctattcacatcatccgtgaggtggctgctgaatttgaaaatccggtgatgctctacagtatcggaaaagactcatccgtcatggtccgcctggctgaaaaagccttcgctccgggaaaagtacctttcccactgatgcacatcgactccaaatggaaattcaaggaaatgattcagttccgcgatgaatatgccaagaaatacggctggaacctgattgtagaaagcaacatggaagctttcaaggcaggcgtaggccccttcactcacggaagtaaggtacataccgacctgatgaaaacacaggccctgctccatgccctcgacaaatataaatttgacgctgctttcggtggcgcacgccgagacgaagagaaatcacgtgccaaggaacgtatcttctctttccgtaacgaattccaccagtgggaccctaagaaccagcgtccggaactttgggacatctacaatgcccgtatccgcaaaggtgaaagcatccgtgtattcccactgagcaactggacagaactggacatctggcaatatatccgtcttgaaaatattccaatcgtaccgttgtatttcgctaaagaacgcccggtagtcaatatggacggacagctgattatgcccgacgatgaccgtctgccggaaaaataccgtgacaagattgaaatgaagaaaatccgtttccgtaccttgggatgctggccgctgacaggagctattgaaagcgaagccgataccatcgaaaagattgtagaggaaatgatgaccaccactaagagtgaacgtacaacccgtgtcatcgacttcgaccaggaagccagtatggaacaaaagaaacgtgaaggatatttttaattatgcaacaacatggaagaattagataaaagcaaatcaggcaacccgatggaaggagaagccagaggcaagatgtccatcgaagaattcctggcaaaagatgaacaaaaagacctgctccgtttcctgaccgcaggttcagtagacgacggtaaatctacactaatcggccgcctgctgttcgacagtaagaaattgtatgaagaccagctcgacgctttggaacgcgacagcaagcgtatgggaaatgccggtgaacacatcgactatgccctgctgctcgacggactgaaagctgaacgtgaacaaggtatcactatcgacgtagcttaccgttatttctctaccaacaaccgtaaattcatcattgccgacactccgggacacgaacaatacacccgtaacatgattactggtggttctaccgccaacttggctgtcatcctggttgatgcccgcaccggtgtcatcacgcagacccgccgccacacttatctggtatccctgctaggtatcaagcacgtggtattggctgtcaacaagatggacttggtagactactccaaagatgtattcgacaagattgtagccgaatataccgctttcatctctccattaggagttcccgacgtacagtgcattccgctttcagcccttgaaggtgacaatgtagtagaaaaatcagaccgcactccatggtacgaaggtccggccctgctggaattccttgaaaccgtacacatcggtaacgaccataacctgaacgatttccgctatccagtacaatatgtactccgcccgaacctcgacttccgtggtttctgtgggaaggtagcttccggcgtcatccgcaaaggtgatgaagtagtagctcttccttccggcaagcgttctcatgtaaaaagcatcgtgacctatgacggcgaactcgactacgccttcccgcctatgtctgtaaccctgacactggaagacgaaatcgatgtatcccgtggtgaaatgctggtacacccggacaacatgccgttggttggacgtaacttcgaagccatgctcgtatggatggacgaagaaaagatggacatggaaaaatctttcttcctgaaacaaaccaccaataccagccgcacccgtatcgacagcatcaagtacaaggtagatatcaacaccatggaacacctgtctgtagaaaacggacgcctggccaaggaagatgttcctatgcagctcaaccagatagcccatgtggtactgacttcttccaaggagctgttcttcgacccatatacaaagaataaagctaccggtgccttcatcctgattgacccgattaccaacaacaccagtgcagtaggtatgattatcgatcaggtggccgacaaagacatgcataaccagatggaactgcctgtcctcaatctgccgaaattgggaatcgctccagagcactacgaagccattgaacgtgccgtaaaagaactgggacgtcaaggtatcgcaattgaattaaaagtttaattgacaagttgagtttttcaactgtcaattgccaattattaattatcaattaaaagaaatgggattacttgaattcaacaaactccccatcaatactttagtgggagccgactggaagaccttcaaccagataaccgctggtcgtaccatcgatcctgcgtataaaggaaaataccgcctgaccaaggctgtatgccgcctgttatctacgctggctcctctgcaggacaaacgttacgaaaagctgttggccgacaagccactggaacatgatccggtatttatcctcggacactggcgcagtggaaccacgttcatgcacaacgtattctcttgcgacaagcacttcggctataatactacctatcaaacagtattcccgcacctgatgatgtgggggcagcctttcttcaaaaagaacatgagctggctgatgccggacaaacgcccgacagacaacatggaactggccgtagaccttccgcaagaagaagaatttgccttggctaacatgatgccctacacgtactataacttctggttcctgcctaaacacatgcaggaatatgcagataagtacctgttgttcgatgatatcagcgatgccgaattgaaagtgtttgaagaaacctttaccaaactcatcaagatttctttgtggaatacccacggtacacagttcctcagcaaaaatccgccgcataccggacgtgtgaaagagctggtaaaaatgttccctaacgctaaattcatatacctgatgcgtaacccgtacaccgtatttgaatctacacgcagcttcttcaccaataccatccaaccgttgaaattgcaggacatcagcaatgaagaactgcaagaaaacattctttcggtttatgctaaattgtaccataagtacgaagccgacaagaagttcattccggaaggcaacctggtagaagtccgctttgaagactacgaaaccaatgcctttgatatgacacaggaaatttaccaaaaactgcagattccaggctttgaagacgctcgtgccgacatcgaagcttacgtcaacaaaaagaaaggttataagaaaaacaaataccaatacaaacctgagacagtagaactggtggaaaagaactggtcgttcgccttggagcagtggggatataaattgtaagactaaactcaatagaacaaaaaatgcgggacatacgttccgcattttttgttacacattctcaatctgtttacttacatacgattcggaatcctacagctgttttcagatgagctgaatcagggtaaacaatattcagtccatcagcctcttgcttccactctatcttattcttctctcccaacaattccacagaagtcacctgcttttgtcctatacccgcatcactccctaaagagacgattttcagtttatcaccagcctttggcacagtcatacaccaagcatagatggccccatctttgcctactgtaaaacgaaaatcggtggtatagaagctttccccgtcgatcaagcgtcttattataaaaatccgctattacccgttgcatggcatcacatttgtatccagtacctgttccagagctactgaaaggttgctggtctgtaccgtctgtataaatgaaatccggattgtatttatctacggcatccatcattctcaacgcccaccatttggcataccattcagcatactccagatgaccgctaaagataccggcttgaggaggagaccatcttgagttagccgcctcagccaccgtttcatactccctcaaattaatcccatagagatatttagggtctaatccttcccaccatttacctttgccatcggccagtgtcaggtttccgtcgtatggcactcctttcttatcacctttcgtatcactttgaaaagcagtttgccaccaccaggaatactcatgatggaaggtaagaccaaaacggattccagcctttcttgcagccttctcccattcgccaatcaaatcacacttcggtcccagacgcgtggagttccaaggctgatatttagaattccacatatcaaactggtcatgatgcacactgcgggttaaacttcttcggattccagtcgcgcaatgcctccttgtatcccacttccgagggatgcccataatttttcagatgattttcatacgccggtatcccctccacgtacatttttcgggcataccagtcgccactttctcctgccgactgcggtccaaaatgtatccagatgccgaatttggaatcccgcaaccattccggtgtacccggataatttgcctcaatcgacttccacgtgggggcatacggcccggaagttatcggcaaatctaatttcacctcttcaaaagtctgaatgttccccatcggaacagaattttccgccaacggtttatgtgctgacggtatcggtcctaactgataattcaccccattagtctgctgctgggaaaaagccgtcgcacaagctcccaaccacaaacaacctaacattataaattggttcatatctattcctatttttataaaatcacataattccttttacaaatatagatgggaaattaagcgaaaaataggataaaaatgtaggattataggaagaaatcgatgatttaatataagtaaggtatattcagaatcgaaatccttagaaacaaacataaccactccataaacccgacaatctcataatcaaggttacggttaacttacttccatagcaaactctccattctctatttgcagctgatttctcaaattgattcgattaattatcactttacgcctatcgaccaaactcttttgtccgatttttttgcaccaactaaaaaaatattccacaaatcagaaatgaaaaaaaggaataagatacaccacatttctcataaatcatctaactgaagcatcaatcacacaatatataaaacaaatattacccgatcactaaataacaatgaccgagtaatacttgtcttaaattgtgtaaagcaatatttctacaaaaataatagattcattctatagctattatttttcagctggagaatctgctttcaacggccaatacggattctgatacagaatagattgttcaactgtaactctatcagaagaagtcaactggaactgtttaattggcagaggttcaagataatgagccatagaccaaacaaaaccatcacgatacaagttaccagatgtcatattcttttcaaaaggtctcaaatattcacctaaacttacatttgaaacagttgcagaagaagaaccatcatccactaaatcttccgcttcataccagttctgcattggagtattccacaaatggaaaccttccacatgataaggagtggtaatcatctgatccattgctctccaacgcaacaagtccatccaacgcagtccttctgccataagttcacagcgacgttcacgacgaatattatacaacactttatcctgtaacaaagttccagcagtataagctccccaatccaaaacttctttatccatttctgtagcgtcaatcatggtcgtaggattaaccgcagtgccttcaaatccagctgcttctctaataagtttccaatattccataatcttaccagaattcaagtctctggtcaacaaatattgggcttccatataattcagcaaagcttctgttgctctaaatacaacagcacctgtataaccattaccatttccacacaaatctttatcgaatgtacctccctttctaatagtatatcctgtactataacctttttccgcattcatattcgtaatgtctggataaggttctacttctaccccatgagtttcttgagaggtcatatttttaaacaaattcttttgatcaggttctttcaagaaaatatgcaatctaggatctgcattttctctaatcttagccaatgtttcatcatcataaacaaaacctgtatgaggagcataatgtggttttccatccttcattacaaaagattccaccatacttcttgtcaatcctaccccattgttcccatgctgaataccgacttctacattatttactacaccaagtcccttactatattcacgccataacagaacatcagggaaagtagacatatcagtatttccgaacatactgaaataaggattatctggatcgtcttcagattgcggaactttccctgtattctgagtcaaactattcttatacttttcggccacagtttcggcactggcaacggcttctttcaagaaaaactcaatttctttatctatcgttcccaatggatactcataagaagtattataatctttcgatttaccaggccatccttccccatttggaacaaaagcagtacctttgaaattttccaaccaagaagcttcaaacaaagcaactctagatttcagcaattttgcgacatccggagagattcgattcttccgagtatcaaaattatcgctcatgtattctaccgcatgccctaaatcttccaaaataaaccgagcgacctcgtttcttggagaacgcttattcatttcaatcaaatattcttcatccaaaggtaaatcttctttaacaataggcaaatctccccatttctgcaacatagtaaaatatgcataagctctcaaaaagtacaattcaccaatatattgacgaatattcttttcagaaccagtcacttctttgttattataattagtaagagactgtttcaacgagtaatttatattatgaatattctcccagttccagttatcattttccaatgcaactttccactggccttttgcatattttacatcaggattaaatccgacctgattatccgtaccactatccaaaccaaagattccaaaactccagtttgtatgagaaggcaacacctcagtataaagtttattcacagcagcctgaatctgtgcctcatctttataatattcagtcggaacaactaaagataatggctctttatccaaaaaatcttcacatgagccaagactaaatgctgcaagagttatacagcttaaaattatatttctattcataacagtcaactattaaaatgaaacatttaaaccacaagataatgttctagacaaaggataaccaatacctcctacaccgctagagatagtttccggatcgaattgtttgaccaaacttgttcctgtccacaaattttctcccgagaagtaaattcttaaatcttgaatgccaatcttagatactactgatttaggcaaagtatatccaatctgcaggtttttcagtctgatatatgcggcattctgcaaatagcctgtctgcgtctgcaaattcttatcgttatacaaaggacgtggcagataagcattaatatttgcactctggtatccctcttttactgaccaagtattttcatctctaaagtaatcatgtacatctgaaataccgaaagagctccacattcctcggctattcgcaccaaagagataaccactaccttgccagaagtctctcttcattactccctggaaaaacattctaatatcaaatcctttccaacttgcatataagtccaagccaaacaagaatcttggagtactgttaccgattactttcatatcacccgtatctcccaatcttccagagccacttgaaatcttaccgtcaccatctatatctgcatacataatatctccagcacgccagtcagaacccagtgcatcctgacctccgttcggcaaaccttgtagatgctcggtcatctgagcatctgtccttgccagccctttcgttacatatccccagatttcattaatttcccgtccttcaatgtatgtagaaatagattgtgtcgggttattaggatacctggtaataaacgtacgggcatcagaaagattaaacttagctccataactgaaatcattccctatcatgtcattccaaccgatagaaagttcccaacctctggttcgcaagtcggtattattagttacgggcacagctgtacccaaaatagatggcaactcaggtgcattaccaatcatattctttgtatttctgacataatattcaaaacttcctgtaagtctgttattcaacaatccccaatccaaaccgatattgtatgattcgattgtttcccatgtcaacaatggagaaactaatgctggtacagttgctgtattgggtcttctgccattcatcatccattccccatttgccgatcccacaaccattgtctggtaagtctgataccagttggttgtattctggtttccaagtgtaccatatgaacctctcaactttaaagttcctattacggacgacaacggctcaaagaactcttctctggcaatattccatcctaaagagaaagaagggaataacttccactgattccctttctggaatctggaagttccatcatatctcaaattcgcttcaaacagatatttatcattgtaattataattgaaacgtccaaaaaatcctgccgtagaccatgaatttctatatccgctcacttccggagttatcggatttccgtcataatccaaaccagtggtcaaatctacatccggcttattagggaacataataccatctcttctcaaactataatacttttggttcaaattttcagcctggaaaccagccatcacgtgaagattatgcacatcattgatagagaaagtataatctgaatagatatttacattaaagtaattctctttcaggttagattcacttacgtatgaagttttgtcatacacatacggatttccatttacgtcatgattatataacatctgtctgtccacatgctcattctgatttttgattctataattcaaatcaatatgtgttttccaattctttatcggctctatcaaaaaacctaattgatggtaaatattatctgtctgctgagtagtctcaccaccttctgctattcccaaagaaggagaaggggtagaatagtaataaccatttgcgtcatacaaggacaaaacaggccatcccatggcatcatacaaatcatcattaagacctgttggtcgcaagtaatcttcacgagtaaaacgcattgtatagttcatctgcaaccaatccgtaacttttgaggagattttagctgttccattgtatctatccagaccatcatccgcaagattcatgaatcctccttgtcctaagtagttcaaacttacataatagttcagtttctcactacctccactcacactaagattgtgctcttgagaaaacgtccaggttttaaagatagtagaaaaccaatctacatcatcaataccttccgcgaatccatcctcccaatatccatcactcttagcaggtgtaccatataaaatcgttccgtcatctgtaatacgggttccagggccataaggtttcgcattgcggaaagccacaatcttatccatacgttccttagagaaataaattccacctcctccattagtattggcatcgttcacccagctaccgaaatccacagaattcattgaatgagtcatgcgaataggagtagcccatctaaaactattattataattgaatcgtgtctttcctccagtcgcgccagatttagtagttaccaaaatcacaccaaaaggagcacgtgaaccataaatagaggaagcagccgcatcctttaacacagatatactcgcaatatcttgcggattcaaggaattcaaatcaccttccatcccatcaattaaaaccaaaggactgccacttgatccttcaccaatcgtggaaacgccacgtatatttatactaggagaactatttaaatcaccactagactgagtaatctgtaatcctggaacaataccctgtaatgcctgagaggcattagtaaccggtctattccttaattccttatcatcaaccacgcttacagatcctgttaagtttacttttttctgtgtgccaaatcccaccaccacaacttcgtccatcatttcagtatcttccttcaaagtaatagctagtggtcctgattttatttgagaagatgcaaactcttgacttttatatccaatataactaatagataatgtaccattctctgaaagttccaatgtatatttaccatcaaaatcagttactgtaccattggtagtacctttttcaactactgttgccccaataataggttcaccattcgcatctttcacaactccagttactgttttcttttttcctgaggtcgtttgccgttgattggttttcttaacaacaatatttttcccctgaatttcatacgacacattttgtcccttcagtatttgagccacagcatctttcaactgattagcatcaacagaaaccgtacggtctgtatctaaatcacctgctatatacacaaaagaatatccactcttggtttgtaactcagcaattgctttttttactggaacattgttcatttttaacgatatactctgcgagtatatgctcaaattaaggcacaacaaagccccggccattaacatggctttcttcctgtaattcataaacttaagattttaagattaaaaacttctaataaaaagcgttttacaaggaatgttttattacttttaccgcactccttagaaaacatcttaaaaaacaacgagttaaaaaaggtctaaggtattgccggaagaacttccccttcttccggtttttatgttctctcaccccatactcaattaggtatccacattctgcataactttaaggttttagtgtgtttaacaaatcagttaatataaggttatttctttacttccttgtttataacgtacttttcctgtttttcccaacgcttgtaatatttcatttataccttgttcatcgcgactaaaacttccataaaagcgcaaattccgaagagaatctgtagcaaagatgatatgtacatcgtaacttctttccaaaatcttcaccacttctggtaatggcatttcatcaaaaaataatctaccggaggtccaccctaagctgtttttcacttttgttgattccttcttcatgcacccttccgccttatccagcgtaacttgttcatccggaagcagaatcatctctgcttctgcccgtaggcgattgcctaatgctacttttccttctaataaagaaactacggcttcttcatcgttcggatagtcccggaaattaaacttggtacccaacactctgaccgacaaggaaggagtctgtacatgaaacgggagtttctcattacgctctacctcgaaatatccttctccacttaattccacttcacggttgtctactccaaaatcctgcggatagaccagacgggaaccggcattcagcactaccaatgtaccatcgggcaaacggaggcgtgtctgtgcaccgagaggagcttctacctctacctgagtcaacgcattttgcaggttgctttctccctgacgataagagaagaaggaaataaggcccaccaccaacactgaggccgcatatttatagattgttttccaatctatgactttcttggaatgcttctgagccgtacttgcagccacccgtttccggaaggttttaaaagcgcggtcggcatcatagcgcgtacgttcttcctcctgtacggcagaaaaccagatttcctgctgctgcatgaaataacgtcggttttcttcagaactggcaatccatgcgtccagttcttcgcgtgcttccttgctcagacctttactcagaaaagcggcaatcagttcgtcgatatgtgaatttctttcttccattttcagggtttctataggtgagacgaaattttcgcctgagcgggtaggcgaaaaacgtaatttttttacttgaaagtcgaaaaaaataaaatcaggataatcaaatatttcccgagttctgaatgaagtgatgataatgcactctttatgtgatacttaaccgtattaacagaaatattcagctctgtagcaatttcttcgtattttttcccctcgaaacgacttttgataaaaaccttccggcagacttccggcaaattccggatggcatgatgaatttcttcttccagttcatgttccagcaaacttcccaaaggataatcatcagagagcagataacgcatctctccttcttccagaatagaagaaaaagccacttccgtacgttctttcttggaggacaggtaatccatgcaatgattccgcacggcacgcactaagtaactgcgtaaggaaacttgaatgtcgagtgtctcatgtacttcccacaaatgaaaaatcacgtcgcctaccagcatttcagccagaaaatcatctcccacatattcacgcgctatatgacacaacaaggcataatgatgacggtagaggtacttataagcctcttcatttcctcgtttcagttgctctatgataattcgttccgtaatttccatctgtatgttgtagcgtaaattcagtttattcaaacattttccgataataggcggctttatctgttatttgtttccattgttctatcccattgatggaagaagaatgtacccgctcataaaacgcgatttcctcatgcagcggacggaaatcattttgcatcagtgaaaggttcagtgctttttcaattcgagcaaaaccatacatcagagaatcttgtgctacctgctgaatttttattgtataggcagaatcagctcgcaggaaatctcttcgggcggtaagcgtatctcccttataatcttcgagtacggctttcaagtgcagtaattcggacgacatggaatcgctcatacatacatccatttcacgcaacaagtccaatacttccgacaggcgccagccctgcaacaaatagcgatatttcaacagataagtctgcttgtcaggatgcaaagcaatcgcactgtccagtttttgacgtataagtgagtcatggatacatacttgcggatgcgacttgtcaattggccgattccaaaacaaagaatcactttgcatcaagctgtcagcctccagcacaaatgcatgcacaactttttgtatatcagacgcatcatctgatttctcatgcatacacgcagaaacgattccagccagacaaccagccattaaaaagagttttgcatccatagttcgaagattggttttgcgcaaagttaatttttttcatttataccaaacataaaaatgcaaaagaatctaaacaaaaacagaaatctccctacgaaaaaagttattcgccagtaacaaattctctgtttcacactgtgggatacaaaaaccacagtgtgggatatatatttcacagtgtgggatacaaatcccgcactgtgaaacagagaatataacaagacaaaatggagtattcacagaagcatctgaaaactatatctggtgagattcagattatttcttcagacttctttttactactgcaggtatgccggctgccagagaatcatcgggaatatctttggttacgacactacctgctgcaatgatacagcgattgccaatggccactcccggacatactaccacatttccgcccaaccagcagtcctcacctatcgtaatgggataggcggtttccttttcttcacggcgctccacataatccatgggatgctgaggtgtatagaactgacaatggggacctatcagggtgtgttttccgatacggatatagcctccatcgagcatgatacagtcatagttcataaacacattttcccctaaaatgatacctgtaccatggtcacaatggaaaggcggacagatggtagtgctttgcggaataccaggaatcagttcttctatcacctgacggtagtcttcatcgtagatggtcatggaacgcaaacaggcacagactttcttggcgtgtaccagactggcatgtatttcagggtcggaaaaataatagagctcctgactgcgcattttttcatattctgttttcataggctttaatactaaaattaccaggctcaaaggtagagggatttttgtttatttgcaatgagatttgatactcattaattttactacatataggtaaaaacaagaaaagccctgaaaatgcgaatacacacacttcaaggcttatacttatatgttgagaatcttttacaagctataatatctttagtaaaaacaagaaacccttgcaagttatcacttacaagggttattcttttcttcgtacccaaacaccacatgtccatcctatgtctttctcttttcacaggcaatctgccaccaagccgagtttccagcagcttgacatcgtacagctgtcttctcctgccctgctctcttacctgcaggaaagggggataaatacggcactggcgaaaagagaatgccgtgaggcacacttcaccaacaacgacaaacggtatttcgccattgcttttccgaacatatcgggcagatatgaaatccgcaaccgatatttcaagggctgcatcgcaccgaaagaaatatcacatatcagacaatcgggagagcagagaaaagcatgttacgttttgagggattcatagattgcctttcctttctgacactaaggcttgaaaactgtccgcaatcccccgatttcaacagacaggactacatggttctgaactctgttggcaatgtttccaaggcactctatgctatgagcgcatccactgcttccttgacaatgaccgtgcaggaatggaagccctgcagcaaatcaaaaaggaatataacaataccagacatatacgtaacgtttcacacatatacggcggatgcaaggatttgaacgaatacctgcaaaaacaggcagcggcaaagaaacaggctcaatccatcaaagtgaagacaccgcccaataaaccgggaggctttcggttatagcccactataactacac

SEQ ID NO: 3836 - DNA, 8304 bp, Unknown
  gut microbiota DNA sequence
ctttaccctaatgacccacttaaggcgtttctcccctgagaacccagagcaaagagtgaccctctctttgcaatctccgcttatgggtgcacccctaagccccccatacgtttacgaactgcggaaaagcaaacaataaagtacaaaccaaaaaacaagtatttatggcaacaaaatcaagcatacatatcaagccctgcaacatcgcatcgagcgaggctcacaacaggaggactgccgagtatatgcgtaatatcggagagtccagaatctatgtcgttcctgaactctccaccgataacgaacagtggataaatcccgacttcggcagtccggatttgcggacgcattatgacaatatcgacagatggtaaaggaaaagaccggacgtgccatgcaggaaaaggaacgggaacgcaaaggcaagaacggcaagacagtcaagattgcgggatgctcccccatacgtgaaggagtgctgcttgtcaggtcgaacaccacactggcagacgtgcgtaaattcggtgaggagtgtcaaagacggtggggaatcacaccgctgcaaatcttcctgcacaaggacgaagggcattggctgaacggtcagccggaagcggaagacaaggaaagtttcaaggtcggggacagatggttcaagccgaactatcatgctcatatcgttttcgactggatgaaccacgaaaccggaaagagccgaaagctcaatgacgatgacatgatgcagatgcagaccttggcatccgacattctgctgatggaacgtggacagtcaaaggctgtcacgggtaaggagcatctggaacggaacgattttatcatagagaaacagaaagccgagctgcaacgcatggatgcagccaaacggcacaaagaagaacagataaatcttgcagagcaggaactgaaacaggtaaaatcagaaatacgcactgacaaactaaagaagacagccaccacagcagcgacagccataacaagcggagttgcttctcttttcggaagcggaaaactgaaagaactggaacgtgccaacgaaaaactgcaagacgaggtttcaaaacgggacaccagtattgaaaaattgcagagccagatacagcagatgcagaaacagcatgatacgcagatacacaatctcagagaaatgcacagacaggaacttgacatgaaggaaaaagaactgtcacggctcgccagaatcatagacaaggctttcaggtggtttccgatgttcaaggaaatgctgcgcatggaaaagttctgtgccatgctgggattctctaaagaaatgacagaaagtcttttggtcaagaaagaagccttgaaatgcagcggtaaaatctattcagaacagcacagacggaactttgatataaaggatgatattttaagggtggaaaatgaccctgacgatgaaagcaggctgagcctgacaataaacaggaagccgattgccgactggttcagggagcaatggcacaggcttagatacggaacaagactgtcgcaacaggaagaaaagaaaagtagaggaattaagatgtaacttgatagtttgcgactctagattcccgattatcaattaaattgtgtatctttgccaatggattgaggaaactctttccaagacatgttagaattagaagaagcgttatgctggtcgtggtatcggaaacctgggaaatttcttaagacatacaaacgatgatggcatagtggttctcacgctatagcgtgggctgctattgttatatctgtttgtatgggttttcctaggacctccgacacaggtgaacgatttgtggttcacgcttcgtgcgttaggaatgacaattaaccaataaacatagttcatatgaacattaagcaatgcatctatttatttgccacaatcgcattttcactctcatcttgtagcgatgacagcggcatggaaaatgattttgagcctaagactcatctctagaaaaaaggcaaaaatgaatattatcttcttaaaagtgaatattgccctatttggatatccctctatctttgcagttgattatgaaagtattgatatgaaacaactaatattcatttttaccgttgcatggggtgctgtagtaggcagccgtgcgcaagaggtgcttactttggatgattgtcttcgttggggtattgaaaataacctttctctccggggacagcgcaatgagattcaaaaaagcaaatatgctatttctgaaaaccgtgccaagttattaccgcaaattaatggagtggctaattttaacgacaacttcgatcctccagtgtccgtaacagatggttctgcttatgacaaaccttataatgtaacccagacgctgcagtataatgccgcagccggattgcagcttcaaatgccactctataatcagacggtttataccgctctttccatttcgaaggtattggatgaaatcagccgtctgtcttatgaaaaagcgcgcgaggacttgatgatgcagattgctaagatgtactatctgggacaggccacggccgagcagataacgctggttaaagccaatattgcgcgtctggaggaattgcgtgacattacggtggctttctatgacaatggcatggctatggaggtggatgtgaagcgtgtcaatataaacctggaaaacttgcaggtacagtatgacaatgcacaggccatgctggctcaacagctgaatatgctgaaatatgtgatggattatccggcagagaaagatataacgctggaaccggtgaatgctgaaactattgctccgattgaattgaccggcttgtcagaaaatctgtatgagcttcagttgcttcagtcgaagagcgacttggcagaacggcagaaaaagatgatttcccatggatacattccttcacttacattgacgggcaactggatgtatacggcttatacggataagcttcatcattggtttcattccggaccctccaatcattggtatcgttcttatggtttaggcttggcactgcgtgtccctatttttgatggattggataagaggtataaaattcgcaaggcgaaaattgatctggagaatattcgtttggcgcaagagaatacgcggaagaatctggagacacaatatgtcaacgctacgaacgatttgatgaataaccaacgcaatttcaagaaacaaaaggataattatcttttggcagaggatgtctatgaggtaacatctgaccgctatcgggagggtattgcctccatgacagaggttttacaggatgaaatgcgtatgagtgaagcgcagaacaactatatcagtgcgcattataactatcgtgtaactcacctttctttgctgaagttgactggacgtgtagaaagtctgctgaagtaagttctcaattattttattcatagtcaatgatcagctatcaattttaaacatatggaaacaacagataaaaacagtgctgcaatgagcacacatcacgaacaggctaagaaattgagaaaattgcgcacccgccagcgtgtggtaagcctgattggtatagctattttagtttgggggattattcaggttactttcttgtttctggattataaaaatacagaatccagtaatgatgctcaaatagagcaatatatctcgccggttaatctgcgtgcttcaggttatatcaagaaaatctatttcaccgaacatcaggaagtgcacaaaggtgatacgctgttggtgctggatgaccgtgaatacaagatccgtgtgatggaaactgaggctgccttgaaggatgcattggccggagctactgtaattggtgccacacttcagacgacacaaaccacagcttcggtgtatgatgcttctatttctgaaattgaaattcgtctggcaaaattggaaaaagaccgtcagcgttatgaaaatctggtgaaacgtaatgctgctacgcccatacagctggagcagattgaaactgaatattctgctctacaacgcaaactggaagctacgaaacgtcagcgcagtgcagccttgtccggtgtgaatgaagtttcgcatcgtcgtgaaaatgtggaagccggtattcagcgtgccacagcggcgttggagatggccaaattgaatctgtcttatactgtagtcgtggctccgtgtgacggtaagctgggacgtcgggctttagaggaaggtcaatacattactgccgggcagaccattacatatatcttgccggatactcagaagtgggtgattgccaattacaaagagactcaagtggaaaatctggctatcggtcaggaagtaaggataaaggtggatgcagtaagtaataaagagtttacgggtaagattactgctatttccggtgcaactggagccaagtattctttagttcctactgataattctgccggtaattttgtaaaaattcaacagcgtattccggttcgcattgattttatcaatctttctgaagaagacaatgatcgcctggctgcaggtatgatggtggttgtgaaaactaaactctgatgttatgtcctcttatccaagaaattatccgttctacaattgggtgcccaagtggttgggcattctgatattggtgttgatgttcatccccattcttactgtgggtggtgtgtattctgtgaacagtactgagatgatgagcgggctgggtatcatctcagaacatatcacttttaccaattttgccacctccatcgggatggctgctttttgtccgtttttataccggctggtggtgattcgaagagaaaaaatgatgtgtctggccggtttttccatgatgtatgtgctcagctatatttgtgccgaaaccgacagtatctttttgttggctctctgtagtgtgttgatgggtttccttcgcatggtactgatgatggtcaacctgttcaccttaatcctttatgcagggcgcattgaggcctatttgaaaattaagccggggctggagccggcagacggtgagggctgggataagcttgatattgaacgaagcatagcgcagcctggcatttatctgttctttatgatattaggacagctgggaacatcgctgactgcctggctggcttatgaatatgaatggcagtatgtgtattactatatgatggggatgctgttggtatgtatcctggttattttcgtaaccatgccataccatcgctttcaaaacaagcgtttccccattaatttccgtcagtttggcaatgctaccttgttctgcattccgctggtgtgttttacatatgtcatggtgtatggaaaggtgctggactggtgggatgatcctactatccgcatggctgcgattactgcagttcttacgggtgctttattcttttatatggaatccacacaccgcagtccgtattatcaggtgggcgtgctgaagttgcgcaccattcgtatgggagtattgttctattttttgctaatgtttctcaattccagcgccatgtttgtcaatgtgtttgccggcattggcatgaaattggataactggcagaatgcttcgctgggcaactggaccatgttgggctatttcatcggggggatgattaccatctttctcagcatgaagaaggtgcatttcaaatatatctttgcaggcggatttgtcatgttgggcttggctgctctttttatgtattttgaggtgcagacggatggtctgtatgaacggatgaaatatccggttattatccgttccacaggcatgatgatgctctattcgctcattcccacttatgccactcagcggatgccttataaatttctgtcatcatggatttgtaccatgattaccatccgtatggtcattgctcccagtttgggcgcggcagtatataccaatgccctgcaggagcgtcagcagaactatgttacccgttatgcacaagatattgatttgctacatcctgacgcttccgcttcttttatgagtaccgtacgtggcatgagttatcagggaaaaagtaaggctgaagcagtgaacatggcagccatgtccgtcaagggacgtgttcagatacaggccactttggttgcagtcaaggaaatggcaggctggacactctatgcctgtctggcatgtgcaatatttgtgctggttgtgccttattctaagagaaaattagtatcttagtcgcttgaaagtgcctaatgcacacggacaagcatgtatgaagacagttcaagaacgtattacattattaggaaaggctttgtttaggcgagatgacatatgcagttcggaaggaagtatttcctccttcccaattctctttcacaccccatttttggtcagtggggtgggaatagtgatttgtatgcaaggtttttttacttttgccctgaatcgttgtgtgatgcgagcatctgccggagaaaccttgtttattcctgatggagcggagtttcgggttatggaagagtcttctgatttggatgtgcatttcctgctgtatcaggttgaacctatccgtgatattttagggaatcaggtcgtatctatgtacctttattctcagttagtgcccaaaccttgttatgtttggcagactggcgaagaggatgagttactccgttatatgatgcagcttgatgctacccttcttcaaaatgatactttccgtcagtatgagcagaaactgttgctgctggcactgacccatcggctctgttcgctctataatcgtaagttgatgaacaatcagaatgcgatgggacatcgtaatgaggtgttcttaaagcttatttcgctgattgaacagtattatatgcaggaacgtggagtggagttttatgccgataaattatgtctctcacctaaatacctttctgtcatatgcaaatcaatatgcggatatacagtaaaggatttggtgtctaagtccattatacggaagagtatttctcttttaaaaaatacacagaaaaacatacaagaaattgcagatatgttcaattttcctaatgcctctttttttggaactttcttcaaaaagcaaatgggcatgtctcctggacaatatcgcaagaacatcgctttttaattcgccttcattatggctaagatctgtataaaaaagcaactactaagtgcgaaatggatgatttcgtacgacttcaccgcaagttatatgagacagcctctttctatattaactaacaacacgatcacaactaaaacataaaactaaaaattttcttttgagaagtcttaaatcgttcaatttccaaagagagcgatttctttaattgaacagccataaagcccagaaaaggcagatttgtttcttcttcctgtgattgacgtaaggcagaaatatactcttccctatcttccttaaatatcttagtcggaaaaaggttgtagcagaactgaatataattcatcagtaggcgggcggttcttccgttgccatcgacccacggatgaatggtcactaagttaagatgggcattgaaacttagttcgtattgttcccgaaatgttcccactgccttctgtttttcctgtaataaagcgcaaagttcctctactttggcagggactttctgataactcatataagaacgtccatcaataccagccgtcacgccacacaagcgaaattcacctttggaagaatcaaaagagccacccataacgttataaatactgcctgtcgtacgcatcaatgtcgaattcaacttttgcaagaatgctgaattaattggtttcttacttttggcttcctctttggcaagctcatatgccttctttaagtcctcattcatcaaatgatacaccaaaggtttccctttagctgtcaatccctcatcgaaaagcatttgtgcctccgcttcggtgagtgtagaaccctcaattgctgtagaatgggtaataagagaatagaggtagtacttttcatagtccaccacttcactaataccaagttgctgaaacttttggtataaccgttcaatctcttgccaaacaccttgttccattgacttttatttaattggatttatctcttttcaaaggtagtgtttttgtattgcgtagccaaagaaaataatgacttactactatatttttgcgcctgtggggaaaatgtggggaaaaatcaggcaaaaaaaggataagcgattgacaattaatcacttagcctttcattcagtacccagacccggggtcgaaccgggatggatgttactccactggtgtttgagaccagcgcgtctaccgattccgccatctggg

SEQ ID NO: 3837 - DNA, 278 bp, Unknown
  gut microbiota DNA sequence
taacccttttcgttgataccttcacccttgaattccagttcgatgcccgcatacttgaatgccaggtaacagaattcacgtacactgtgctgcacacccgtagcgatgacgaaatcttccggcgtttcatgctgcagaatcagccacatacattccacgtaatccttggcataaccccagtcgcgcagtgagtccaggttacccagatacagcttctcctgttttccctgtgcaatgcgggctgcagccagcgtaattttacgtgttacgaaagtttc

SEQ ID NO: 3838 - DNA, 3988 bp, Unknown
  gut microbiota DNA sequence
aggtgcgaaacgtgtttattgtggatttggaagaagatgcagaaaaagttgcagctttgaatgcagaatatgtacttgtaggtggagtagggcagaaaacagactaccgtccggctaacggggaaaacggtgatgcctattatatgttgaaaataacagaactgaaatcggctgactgattttttgtcggatacagtgtggcggctgcttccttttgtaggggaagcagccgttttttgttatatagcagtcggatgtgacatttttgttgagatttgttactttcgttttattagtttgtgtgaattctcctacctttgcaacattatataaatgtatctttgttaaattggatgactatgaaacaatggataatgatggtaggagggtttctttcgtggatacctgcttctcttttttctcagactttatgggtcacttctttggacagcattgatttggacaaatctgtggcagacttgaaagattgttatgcggtggagtttttattggagacaccggcggcggaggaactaccggtggatatttatctgtcggacatccggaaacgagatttgcgggagttgcaattggaagagccttcccatgtgcgcaaggtttgtctgaccgcccgttctttgggcaaaaagcggcaggtgctgacggtgccgataaaagcttttgacacaccgatggcctcggagggggtacttcgccggatacgttcaatctcattggacgtaaaaggtgaaaagcagaaagaagcacgtctgttatcggcccgcatattggagggtaacagtgtgcatgcgcacgcttcacgagcttctttggcagcggaacctggagaaacggtggtttatccggtgacggtgaaaaacctggagacgcgtccgcagacgattcatttctcgattaagcggtatgggtgggaagcgtttacggctgaactgtccgacaatgaagtgtatctgcgaccgggggagatgcataccctgagactgaaagtaacggtgccggaaggagttccggccggaggccgtgaaacccagaatttatatatacttccttctgcaaacccgtctgccgcccggacactttctttcacaacgcttcgccggatgccctatcctttctctcttcataccgcagaaggatgggaggaggtcaggaggaaagccgaaaagtataaatgggcagccgagcgcaaagatcgttatctggcagacgcagaacgttgggtcgtaccggaacttcctgatagtgcagtgaacggagacggggaacgatatctgtttcgtacggaaattgagaatgctttgatgagcagtgcgatagcctggcaactttcacgtgagaaacggtatgctcagaaggtaaaagattttttattgaaagtgtcggactataaaaaaggattcccggtgacacggaaagtgtgtcatcaggcatctgtgcaggaggggggcatgtttcagcatctggcacaggcatatgatttaatcggagattccggtttattgacagagagtgaccggaagcagatagagtatactttccgcctgtatattgtgcaggaacttcgctataagcagcccggcggtgccaattgggccgtttcgcaactgaccggcgcttttttttgtgcgttggtgattcaggattttgctttggtggatgaggttttgtatgctccatcgggattgatagacaaatttcgtacttataccatgccagacggctggtggtatgaatgtacggtaagttataatctttgggtggcaagcgaatacattcaggtggctctggctcttgagcctttcggctattctttgctggctgaaaagtttccggtggactataacttgacaccggaatacgacaagacatgggaaaatgagcgggaagaccgtcggcttttgcatcatggacacagcttccgtattcagggaggcattcatcagccttacgtgaccatcaagatgatggtggatgccttgcttccgttcctggattaccgcgggtggatgttcggggtgaatgacgccacagagcgggaagtaggagggggaagttttgaactggcctactatgcgttcagagattcccggtatgcggagtttattcgtcgcactcctcagcggagcgatttgatttatggcgtgccggacttgccggaaggaaatcaggagactgtgaagggagcctatgccgataatgccggagtgttgatgttgaggtcgggacagaaagagccccgggaacggattcaggcggtgctgagatatggcacgcacggtggttatcacggacattttgaccatacgggcttgctctcattgatgcggtatgggcgcagcttttataatccggaaatggtgtggtatagttatgccccttatatgtataatttttatgtgcagacaagcctctcgaaaaatatggtgatagtggatttgaagcagcaggaagcggaagaaagtcaccgttgtttttttcatacgggagaaatgtttcaggcgggaggcgttgagacggaggccgcatggagttatccggcttatggaggattgcgtagcagcatgaaaggtccccggtcgttcaaggaaaagacagagcgtgaagcccgttacttcccggatgcgaagaatcctccagcctttggtgtgttgagcggatttaccgaaccgatattccagcgtcgtttgatgctggtgaccgatgagtatgtggtactggcggattatgacaaaagtgtggacagtgttcctcaccgctttgatttgttgtttcagataaaaggcttgagagggattgccgctaaaggtaaaaaagagaaagggcataccgcctggttgagtaccgattcgttgagtgccgctcctttggtgacggatgtgaatcattatcaggtagaaggtacgatgaaagcttcctttctgacccgctttggaaaagacgcagacaatcggggaacacgaatcttcggcgaaccgggtgatttgtatctggatatatataatgcctatccctgttattcgcgccgcatatttgaaggccgtgcgccggaagagcatggcacccagcgtatgcttacttatcaggtgagaggagatggaaagacattagcggaaggaaagttcggttcctggattttaggcgacggaaaggtggatgtggatattgcgggagtcaggaatttaactttgtccacttcgattaaaagccgctccaagggtgtttatactttgttttggggagaggccgtgcttttgttggaggacggaagggaaattccgctttcccggcttgcctgccggaaagaaaacgtaatggaaaattcttttggctgcggcaaggattaccttggaggacgtatcaatataaacggtgaaaactatgcgtggggacttcctgcagaccctctgcatacagatgcggaagcggcttacacgtttgatcttaccggactgcatgcggttcgtttacggactgtggtcggtggagactatccgttaggtgatgagacagaaagaaggaaaacattgggagtgactgcttatggtccgtccgctcgttttttgaccgtggtggaaccttatgagtcggagggtaaaatagcatctgtagaggcgacttctgcggattccttgatagtccgtttaaaagatggcagggaacatcggttctttttctccggaatggatgcggagaaagacaaattatctgtgattatgcaggaatgggtaaacgggaaattggtgaagaaagaaaaggctaaataaggatgttacgactctcccatttaaaaccactcctccctgaaagaactgagatttaaataaaagaggcgtgggagggtacgatgcggcgtacaatttttgtttcggtgtacactctcgcgcatttcggcgtgccggagaaaactcttcggcgtgcggaaaaaagatcttaggtggttgtagtgtactaaataagttgacacaat

SEQ ID NO: 3839 - DNA, 441 bp, Unknown
  gut microbiota DNA sequence
aaatacacagaaaaaggatatatccgtatccgcgctgaatggattacagaaaatggtatacgatatgcacaactttctgtagaagataccggatatggaatcggacaagaagcactgacacatatcttcgagcgctattaccaggaaagcggagaacatcaggcttctggaacaggtatcggcctggccttggtaaagaatttagtaaaattacatgaaggagatattcaagtaaaaagtttgcccgacatcggcactacattctacctacgcttgctggctgaaaacacctatcctcaagcattacacggagaagatatgcatgccggaaagcaagatgtcaaagaaaagtacattgaaaagctggaaatcagcgacccagacagaaatgcgcgtcctatcattttagtggtagaagacaatgccgatatacgcgactac

SEQ ID NO: 3840 - DNA, 3054 bp, Unknown
  gut microbiota DNA sequence
cttcctgaactggttgtttgtgtaaagcaaattttgtcagacgtggaagcaggtaagcatgacagcttattcttgtcatagaatgaagagtgaataatgaagaatgaataatgaataatgaagaacgggaggggtgactcttccgttttttttattatgacataagaacaaaaagacataattttaataatgatgaagaatgaaaagtgaaaacgtgatacgctcaccgcttttactttttaacttttcacttttaactcaatatgttcttctgttcttttgtctaaaaacaaaaaggaatattctcattcttcaccctttgcttttggttctataaataaaagttataaatcgggttgattttatttgtattttctgtttttataacttaaaaatgagtatctttgcaaacgaatcatttaattgataaaatatgggacttgatcaggtaatcgggaaaaatatcagggcttttcgtgagcatttgaactatacccagcaggaaatcagtgattatttaggtatcagtcagccggcatacgtgaaatatgaaaaaggggagactgcagttcctttggaggcaatggagaaactggccactctgtataacgtggatgaatacgatctgatggaggaaaatgaacagctttttcagacatctgtggcctgtgcgtatcgtaagacgggaaatattggaaatcttggtcagatttctcaatttcagaaaatagtcagaaattatattcagatgtgcaatgagcttgagaagtaaagttgaactggaatgtcttgcaaccaggttgcgggaggagatgcacgtgactacaaaggaccctgtgcgcattcatcagatattgaaagaaaagcacgtgcttacgtggtttaagaagctggatgataatttttcgggcatggcaatccggataaagggaaacggatcttcttctgacaagtattttatgttgataaatacggctttgtcttatgccaagcagcgttttactgcctgtcatgagttgtatcacttgttgtatcagaaagattttaaggtgtcgcagaacaatgcggggctgtttaataaaaaagaggaggaagagtataatgccgatgtgtttgcagcctaccttctgcttccggaaatggggttgaaggaactggttcctgccgaggaacagcaggttgacaaaataaccttagctactcttctgaaggtggagcagaattttctttgctcaagggcggcacttcttacccggctgaaggacttgaaatggattaccaagaaaacgtttgacctttaccagaaaaatgtggttgcttcggcaatcgaatacggttataatacgcagttgtattatcctacttatcagacggagctggtgggagattataacttgaaagctcgtgaattatatgataagggacgtatttctcaggcgaagtattactcgttgctgatggatatggaaattaatgtttctcaagaggtatatggggaggaataaagtaatattggtggatgccgatgtcatctctcatttcatggctaccggttatatagacaggctgacggaaattctgcagcctcatgccgtgatgattgtagagaatgtgtacaaggaggccagctatcatcctacggagccggacaggaaacggaaggtggacaagtggatggagcgctgcaaggtatgcaagattgcttttccttatgccaatgaaaatgtccggcgagagtttttccggcttaaaaaagagaatccgatgctgggggacggagaacgggcctgtatgtcgatggcgcgttttggacaggaggttatcgcaagtagtaactttcgggatgtggctccttattgtgatgagaatggcattgaatatattggaacgctggatgtgctgactattgcaatgaataaggggatttttaccagtgatgaatgtaatcggttcatggtggaggcaaaggcgaaaaacaaagcgaaatttccagttgacgatattactgtttatcaggctccggaatacatcagtacgttttgatagtgaataatgaaaaataatgaagaattaagaatgaagaatgaataatgaagaacgggaggggtgactcttccgtttttttgttatgacataagaacaaaaagacataatttcaataatgatgaaaaatgaaaagtgaaaatgcaatacgctcgccgcttttactttttaactattaccttttaactcaatatgttcttctgttcttttgtctaaagaaacaacatgtttctgtgaggcgtatcgtttgaaaaacttatgcgattaagttggaaagatgaaagtttttatgtttctttgtgtaaacttcatctctgcaagctatggttagtacaacagacatcatcgacagactgaaaatattcaaagcacaatcggcttcgaaatataaaataaagttcatggggttgtttggctcctatgcgcgccagcagcaagatgaaaaaagtgatgtggatgtttttatctgtctgcaggaaccggactttttcgtgatggagcagattaaagaagaacttgaagtcttgctccattcttctattgatttagtgaactttagagagtcacttcgtccaacgttaaaaaagaatatccttaaagatgcgatctatatctaaagaaatattgattgatttattggagctgattctggaaaaagctactctcgtgataaacagaaatcagtcgattacgtgtgcacaggattttcttacatcgccggacagaatggaaaaatttgatgcagcatgtatgctgatacaggtagtaggtgaaacggctaagaagatagatgatcgtacatcgtctctgttgtttgcgcattatccgcaagtctattggcgaggcgtattcggatgtcgaaatattatttcgcatgaatatgggaatgtagaccccattcagatatttggtataatcaaaaagtatcttcctgaactggttgtttgtgtaaagcaaattttgtcagacgtggaagcaggtaagcatgacagcttattcttgtcatagaat

SEQ ID NO: 3841 - DNA, 1410 bp, Unknown
  gut microbiota DNA sequence
acgccgacatggcggcggtcaatgtgcagaaccgggtgaacggcgtgttgagccagcttccggcagaagcgaccaagaccggcgtcaccaccgagaagcagcagaacgccgagttgctgacattcgccctctatagccccgacaaccgtttcgaccagacctttctcaacaattacgtgaagattaacgtggagccgcgattgaaacgtatcggcggtgtgggaaaggcacaactgttcggttccaactacagtatgcgcctctggttgcgccccgacaagatggcacagtacggactgattcccgatgacatctcctccgtgctggcgaagcagaacatcgaggcggcaaccggttcgttcggagccaatcaccccacggcaaacgaatacacgatgaagtatcgcggccgcctctccacagcggaagagttcggcgagctggtcatcaagtccctgcccgggggtgatgtgttgcggctgaaagatgtcgccgacgtggagttgggcgatgaatactacagctattccaccgaagtgaacggacatccggctgccttcatgctcatcaaccagaaagcgggctccaacgcttcaagcaccatcaatgagattcacgaggtgctcgatgaaattgaacgcgacctgccggaaggtgcggagtttgtggtgctgaccgataccaacaagttcctgtatgcctccatcaattctgtcatacggacgcttatcgaggcgatacttctggttatcgtggtggtgtatgtgttcttgcaggacatcaagtccacgctcattcccacggtttccatcttcgtctccatcatcggcacgtttgccgtgatgtcgctgataggcttttccatcaacctgctcacgcttttcgcccttgtgcttgccatcggcacggtggtggacgatgccatcgtggtggtggaggcggtgcaggcgaagttcgacgaaggctaccagtcgccggtacttgccgccgatgatgccatgaagggcgtttcgtccgccattctcacctctaccattatctttatggcggtgtttatccctgtggcaatgatgggcggcacttccggggcgttctatgcccagttcggtatcacgatggcggttgccgtgggcatatcggctatcaatgcgttcaccctttctccggcgttgtgtgctttgttcctgaaaccttatatcgacgagcacggaaacacgaagaacaattttgcggcacgcttccgtaaggcatttaatgccgtattcgagcgtctgagccgccgttatgtgcgtggtgtactgtatatcatccattgccgatggttgctgtggggaacgattgccgcctcgttcgggttgctggtcttgctggtcaatatcacgaagacaggacttattccgcaggaagaca

SEQ ID NO: 3842 - DNA, 54582 bp, Unknown
  gut microbiota DNA sequence
acctttttaggaatataatgtttaacctgtcaactttgtcaggaattaatcttcaaactgacaactattttcagtacacttcaggtattggggaaccgtcagcattctgatatcgaacgtctcaggggagcactttgacgtttacgttaaaacgcaaaggcgttttggagcatgtgtgacaagtctttttgcggcagaaccggcggcttgaaggcaacggaacggccaggtggtaaaatcgttgtcaaagcggacgatttaaccacctggctttcttctttttctatatagagaaaaatttttttcgtccttcatccttcactttttgggaaactttcattgaaaaacagccgattacagtgaaggttgataggtgaagcaggaatacagccgaaagaagaatcattccaatttattgtgtcacaggttattgtgatgaaggtaagaaacggataaaatactagaacgtgaaaaaatgcttttgttacttcatttctgttttttgttacttttatggttccaattataactggcgctgtttaaatttggcttattgaaaattgtaaatttgaataccatgagaaaattgtttttgtttattgtttgctttattctctttggggtagggataaaggcgcaacgtttccctcaagctgttttgcccggtgattatctggacccttctattttgcgtgacgggaaaaattattacatgacgcattctcctttttattatgcacctggatttctcatttggcattccactgatttgatacattgggagccggtttgtagagccttaccagagtatgaaggatctgctatggcacccgacttgctgaaatatcaaggtcgctactacatttactatcccacatctacgggtgaaaatttcgtgatttatgccgacaatattcgcggtccgtggagtaaaccggtaaagctggatgtaaaaggcattgaccccggtcatgtggtaggagaagacggaaagcgttacctgtttaccaacaacggctggattacccctttgagtgatgacggactgaaagtcaccggaaagagccggaaggtgtacgacggttgggaatatccggccaactgggttacagaagggaaggatatgtacctggaatctcccaagctactttataaagacggatattattacatgatgtcggccgaaggaggaactgccggaccggctaccagtcatatgtgtgtggtggcacgttccaaatcggtgttcggtccgtgggaaaattccccttataaccccattgtacatacttacagtgccagtgaaaactggtggtcaaaaggtcatggcaccctgatagatgacgtgaacggcaactggtgggtggtatatcatgcttacgccaacggctaccatacgttgggacgttctaccttgattgaaccgatagaatggactagcgacggatggtgccgtaccacacaggacgctgtctggttaagtgaaaacagacaaccggaatggaagatggaactgtcggatgatttcagtaaaccggaattgggccttcagtggacattctggaaggaatatgagcccaaagttttgacatttacggaaggggaaatgcaggtgaaggccaagggacgcactccggcagacggtcgtctgctgctagttacagctatggataaatgctatgaaacggaagtcgaagtgaggttgggaaatggaaacatcggaggcctgctgctgtactacaatgaagaagcctacgcgggagtgtcatccaatggaaagaatttcacggtgtacaggggagaggaaaagcctctgacggtagccaataaaataggtaaaaacttccgggtgaaactgctgaataagggaaaccgcctgaaaatgtcggtcagtgcagatggaaagtcctgggaggtgcttgctcagaatgtggatgttgctcgtttgaaccacaatgtgtataagggattttacgctcttcgtccggctctgtttgctgccggaaaaggaaaaacaggtttccgcaatttccgttatcgcaatgccattcccgaagaaaaagacatgggagcctatctgatggttttccatcgggatgaaacacacggtttgtatatggcagtgagtcgtgacggttatacctttacggcagtgaatgaaggagagcctgtgctggccggtgacacgatagcccagcagcgaggcatccgtgaccctcatattttccgcggaccggatggtgccttttatttagctatgaccgatttgcatgtgttcggtttgcgcgacggttatcgcaagacggagtgggagcgcggaccggaatacggctggggaaataaccgggaacttgtattgatgaaatcctgggatttgattcactggaaccgggcaaatatccgtttcgacaagctttcagccggattaggcgaaataggttgtgtatgggcacccgaagtggcatacgatgacaagaaaggcaagttgatgatttattacaccatgcgtttcaagagtgaggccaacaaattgtactatgtgtatgtgaacgatgatttcaataagatagaaagtacgccacagattttgtttgagtatccgatggatggcgtgtctgctattgatggagacattaccaagataggagataaatatcatttattctatgtggcgcacgacggtgtgggtggtatcaagcaggcggtatccgaccggatgaacggtggttatgtgtacgatgcccgctggtatgactttgaacctaaggcatgcgaagcgcccaacgtatggaaaaggattggagagaacaagtgggtgctgatgtatgacattttcagcatcactcctcataacttcggttttgcagaaacttccgattttgtacatttcaagaacttggggcacttcaatgaaggagtcatgaaaaccaccaactatacttcgcccaagcacggagccgtgattcatctgacaaaagaggaagcagataatctggaggaatactggaagacgcatcagcggaagtatgatcgtgaaacattccttcgccaacaaggtcagcacaccggaaaatgagaaacagccgatagtaaaaaatgtgacgggaagccgccgaaatgccctcagagaacgtttcggtggcttttttgtatcaaaaagcgtatttgttacaatatttccaactcttgttacatagattttaccccaatagtcgttaggggtatatttttgtatttgggaaaaattaacttattaaaaaatgagacatttgttatttagatacttatttttgtgttgtctatgttgtggcttgggtaaaatttttgctgcagggaaggtcgtgtcatggcaagttcccaaaggtgtagaactgaacgatgactttacggtcagaattcgtccagctgaaaaaactaactgggtgtctgtgcctgcttatttggtgaatgtggacgaagtgcgtggaacgaaacaccatgtggaacatgcttccatggctacctttgatttttcggaaaaggtggaaattgcagtgacgtataataaaggaaagattgactcggctcgtgtacgtccgttgtcatacgatattccttttacgattgaagggaatacgcttcaattttcattagagaaaccggccaatctttcggtggaagtgaatggagatatttttcataacctgcatttgtttgccaatcccttggatacatttaaggtagacaaaaagaatccggacctgatttatttcggacccggaattcatcgttttgaaggaggagaatttcgtattccttccggtaagacggtctatgtggctggtggatccgtgatgatgggacggatgctgattgaaaatgtgcatgacgtgaagctgctgggaaggggcatcattgacccgagcgtgaagatgggtattcgtatcgctaattcccgtaatgtgtacgtggaaggattaatggctacacaatgtgctacgggtggctcggacagtgttaccattcgaaatgtaaaagtcatcagttattttggttggggagatgggatgaatgtgttttccagccggaatgtattgttcgacagggtattttgccggacatcggatgactgtactacggtatatggcacacgattgggatttgaaggaccaagttcgaatattaccatgcagaattctacgttatgggccgatgtggcgcatcctatttttatcgggattcatggaaatgtggacaagccggagattttggagaatctgaattatgtgaatatcgatattctggaccataaggagaagcagttgaactatcaaggttgtctggctattaatgcgggtgatgagaatctgatacggaatgtgcgttttgaagatatacgcattgaaaacttccgacaggggcagttagtgaatcttcgtattttctttaatgagaaatattgcaaggcgccgggaagagggattgaaaatgtggtgttcaagaatgtgtcgtacaccggtaatcgggctgagatttccgtgattgagggatatgatgcacagcggaaggtacggaacattcgttttgaaaaccttcgcataaacggtcagattatttctgatgatatgccgggaaagccgaaatggtatcatacgggagatatggcacgaatttatgtgggtccgcatgtggaaggtgtttcttttttgaatacttttgagaaataaaaaagagttgacgctatgaaaagacaatggagaaaaatttggttcagttgtatgggacttgcactgcttgaggtatctgtgcaggcacagacatgtgattgggtgagtagttgtgaagggaagacttggacacagaacaaggtgaaattgcaaacgaaggcagagggaactgctgctgatttatcggtagataagggagattctgtagtcgttttcaaggcttggggtacttgtttcaatgagttgggatgggatgccttgaatgtgctgcctagtaatgagaaagaggaaattctgaggaaactgttttctccggaaggtgatttgcggtttacgttggggcgtttcccgatgaatgcgaacgacttctcacgcaactggtacagctgcgatgaggtgccgggagattttgaattgaagcattttaatatagaccgcgataagacttcgcttgtgccgtatatcaagtcggcccagcgttataatccgaacatgaccttctggatttctccatggagtccgcccagctggatgaaaatcaatcaggattatccggtgcgcagtgataaatataatacgatgcatccggcgaaggactattatttgcaaggaaataaaggacctaagacagaaggggtattcccggcagaactggctgaaacggacttctttattcaagaccctcgttacctgtcggcatacgcgaatttcttttgcaagtttgtttccgcgtatgaagagctgaatattcccataaagatggtgatgtttcaaaatgaatcgtggagctatacgccttatccgggatgtgcatggacaccggagggaattatccgtttcaatgtagagtatctggctccggcactgaagaaagcgcatccggacgtgaaattgtatttcggaaccatcaacacaaaccgttatgaagtaatagaaaaggtgctggacgaccagcgtatgcctgaaacgattcaaggaataggactgcagtgggaaggaggacagttactgacccgcctgcgtgcgaaatatccgaattataactatgtgcagactgaaagtgaatgcggatggggttctttcgactggaaagccgcagagcatacctttcatctgatgaatcattatttaggaaatggctgtgaggagtatactttctggaatccgattctggcggatgaaggagtaagtccgtggggatggaagcagaatgccttgatacgggtggattccaaacaggctaaggctatctttacgccggaatattatgccgtgaagcattacacccgtttcctgatgccgggtacgaaggtgctggcgtttaaaccgacgggtgaggataagaagccggtgttagtggtacagactccggaaggaaaaaccgtggtggtagcaggaaactttcaggatagtccgcagcaactgacggtgaagttgggagaaaaatggctgaatgtgactttgcaggctcattcctttaatacgtttgagtttcaagtgaaataaaaatcaaagaaatttacattttgattgagtagtcgggacaagttattcgtatttctataaaaaacaatataaaaggaatatgaagaacttgtctttgacgttgggattatgggttcttggagctgcaatgtgtgcggcagaaccgatcgaattgaatttgtcttctccggaaggtacacataaggtgaaattttatgagaaaaaatcggcttccggagccaatgtgctttgctatgaggtaaattacaatgggaaacaggttgtgaaggaatcgcaggccggattgcaactggacaatcgtgtctgggaaatggctttggggatgcgtaaattgcctcagccggcatgctggatggacaatctggaggtggattcggtggcttacggtagtcatgatgctacttggacaccgctttatgaggaacgcagctcggtgcgtgacaactacaaatggggcacattgtatttatcgaaaaaggacggttctgactaccgtttgaatgtagaagtgcgtgcctatgatgaaggggtggcttttcgttattattttccggaacatccgaaagctattttccacaaggtagtgggagacctgacggagtatacttttccggaagggaccaaggcttgggctgaacaatgggcacaggcgcattttgaatacctggatgtgaatgcgctgaagaagccggtggaacgtgccttgacactggaattacccaacggggtatgggcggcattgactgatgccgatgtggacgactggtgtctgactaaatttcaggcttcatctgaaaagcagcatacattgacttctgtcatgtacagtccggtggatattgttacttattatgcaacgccgtggaaggttatcatggcggcagataaaccgggggaattgctggaacacaattatattattgaaaatttgaatcctccttgtgagattaagaatacggactggattaagccgggaaaaatcatgcgcgaaacctcgcttacgacagatcaggctttgaagactattgatttctgtgcggaacaccgcatcccgtacatgctttttgactggcagtggtatatgccctgtacctcacatgatggggatgctacgaaggtggtgtcaaaactgaacatgccgaaagtggtggcgtatggaaagaagaaaggtgtaggtatctggttgtatgtcaaccagcatgctttgcagaagcagatgtgcgaattgttcccgctgttgcacaaatggggcattgtgggagtgaagtcaggatttgtgcagtatgcaagtcaccgctgggctacctggttgcacgatatggtgcgtctggctgcagagaataacctgatgatgaatattcatgatgagttccgtccgtcgggattcagccgtacttatccaaatctgctgacacaggaaggtatcctggggaacgaagagtttccggatgctacacacagtaccattcttccgtttacgcgtatgattaacggggccgcagattatactatctgttattatgacaagcgcttgaagaatacgcatgcgcatcagctggcggcttcattggtgttttatagtccgttgatgacaattttctggtatgaccgtcctcaattctacaacggtgaaccggagattgaatggtttgaaaatctgcagactgtatttgatgagtcgcatgtgttggatggtatgccgggtaaaaatatcaccatggctcgccggaaagggaaagaatggtttgtgggaatgctgaccaacaatgacggttctgttgaaactttggattgttctttcctggacaagaatcagatgtatctggcatctatttataccgatgggggagaagaagtgaagacaaagacgcaggtgaaatgttcgtatgtgttggttggagctggggatgtgataaagtttgccctgaaacccagaggaggagctgccgtgagactggtgccggtgacagaaaaggaagcaaaagcttataagaaatataacggagaatcattttaagaaatttttaggctcttcttttaagtggaatggaaccctgattcgtatttatagacgaaaagtttttagataaatggatttttaagttttgggtatttttctttaggtagaagattgtttttgagggttacttaaattaggaaagaagaatgaaaggattgttttttatattgagtctgtcagtttgcagcctgtttcatccagcgatggcacagtatcgttctgaggtatgggtgtctgatgaagggaatggcatgtaccggaatccagtgcttcatgcggattattctgatccggatgtatgtgcggtaggagaggactattttttaacggcgtctagttttaattgtactccgggacttcctatcttgcattcaaaggatttggtaaactggaaaatcgtgaattatgccttgaagaaggtggaaccggtggaatattataatgaagctcgtcatggaaaaggcgtatgggcaccttctattcgttttcatgaaggagtgttctatatatactggggtgatccggattttggcatttttatggtaaagactcgtgacccgtatggagaatgggataaaccagtgctggtaaaagctggaaaagggatgattgacccttgtccgttatgggatgacgacgggcgtgtgtatctggctcatgcatgggccggaagccgagcgaaattcaacagtgtgttgacggtgtgcgagatgaataaggaaggtacggcagtcatttcggacccggtactggtgttcgacggaaatgacggagtaaatcataccattgagggagctaagttttataagcggaatggattttactatctgtttgcacctgcgggtggagtcgtttccggatggcaactggtgatgcgttcgaaagatgtgtatggaccgtatgaagcccgaattgtgatggcgcaaggaaagacggacatcaacggaccgcatcagggaggatgggtagacactccggccggagaatcctggtttttgcattttcaggataagggagcttatggacgtgtactgcatctgaatccgatgaaatggataaatgactggccggtaattggagttgataaggacggcgacggttgtggagacccggtgagccgttatcgtaaacctaaaaccggtaaaacgtatccgatagaaacgcctgtggagagtgatgaatttgatactcgtaagctggggctgcaatgggaatggcatgcaaattatcaggatgtgttcggctttacgacgaatatgggatatgtccgtatttatgggcatgaactttcgccgcattttaagaacttctgggaagttccgaatctgttgatgcaaaaattcccggcagaggaatttacggctaccgctaaattaaaggtttcggcaaaagatgacggacaactttcgggactcatcattatgggctgggactattcctggataggagtggaaaagcagggagaaaagttcttgctgaagcaggctgtatgtaaggatgcagaacagggtaatctggaacaggtttctacattagccgtattagagcccagccggaagtttgaagcaggtttgttccccaattacgaaagagagatttacataagggtacatgtggacaaaggggcatattgtcgctttagctacagtctggatggaaagaaatttacggaggccggcacgctgttcaaagcccgtcagggaaaatggattggtgcgaaggtgggaatgttcagcgtaactcctcatggaaaggagcgtggctggctggatgtagactggtttcgtgtggaaaaataaaagaatttagatatgaaaattagaaatctgttgtatggcataggaatcatggctttatcttcttgtgccggtgaaaagactgaaaacctggatgtggataaagccttggcgtattgtgacgtgcaagtacatcgtgcgctggctgaactggaaaagaacggggaggcggattatagtatgcagcctcgaaatatcttgtcgggagaaaagttctggaattgccggaaggtggctaaggaagaatggacaggtggattctggccgggtattttgtggtatgattatgaagctacacaaaatgatacgattcgtgaactggcagaaaagtacacggagtctttaaagttgttttcggagattccggcgtatgatcacgatttgggctttctcgtgttttgcagttatggaaacgggtatcgtctgacgcataatccgacttatcgggatgtaatcattgctacagctgactcgctggctactttgtataatccgaaagtggggacgattctgtcctggcctcgtaacattgagatgttgggcgggcataacaccattatggataacatgattaacttggagatgcttttctgggctgcccgcaacgggggagaccggcggttgtttgatgtggcagtgtcgcatgcagacaaaacgatggaaaaccagttccgtccggattatacctcgtatcatgtggctgtgtatgatacactgacagggaattgcattaagaaatgcacgcatcagggatatgcggatgagtcgatgtgggcacgtggacaggcctgggctatttatggctatactgtggtgttccgtgaaaccggtgatcctaagtatctggaatttgcagagaagttggtggacgtgtatctgaagaatttgccagaggactatgtgccttactgggattttaatgcacctgacatcccgaatgcacctagggatgcttctgcggcttgtgtggtcgcttcggctttgctggagatgtctggtttttatggaaacgggcaaggggaaaagtacaaggaagctgcggaaaaaatgttgtgcagtctgagcagcgataaatatcagtcacgggatacgaatgtcgctttcttgttacattctaccggtcactggccagctaagtcggaaatagatgcttctatcatctatgcagattattactatattgaggccttgctgagattgaagagaattaatgaaggtttgcgggccgtagaataaaaattggagttattataaaaaagcggggaggacgatgtgttttgtccttccccgcttttttatagacttgtctaggagttacaattatttcttttgtgcatcggcttctttcagcatttcctttactgctgctgcaagctgtttatcttcgcctttcagtgatttttcaggactgttgtagactttgatgtccggctccaattgtttgttttccatgtactggcctcgcatatccatacaacctacttgaggaataccgaagacgatggtcgggtctatctgacgttcccaccatacagcagtcatggtgcccggaacaggagctccgatgagcttaccgattttcaactctttgtatacccaggggaaaccgtgtgcattactgtaattgtcttcacaaatcatcacgcaagatggtttcagccatttgttgaacgggtcactgccgatgtattgtccgcgaggaacaaaacgctggtattcttttccgcttagtaaagtggccaggtcgtcgtgcaaccatcctcctccgttgtgacgggtatctacgatgaccgcttctttgttgcggttgcggtcactcaataattcgctgtatacatttcggaagcttgggctatccatgccttttacgtgtacgtatgcaattcgtcctccggaaagagtttcgaccatcttttcatttttctttacccagcgtttgtagagcaattcattctgctcacctgtactgatgggcttgatggttaccgggaagcgttttccgttttgcgggttgtagatgctgagctgtacgttctttccagcttttccttccagcataggataataatctgtatctttcaggataggttctccgtcaattttctcaatgatacaacctgcggttacatctgtctttttaaccgcaaacgggcctttggcaataatttcctggattttcaatccatctccttcgtagctgttgtcgaagaatacacccaggcatgcagtagacaaggtggctcccggagcataatatctggctcctgtatgtgagccgttcagttcacctaacagttcgctcagcatttcctggaaatcgtagttgttattgatatgcggcaagaaacgtgcataactttcacgatagaatttccagtcagttccatgtaagtcggctacatagaacttgtcgagcacttgctgccatacatggttgaaaatatattctctttcctcgtatggacggtaattgaatatcgcttcaaagcttacgttgtcagtcttatttttctcaatatctattttcttgatgcctccgttgctgcaaaggaagagttgtttgttttccttgttgtaggtcatcgagccatatccgatgtcttttagtagaagttcggtcttttgttctttcagatcgtgtacccataagtcggcaccgtcttcaaaagaggcttgatagtaaagcttgtcgccgtcaggactgagtacggcatcgcctaaatgagaagaattcacggtcaggcggataatccggtcacggcagttttccaggtcgaaggtgagtggagtgacttccttgtctttttcagatttctcttttttatcttttttcttgtcgttctgcttgtctttctctttttctttatcttctttctcttttacgagagcaaattcttctttgctaaggcggaaacgttcgtaagcctctaagtcgaagaacatgatgtacacatcactttcagctccccagcttccgtggcttctgtatccggcacggtcgctttcccaaatcatggcttttccgtccagtacccatttggcattggaatctgtatatccgctttctgtcaaattgtggatttcaccatttccggaagcgttgaccagggctacgtcgttattgttccatcctcctgttccgatgtatccgcaaagcagccatttgctgtcgggactccattggaaccactgatctccatcgctgtaagagtattcatatttcccgtccatggcagtgcggacagatttatctttcaggttgagcactcgcaatgtggtgcgattctctaaaaatgcaatctgttttccgtccgggctgtattgtggctggaaggaagtgacttgagaatgtgtcagctgttcttccttgatgtcggtagcgtaggtgaacaacttttcttcctctttagttaaggtggattggtaaatctgccagagtccgtttctttcggatgcatatacaatgcttcgtccgtcgggagcaaagtcgatgcttctctcttgttcgggagtgtctgtaatctgtttggttgttgtatactcagtagaagtgacgaatacatctccatggagtataaatgctacctccttgccattggggggtacggcgatttctgtagctccggaagattttatttggtgagccagttcgttttctgtctggtcagtaacgatacggatagctactttctgaggctgctgtccttctttgactgtatagatttcaccgtcgtaaccgtagcataaaagtccgttctgtgaggatgacaggaaacggaccggatgctgagtgtggtgtgtcaactgcatttcattgcttccgtcaaggttgcatttgaaaatattgaacgagcctgctttttcgctgaggtagtaaaacgactggttatcgttactccatatcgggttacggtcttctccattgaatgacgtgactttctgataagtacgctcattgttctcttttttacttatccaaatgtcgcgtgtaatggaggaagtatgatgttttctccaggggtcttcgtatcctttctggtcgtgatatagtaaggtcgtaccatcttgtgcaacactgatgtcttccataggaagagaggaatagagttggggacgtccgccttgagtgtttatttcataaacttgtggaaactgggcactggggaaggacaggtcggtcgcatcaggcatcaggttggccttgaacaaaatatgtgtagcgtctgaaaatgtgacaggggtttcgtttccagaatgagttgttagtcttttggggattcctccgtctttggatacaatgtaaatatccatgctcccttggcgagaagaggcaaaggcaatctgctgtccatccggactccatatcggatgagtgtcgtgtgccggattggtggtaagttgtctggcatttccaccagtggagggtacggtgtaaatgtctcctttataacagaaagcaatagtgcttccgtcgggtgaaatggagcaatagcgcatccataatggattttctgtagctcctgccgtggtaaatgcggcaagggcggcaaggaataatgaggttttcatcagcggttcttatctttttttcgattaaaaaaacggtgtatgcgttggaaaatcatgatgccggttttcagcccatcataagcggctatgccggcattgatatgctgcatcatattctccattttgtttttacttttctggggagagaataattcctgtgtcaggagttgtatgcgttctttagactctcttaattcttgctttttttgtgcccttaattgagagatgatttcaacgctatagttgggaatgggttttatatcgttcattattttattctttagaagcaggttcgtcaaggaataagcgtgcgaggaaatgtaccataggctggaatatccattgttttctcattcggtaaatgagtatggccaagagaagaactacccctccaatgatggcatatcctccaatcaggctgcctacaagaggagccagtgcgtatacgagcatgaaggaaaaatagaaaagagccatcatgctcaaaatgataatgatgagtataaggattaaggtagatagcaggatagtgagtttttctaccaaatcgagtttgacgtattgaccttgaagctcaatgtattttcgtacctctttaaataaggattcaaggttatcaatgcttttatcgtttgcaaacataagcagttattctaagatgaaaaaaatataaagcagacttttcccttgaaaaagcctgctttatatttacgacaaattattcagcgtctttaacttctgctgctatttgatcgaccaagtcttccatttcggcacggttcagtcgaataccttttttgcgaagaacttcagcaatttttctacgggtatcttcacctttttccggggcaaacaaaatgccggctgcagctcctaaagtaacaccgccaaggaatgctgctacaatacttaaagctttcataaatctaatttttaaaagttattactttacaaatctaataataatcctgatatgttgttcttttttcatggaaaaatgcagctccatgctgtcgatagaatagaattaacggattttaatagtatggcagattttatattgttacctttgcgacgtattaaattgaatattcatctaatattggtatagataacatgaagaagattgttgtaatgggaatggctctgtgcactgcattggcattctcttcttgtaaatcaagtgaaagtgcttacaagaaagcgtatgaaaaagctaaacagcaggaacttgctgaggcttctgcagccactgaggcaccagtggaagctccggcagtagaaacagcacccgcacctgctccagttgtatctacagctccggttcgtgaagaaaaggtagaattggtttctggtgatggcttgaaagcttatagcgtagtttgcggtagctttggtgtaaaagcaaatgcggatggcttgaagtcaaaactggatggagacggttataatgcaaaggtggtgtacaatgcagaacgcaatatgtatcgtgtggttgttgaatcatttgatacaagagacgaagctgctcgtgcaagagatgcatttaaagcaaaatatcctacacgtgaagatttccaaggtgcttggttattgtatcgtgtgtattaatgtgatatagataagaattattattccatatttcaggattgaaagcgacagtgtaaaagctgtcgctttttttgcttatatttgtcggctgaaaaagatttggtatttatgaaattgaataggattataggtatgtttttgcttggaatgcctttggctatgcaagcacaggaaaaggttgtgccaataaaatacggtgatatggatcagtgggttacccgtaagattcatgagtcggggattattggaggaaatacaaaattgctgtatgaattaggtcccacaaaggaaatcgacggaaatgtggcttatgtgaatcagggaggatctccgtggggaaattctaatgtaatggctaaagtgatggggattgtaaaaacaaataccagtgtatatcctgaacagagaggaaatggctattgtgcacgtctggaaactcatattgaaagtgtaaaggtactgggaatggtgaatatcacggtgttagcttcaggctctatgttcctgggtgatatgaaggaaccgattacgggaactaaagatggagaaaaagcactgaattcaggccttccttttacttcccgtccaaaggcggttcgctatgactataaggtgcaaatgtctggacaaccgaaccgtattcgtcagaccggattcagcaagaagactactgtgccggggcaggattgtgcgattatggtttgtctgttgcagaaacgttcggaagatgcggaaggaaacattattgctaagcgagtaggtacagtagccgtaaaatacaaccgctcgcaagactggcacaatggagctacttatgaaataatgtatggggatattacgcatgacaagcgttatgtaccagaattgatgcaattaggtacaggcggatattatgcccgtaacagcaaaggagaaagtaaacttataaaagaagtgggctgggccagtaaagacgagcatcctacacatttgattcttcagtttacttcaagtatgggaggagcttttgtggggtctcctggaaataaattatggatagataatgtcaatttggtatattgagattgcaaaaaagctaggaggaggcagaaaaagcctttgtatatataaaaataaggtgtaacagctgatattttttgagtattttttctcttattcgttgtttactttcaaaagaaatacttatttttgcatcgcaatcggaaaggaataaatgtcaaattgatggttccttttgattactaatagagtgagtgtttataaagcaattataaaacctttaaattttaaacaaaatgattaaagtaggtattaacggttttggtcgtatcggccgtttcgtattccgtgcagctcagaacagaaacgatattcagatcgtaggtattaacgacttgtgtccagtagattacttggcatacatgttgaaatatgatactatgcacggtaaattcaacggtactatcgaagctgacgttgaaaacagcaaattgattgttaacggtaaagaaatccgtgtaacagcttgcaaagatcctaaagaattggcttgggatgcagtaggtgctgaatacgtagtagaatctactggtttgttcttgactaaagaaaaagctcaggctcacatcgaagctggtgctaaatatgtagttatgtcagctccttctaaggatgacactccgatgttcgtttgcggtgttaacgaaaaaacttatgttaaaggtactcagttcgtttctaacgcttcttgtactactaactgcttggctcctatcgctaaggttttgaacgacaaatggggtatcactgatggtttgatgactacagttcactctacaactgctactcagaaaactgttgacggtccttctatgaaagactggagaggtggtcgtgctgcttctggtaacatcatcccgtcttcaactggtgctgctaaagctgtaggtaaagttatcccggctttgaacggtaaattgactggtatgtcaatgcgtgttccgactttggacgtatctgtagttgacttgactgttaacttggctaaaccggctacttacgctgaaatctgcgctgctatgaaggaagcttctgaaggcgaattgaagggtattctgggttacactgaagatgcagttgtttcttctgacttcttgggtgacactcacacttctatcttcgatgctaaagctggtatcgctttgactgatactttcgttaaggttgtttcttggtatgacaacgaaatcggttactctaacaaagtattggatttgattgctcacatggcttctgtaaactgctaattagtttagactatatagcaagagccgtcaggattttctcctggcggcttttttttgcgcatattcgtgcgtgttgtgcagaaaaaaactatctttgccgttgaacttctcaaaaatgactttatgaattatgatttgattacgatacttggtccaacggcttcaggaaagacttctttggctgcagctttggctgctcgtctgaaaacagaaattattagtggtgacagtcgtcaggtgtatcgtaggatggatttgggaacgggtaaagatttatcggactatgtggttgatggctataaggtttcttatcatttgattgacattgtggagccaggctataaatataatgtatttgaatatcaacgtgattttttagttgcatacgaagatataaaggccagaggacttctaccgattttatgtggaggtacaggtatgtatctggagtctattttgaaaggataccgtttgctccctgttccggaaaataaagaactgagagaaagtttggcttccaaatcgcttgaggagttgacggatatcttgtctcgttataagaaattgcataattcaacagatgtagatacggtgaagcgagccattcgggcaattgaaatagaggaatattatttaactcaagatgtcaatgcgcgttcattccccgagatacatagtctgattatcggagtggatattgatcgggatttgcgcaggcagaagattaccaaccgattgaagaagcgcttacaggaaggaatggttgacgaggtgaaggtgttgctgaaagaaggtataaatcctgatgacctgatttattacggtttggaatataaatatttgactttatatgcggtaggtaagctgtcttacgatgaaatgttcagccagcttgaaatcgctattcatcagtttgccaaacggcagatgacctggtttagagggatggaaagaaggggctttcagattcattggatagatgctgaagcaccactgaatgagaatgtggaacgaattattgatctgataaaataaacggaaatggcagtagaaccagacagatggggggtgatttataaccccaaggccggaagccgcaaggctcagaaacgttggcagactattcgtgcttacatggatgaatgtaaggtgaaatatgattatgtacagtcggagggatttggttcggttgagcgtttggcaaagacactggctaacaacggctatcttactattgtgatagtaggcggtgatggtgcccttaatgatgctttgaatggtatcatgtattccgatgtggaagataaaagtcagatcgctttaggaattattccgaacggaattggtaatgattttgcaaagtactggggactaagttccgatgattataaaaaagcggtggatgtgttgattaatcgccgcttaagaaagattgatattggggtgttctcgtattttgacggagaacaacatcagactcgttactttttgaatgctgtatatatgggacttggtgctcgtatcgtacggattaccaatgaaacccgtcgtttttgggggattcctttgatttcttatttagcctcgttgtttttggttgcctttgagcggaaattgcatcggatgcatttgaaggtaaatgacgaacatattcgtggacgtatcatggctgtgggaattggtagtgcatacgggtatggactgactccaagtgccgttccatataacgggtggcttgatgtgtctattatttatcgtccagagcttcgtcagttaatttccggactttggatgttgcaacagggaagattgttgaatcataagacggtcaagccttatcgtacgcgatgcgtaaaggtgctgcgtgcacagaatgcagaagtcagtttagatggtcgtctttggttagaccgtcatttcccgattgagattacaatagctccagaagcaattactttgataatacctaattaatatgataaagaatatttctgatttaaagcgggatgacatgtttttcctgctggcaggtccttgtgtgatagaaggagaagacatggctcttcgtattgcggaacgagtcgtaaaaattacagacaacttgcatattccatacgtttttaaaggttcttaccggaaagcaaaccgttcacgtctggattctttcactggaataggtgatgaaaaagcgttgaaaatattggctaaggtaagaagtacgtttgatgtgcctgtcgtaacagatattcataccgcttccgaagcagaaatggctgctgagtatgtggatgtgttgcagataccggcatttctttgccgtcagaccgatttgctggttgcggcagctcgcaccggaaaaattgtcaatattaagaaaggacagttcttgtctcctgctgccatgcgttttgctgctgataaagtcgtagaggcaggtaatgatcaggtgatgttgacggaacgtggtacaatgtttggttatcaagatttgattgtcgattatagaggaattccggaaatgcagtctttcggacatccggtagtgctggatgtgacacattctttgcaacaacctaatcagacttctggagtgacaggaggtatgccgcagcttattgaaactgtggcaaaggctggtgtggcagttggtgtggatgggttgtttatggaaactcatgaagatccttctaaagcaaaaagcgatggagccaatatgttaaaattggacttgctggaagacttgctggtgaaactggttcgtattcgtcaatctttgtaatgtatgatggggcggctggttgagataaaagtctggaaagagattgtagtgtctttgtttgtatgccttacattgtcagtaggaaatggatatgcccaaagtgaatctatggtgtcttctacagacaatgtgccgctgttggagagaatgacggatggtaagcggaaggtggattgggcagatatgaatattcagttctgttctgctgccgatgtctcctttaataatgccaaactggatgaagcggcatttaaggtacatcgtatccgtttggaggtgttagggggatttcatgaaaagttttcctatcatttccgtcagtctttgaatcaatacacgactcccaatattccattggataatctttccgggtcggttgaattggccatggtgggttggcagttgaatgataaatggaagttgacagccggaaaacaacctgtccagttcagtgggtatgagtgttgggtgaatgccattaaagtgcgtcattactccgatttcaataacacgataccatgctatcaggcgggtttgaatgcagcctataagatgaatgacaaccatgagtttaattttcaggtgacaaataatcggaacggagatagtgccgatcagtttatgtatggacttccggaaggagtagaacctactaaaatacctttgctggcaactgttaactgggacggttattttgtaggtcatgccatgcagcttcgttattctctttcctatggacagctggcaaagcataagaatgtattttattttacttgtggaaatgtatgggacaagaaaccctttttaggctatattgatttcatgtattcacgcgagggtgttgactctaaaggacttatcagtgaggtaacagctgtgaatggtgaaggtactacagtgccgaatgtggattactttacgactatattcaatttagactatcgtgtggcttcacattggaatatgtatgtaaagggagtctatgaacagggcaatgtgttcaagtcgaatgacatgttttcgtcaggtacctatcgcagagtatggaacgtacagctttgtgcagaatactatcctttgaaaaacagtgagctgttgtgctatcttcacctcttatataagaatatacatctgacagagaaagcacgttcctggggagcggaaagttataatcatcagcgtatctcattaggtttggtttatacactgcccgttttctgagaagaagttattttctgcatggcatctgtttatatattccaataaaaaactatatctttgcaacgcaattacggtttggattacattaaaaagtaaaaagatatgcttactattaaacaaattacagaagacaccgacaaggtgattcgtggattggagaaaaagcattttgcaaatgcaaaagaaacaattgcaaaagtgcttgaactgaatgatcagagacgtagcgcacaaaaccaattagataaaaatctctcagaagtaaattctacatcgaaggctatcggtgctttgatgaaagagggaaaaaaggaagaggcagaagctgctaaagctcgtgtagctgaaatcaaagaaattagcaaagaactgcaggtaacgatggataaggctgcagaagatatgcagaacttgctttataccatccctaatgtaccttacgaaagtgttccggaaggtttcggagctgaagataatgtggtagagaaaatgggaggtatggaaactgaacttccgaaagatgcactgccacattgggaactggctaaaaaatatgatttaatcgattttgatttaggcgttaagattacaggtgctggtttcccggtatacaaaggaaaaggtgctcgtttgcagcgtgcattgattaacttcttcctggatgaagctcgtgcggcaggttatgaagaaattatgcctcctacagtggtaaatgctgcttcaggatatggtacaggacagttgcctgataaggaaggtcagatgtatcactgcaacttggatgacttgtatctgattcctacagcagaagtacctgtaactaatatttaccgtgacgtgattctggatgagaaacagcttccgattaagaactgtgcttacactcagtgtttccgtcgcgaagctggttcttatggaaaggatgttcgtggtttgaatcgtttgcatgaattctcaaaagtagagttggtgcgtattgataaaccggaacactccaaacagtctcatcaggaaatgttggaccatgtagaaggcttgttgaaaaaactggaacttccttatagaattcttcgtctgtgcggtggcgatatgagttttacagctgcactttgcttcgatttcgaagtatattccgaagcacagaaacgttggctggaagtaagttcagtttcaaatttcgatacttatcaggcaaaccgtttgaaatgtcgttatcgtacagctgaaaagaaaacagaactttgccatacattgaatggttctgctttggctttgcctcgtatcgtagctgcattgttggaaaataatcagacaccggaaggaatccgtattcctaaggcgttggttccttattgcgggtttgatatgattgattaataatatattataacaatattttcgtctgatacagattttaggtatgcctaaatctgtatcagacgttttttatataattacctcttaaaactcaagattgtaagattttttataataaaacggggatatatgcttttagagatagaaaaaacaggcttttgaggtaaaaaaaaaggattttggttttgttgtttatttttaatcattaaatttgaggggaaataaaagtaacattttttgtgacgagtattaatttataaccttaatatacaactatgagttatttacgatttgacaagacgataatgacaaatctggaagaaactctaactagagaaattcttcgtacgaatcgctcgggggcttatcattgttcgacaattgtagactgtaatacgcgtaagtatcatggcttgcttgtgatacctgtaccggagttggacgatgagaaccatgtattactttcctcattggatgaaactgttatccagcatggggccgagtttaatcttggcctgcataagtatggaggtgacaatttcagtcctagaggacataaatacatccgcgaattcgagtgtgagaaagtgccgacaacaatttatcgtgtaggtggtgttgttttaaagaaagagaagttatttgttcaccatgaaaaccgtattctaataaggtatacattggttgatgcacattcagaaacaactcttcgtttacgcccttatttggctttccgcagtgtacgacagtatacacacgaaaatgcgcaggccagtcgccattatgatgtggtggagaacggaatcaagacatgcatgtatcccggttatcctgaactttacatgcagttgagtaaggaaaatcaattctgtttccagcccgattggtatagaggcatagaatatccgaaagaacgtgaacgcgggtatgactttaatgaagacctgtatgtgcctggttactttgagattagtattaagaaaggggaatctgttactttctcaggtggtgtagcaccaattgaaactacttcgttgaatgctttgttcgcagcagaaatggaacagcgaacacctcgcaataacttcaagaactgccttattaattcggcacatcagttccttaacaagcaggacggtgagtcgtatatcttagccggatatccttggtttaagtgtcgtgcacgtgacatgtttatttctcttccgggacttactctttctattggtgagattggtaagtttgaaatgattatggaaacggctttaaaggctgtttatgcattcatggaaggtaaagaatctcatttgaaagtgacagaaatagaacatccggatgtattgttgtggctggtatgggcaatacagcaatatgccaagatggtgtcatgggatgaggcccgagttaaatatggtaaagccttgaaggatgtgatggattatctggcaggtaatcatcatcctaatttgaaggttcatgaaaacggattggtttatacaaatggaagagacaaggccgttacttggatgaactctaccgtgaatggccgtccggtagttgctcgtactggatacattgtagaatttaatgcattgtggtacaacgcactttgctttgtggctgatttgctgtcatcagactatggctttgttgactacttgcatcagttctctgataaagtctctaagtcattcgtgcagaccttcttgaatgaatatggctatctgcttgattatgtagatggcgatatgatggactggagtgttcgtccgaacatgatttttgcagcagcttttgattattctccgttagattctaaacagaaaaaaggtgttgtagacatcgtgactaaagaattgcttactccgaaaggtcttcgttcattgagtccgaagagtggaggttataatccaaactacgtcggtccgcagcttcagcgtgattatgcataccatcagggtacagcatggccttggctggaaggtttctatctggaggcttatttgcgtatctataagcggagtgccatttcctttgtagagcgtcagcttatcagttatgaagatcagatgacctgtcattgcatcagttccattccggagttgtttgatggtaacccaccattccagggtagaggtgctgtttcatttgcaatgaatgtggccgaaattttacgtacattgaatttgttggagaaatataacaatcaataaagaggaggggtttatatgaaagttttgatgtttggttgggaatttcctcctcatatcttgggaggattaggtacagccagttatggattgactcatggacttgctcagcaggaagatatggaaattaccttctgtattccgaagccttggggagacgaagaccagagtttcttgcgtattataggaatgaacagtgtgcctattgtatggcgtgacgtacagtgggattatgtaaaagatagagtaggacattatatggatccgcagctttattatgacttgcgcgaccatatttatgcagatttcaattatatgcataccaatgatttgggatgtatggagttctcaggaagatatcctgataatctgcatgaagaaatcaacaactattctattgtagccggtgtggtagctcgtcagcagcagtttgatattattcactcacacgattggttgacttatccggcaggtattcatgccaagcaggtttcaggaaagcctttggttatccatgtgcatgccacagactttgaccgaagccgtggtaatgtgaatcctaccgtttattctattgaaaagaatggtatggaccatgctgactgtatcatgtgtgtaagtgagttgacccgtcagacggttattcataagtactatcaggatcctcgcaaagtattcaccatgcataatgcagtgtctccgcttccaaaagaaatacaggatattcaggttaagaagaatccgaaagaaaagattgttactttcttgggacgtattaccatgcagaaaggtccggaatactttgtggaagctgctgctatggtattgaatcgcacgcgtaacattcgttttgtgatggctggtagcggtgatatgatgaatgccatgattcgtctggctgcggaaagaggtattgccgaccgtttccatttcccgggattcatgaaaggcaagcaggtatatgaagtattgaagatgagtgatgtgtatatcatgccgtcagtgtctgagccatttggtatttcaccattggaagctatgcaatgctgtgtaccgacgattatctctaagcaatccggttgtgccgaaattctatcgaaatgtattaagacggattattgggatatacatgcaatggcagatgccattcattctatctgtaccaacgattcactttatgaatatctccgcgatgaaggaaagaaagaagtggatggtattgtatgggagaaagtcggcgtgaagattcgcgcactttatgagcaagtcttaaaaaattatggtaaataaaactgcaaaacaatatgaaaacaatttgtctttactttgaaatacaccagattattcatttgaaacgctatcgtttctttgaaatcggttcagaacattattactacgatgattatgccaatgagcagggtatgaatgaagtggccgaacgttcctatataccggccttgagaaccctgattgatatggcaaaagcaaataatggcgcatttagagttgccttgtctatttcaggtgtggctttggaacagttggaaatccacgctccggccgtaatagaattgctgcatgagttgaatgccacaggttgctgcgaattcctttgcgagccttattcacatggattgtcttcattgaagaatgagacttgtttctgcgaagaggtagaacgcatgcgtgtgaagattaaagactatttcggacaagatcctaaggtattccgtaactccagcttgatttatgacaatgaaattggcggtatcgtagcaggaatgggattcaagggtatgctggcagaaggtgctaaacatgtgttaggatggaagagtcctcactatttgtatcattgtgctgaaaatccgaatctgaagctgttgctgcgtgactttaagttgtctgatgatattagcttacgtttctctaatacagaatggagcgaatatccgttgtttgcagataaatatattggctggattgcttctctgccggaaaacgaacaggttatcaatatctttatggaattgtctgctttgggtatcttccagccgctgtcttccaatattctggaattcttgaaagcattgccggaatgtgctaagcagaaaggcattactttctctactccgtcggaaatcgtaacgaaactgaaatcagtcgatatgattgatgtaccttatccgatgtcttgggtagacgaagaacgtgatattagcccgtggttaggaaatgtaatgcagcgtgaagcatttgataagttgtatagcgtggcagaacgtgtacatttgtgctctgaccgccgaatcaaacaggattgggattacctgcaggcaagtaataacttccgcttcatgactacaaagcagatgggcgtatcgttggatcgtggtatttatgattcaccgtatgatgctttcactaactatatgaatattcttggggactttatttctcgcgtaaattcattgtatccggtagatatggaagatgaagaactgaattctttgttgacaaccattcgtaaccaggaagaagagctggtacagttgaatgaccaggtgaaacatttgcagtctttggttaaagaacagccagagaaggctcctgctaaaaaagctccagcaaagaaaacaactgctgccaaaaagactactacagcaaagaaataaagcttgagatacaggcataaaaaaatccggaagttttacttccggatttttttatgctcttattcgttatttgttgaatttcggtttggtatagataatttccatcttaatcttttctccatcctcgccgcccattagtttggctgagtttacttccaggtcgtgcgacaaaccgatggtgtttccttgtgagtctgtttcagttttcaccggaatcaataccatagtattatactcatcccatccttgagcaggctcttcttttgttctcatatcgctgaaaatctggcttatcagtcggtttacttgtgagaacgaataggagttggttgtactgctgtaagtacctaagaaggtagttttactatcgtaattctttctttgttcaaagaagtcttttacttcgtttttacgaataagcagtaagttctgcggagtacccattttgtacgggctattttcagaattatcgctgacgttcttgtatttagtaaatgccatagatacggagttcagcgtgtctgtacctaacgcatcatacatttcttgtaaaggaagtttcacttctgtacaaagtccggcaggagttttcagataggtgtgttccttttctccagccaagctatttaatgtctcttcagaattactcaagcgagtagacatgaacacttcgttggttgctgcaaaaggaatggaagtatacacgacagaatccatagccccagtagaaggtctttcgactaaatatttaactttcatgcgcagccaaatatctccaatgtatagaatagccccttctccacttgtggtatgaacgtaaaatccagggagtacattgtggataaatgaataagcatctttgaaatagtccttattttcttgatatttattccaaagatattggctaaaagctcctgcttcatcttcttttatgcctgaacttttctttttatccaaatcaataaccaatggtggataatatccattttcactttttatagagtcaatttcttcatctgtccaagaattgtcgcgtacagcgtaatcctgttctgctaattctggcttctcaggattataatatccttcttctatcggatcataagacgtgtaatataaatttaagtcttcgcctgtatcatcaattgctttatcaagcatgtccactcttacacgcatgggagctagtgaatcaccgaagaaacttgcatacgataactccaatgttgttgctacaatttcttgagttgtttccggaaattcgaaaccttccgtgcaattgatttgtgtgatgaaatcggtggtatacgtaccaaaatccggatcggtgaatttacccaagtatgcgctgcttgtacgggagaatactccgttctggttcaagtctgtatatttcagggttttggtagtggcctcaaaagtttgagccgatgcagtaatttcatctgcatctgccacgaattcaccgacacctgtagtggtatcatcacaactgtagagtgtggctgcaagtccaactgctgccaagaacttaagtttcattttcgtccttttttatgtattcatatttattcggaaacgaataccttgtcatagaatgcgtcacacgcatctgcataggcatcgcccgaagcgtattcaagcaccggaatgttcaggcttcgtgcgtagtcaagtacattctggtttacagtttcgtcattttgaatcactccgtcagagtaggctactgctaacttgcagagttcctcatagtttgccggcgacttcatcatgctgacatcttccggagttacttccttgaacagcacttgttcggcaaagttgggagctaaattcgaattaaatccttcctgataaagtgagaaaatcacctttgagtcgcggaaagaaggttcatcgtaatatgctttcttaatataaagaggaaccatcgcactcatccatccgtgacagtgaatcacgtccggacaccagcgcagtttcttaacagtttccagcacaccacgggcatagaagatggcacgttcgccattgtcttcatattcctttccgttttcatcgcatgtcatctggcggtgctggaaataatcatcattatcaataaagtacacttgtctgcgtgcagcctgaatagatgccaccttgataatcagcggatgatccgtgtcgtcgataatcagattcattccagacagacggattacctcatgcaattggtttctgcgttcgttcacgataccccatttgggcatgaatgttctgatttcgcggcctttgtcttgtatggcttgcggtaaattctggccgattaatgccaggttactttcgggtacgtagggagtaatttcttgtgtaatgaataaaacttttttcgcgctcattgtattatagttgctcttaacgactggcaaagatacaaaaaatacgccaatgaagcgaatcgacagccgtttataaatccttatagtatgttaatgtattgataaacagtaggctataatcgtgtttgttgtacgtcctaaataggataaattcgctaaacaccaaaagaattttccgtttccgtttctttatgtgctaaataaatagttactttgcagccgttttctgaatttatgattaaaaacaggaataagagatgaagttaattcaaacaatcagtgagcttcgcgccgaactcgatgctttccgcaaagaaggaaagaccatcggactggttccgacgatgggagctttgcatgcgggacacgcttcgttggtgaatcgtgccgtagctgagaatgatgtagtggtagtcagtgactttgtgaaccctacacagtttaacgaccagaatgaccttttaaaatatccgcgcacacgggaggcggattgtgctttattggagaaatgtggagcaacgttggtttttgctccttctgtagaagaagtttatcctgaacccgatacccgccagttcagctatgcgccgctggatacggtgatggaaggaaaataccgtccgggacatttcaacggggtttgtcagattgtcagcaaattattcttgatggtggaaccgcaccgtgcctactttggcgagaaggacttccagcagctggccattatccgtgaaatggtacgcaagtatcctttcaatattcagattgtgggatgcccgattgtgcgtgaagaagacggcctggcgctgagcagccgcaacgcacgtcttacggcagaacaacggaaggaagctttgcagatttccaaggcattgtttgccagtgtagatttcagcaagtcacgtgttttgcttgaaaccaagcagtttgtagaagactgtatccgtcgcgcaccgggactggaactggaatattttgagattgtggatggcaatacgcttcagcccgtaaaggcatgggacgaaagcaattacattgtaggttgtatcacagtgtattgcggtgaagtacgtctgattgataacattaaatataaaggataacggatgatgatgattgaagtgttgaagtcgaagcttcattgcgtaacggtgacagaagcgaacctgaactacatgggcagcattacgattgatgaagatttgatggatgcggctaacatgattgccggtgagaaggtacagattgtagacaataacaatggtgaacgttttgaaacctatatcattaagggtgaacgtagctcaggttgtatttgtctgaatggagcggcagcccgtaaggtacaggtgggcgatgtggtgattatcatgtcctatgccttgatggactttgaggaggccaagactttcaagccgaccgtggtattcccggatacggcaacaaatcgtctgttgtaattggattagataagttgatgaaataaataaagggtgccggaggaagatgagaaatctctttccggcacccttcgttttggtatattctaaacgttttttcgcttacgaaaaaacgcaagtacgttcgtactaaaacgcctttgcgtttgaatcaaaacgtacttgcgtttaggataaaacgtccttgcgttttctctcaaacgcacttgcgttttggacgcgtgtcaaaaattacacttgaggcacgtcctgcaagctgtttgctatgtcttcttcgctcagtgaatagttggtcaggttgcccgacaggtactggtcgtacgcactcatgtctatcagaccatgaccggacaagttgaacagaattactttttcttcacccgtttccttgcatttttctgcttcctgaatagcggcagcaatggcgtggcaagattccggagccggaatgataccttcagcgcgggcaaacagacagccggccttgaaagtgtcaagctgctgtatgtctaccgcttccatcaaattgtctttcaacagctgagaaacgatgacacctgcaccgtggtagcgcagaccaccggcatggatattggcaggtgtaaagttgtgtcctaaggtaaacatcggcagcagcggggtgtagccggcttcatcaccgaagtcatattcaaatttacctctggtcagtttcggacaagatgccggttcggctgcgatataacgtgtcttctttccttccagaatggtgtgacgcatgaacgggaaacagattcctccgaagttggaacctcctccgaagcatccgataatcatgtcaggatattcaccggccatttccatctgcttttcagcttccagtccgatgacagtctggtgcagggttacgtggctcagcacggaccccagtgtatatttacagtttggtgtggtgcgtgccagctcgatagcttccgagatggcagtacccagtgaaccctgatggttcggatatttggtcaggatattttttcctgcacgggtagacatggaaggagaaggagttacctgtgcgccgaaggtctgcatgatgctgcggcgataaggcttctgttcgtaactgatttttacctgatatacggcagcttccagtccgaacaccttcgcggcatacgacaaggcagctccccattgtccggcacctgtttcagtagtgatgttcgttacgccttctttcttgcagtagtaagcttgtgccagtgcagagttcagtttgtgtgaaccgatagggctgacactttcattcttgaaatagatgtgtgccggtgtacccagtgctttctccagtccgtaagcacgtaccagcggggtgctgcggtagtatttgtacatttcccgtacttcttccggaatttcaatccacgcatcagtctggttcaattcctgatggcagagttccttggcgaagatagggtagaggtcttccggtttcaacggttcttttgtagccgggttcagtggaggcatgggtttgttgaccatgtcggcttgaatgttataccagtattttggtatttcatcttcaggtaagatgaatcttttctgtctattactcataattgcttactatttttaagttttcgtcaaaaatatggaaataaatgataacaaacaactcattttgctttttttcttatctgttttcttactgaatagaatcttgtggtagatttctcctttctttgtcgcataagtatatggatttttccatacatttgtaaatacattcattcactataatatggattattgggaacgactttttttatataataagaaactgcttatgccgcgtgtaaaccagctgcttaactgggtgatggggattaattttctgtgcggcattgtctttttactgaccattgtgtatgaatatggattcaggatttctgcggcggagtataatctgatacatacggtctatcatacggtatgggtcatctttttagttacaacaacgatacagattgtctttcgtcaggaagattcctcgtttaagtttactccgtggacatggattcttaccatactgctttatctgaccttgctccctgtggtattcaaaaagccggaggagactaccggagtgtattgggtatgggtgttctttcatcatgcttattacaagggaaccatcctggtgctgctttctttctcccagctgtcgggcattttggtgcgcttgctgggcaaacgtaccaatccgtcattgattctggcaggcagtttcctggtgtttattctgttgggtaccggattgttgatgcttcctcgggccacttaccacggcatttcgttcatggatgcgctgtttaccgccacgagtgcgacgtgcgtcacagggcttgtcaccgtagatgtgccttccacctttacgctggagggacaaattctgattattctcctgattcagataggcggactcggggtgatgacgctgacaagtttctttgccatgttttttatggggaatacctcgctttataatcagctgatggtgggcgacatgatcagttccaactccttgaattcgctattgtctaccttattatatatattgggctttacgctggcgatagaaggagtcggaatggtggttatctggctcagtgtgcacggcacgttgggaatgaccttgcaggaagaactttttttctcagccttccattccgtgtcagccttttgtaatgcaggcttttccaccttgcccggtggaatgggcaatccggccgtcatgcagggacataatctgctttacattactttgggactgctgattgcactgggaggcatcggattcccgatattggtgaacttgtatgaaacggtggcgtattatctgcaagccggaaaattctggctgttgcgtcgttccggaagattccggaaaaaagtacacctgtataatttgaatacgaagattgtgctggtggctacagtctttcttttaataggtggtacgttggccattgctgccctggagtggaaccattcttttgcgggcatgccggtggcagacaagtgggtgcatgctttctttaattcctcttgtccgcgaactgccggttttgccagtgtggggctgacctccttgtctactcaaaccttgttgctcatggtagtactgatgatgataggaggaggcacgcaatctacgtcgggcggcgtgaaggtcaatgtgtttgcggtggtattaatcaatttatgggctgtagtgcgcgggacagaccgggtggcgattctgcgcagagaactttcgcacgattctatccgccgttcgaacgcggcattgatattgtatctgctactggcttttctggccatattcctgctgagtatgctggagccggaggccgggctgctggccgttacgttcgaatgcgtgtcggcgctgagtacggtaggttcgagccttgacctgactcctacgttgggcaatgacagcaagctgctggtcattttgctgatgtatatcggtcgtgtcggtgcatttaccttgctcaccggtctggtacgccaggaaaagaaacgcaattacaggtatccgagtgataacattatcatcaactgatgtatgaaatatttgattattggtttaggacattatggggccacgttagccatggagctgactgccatggggcatgaagtggtcggtgcagacggaaacgggttgcacgtagacagtgtgaaggaccgcatggcggcctcgtttgtgctcgatgcgacagatgaaatggcactttccgtgcttccgctgaagagtgtggatgcggtaattgtagccataggcgataacttcggcgcttcggtccggattgtgtcgttgctgaaaaagctgaaggtgaaacggatttatgcacgggcggtagacgaagtacataagggagtactcgaagccttctcgatagaccgtatcctgacaccggaacaggatgcagcacgtttgctggcacagcagttggaactggatggcggggccgaatttttccagatagacggcaatacctacgtgttcaagctggaaattccggagaaactggtgggctatcacatcaatgagctgaacctggaacaagaattcggcctgaaactgatttctctggtacaaggtaaacaagtgaaaaacttcctgggtatatctgtctttgagaaagaagtggccaatacattccctgaggattatgcactccagaaaggcgacggactggtgtgctacggagcctattccagtttcatgcaattctggaaatcagtccgttagtccattctctaacggatgtttctcttgttcagtgcctgctggtagcggcgggcattggcctgatgctcagcaaaggtagcggcgaaattgtgcgtgcccgagaaatcttctttggcacacatgtagaggtaatcatgctgtgcatggttcaaaacgctttctattccctgaatggaagcaatgcggataggaccgggaggaagccccgcgtgcttgtaagtgttgtaaggactttctacctccaggtgtttgtgcagaatgcgttgcagtccgaattcttgcagactgaatttgatggtcggatcggcctggagtggcattccggcttgtagacggttcaggtagagttctgccaccatcggcatctcactcttgttggctgtttcttcttccacgatggaggccagtgtgctgacttctaccggagtcagtccacaggcttgagccttatcttttcgctcctgcgtccagaaacgttcatattcttttttcattcgttggataaaggcttcggcatccgtattccaataggcttcatacgtattcgggatgaatagtgcaggcatcgtttcaaggctgaaacccaatgaagcgcagaaggcactgtcaccgacaagtcgggcaaattccgtggaatcgggcatgagttgacggtccagcgagcgtgccagacgggacagggtccgcacactgggtataaccactttgaccggagtctggtgtccgctgctcaggcggcggaataaggtcagcgtattgatggaggcatcaaagcgataggctccgctatgaatctgctggtcgtattttttgagacgagccagcattttgaatcctgtcagatgcgtggcattcaaatctctttgaagttttacgtacaccgaatcggctgtatcgtcacggtctatataaataaaggtaggtttttcgatacgaagagggtggttgaacagcaaggaaaccccgctgattacgcctcctaaaattagaattgtgacaagggcacaaataatgattgtcttttttgatttcatctggtttcaaatttgggcgtaaaagtagtaagaaaactttattttggtgtcatgaaaagtctgaatctgtaggggtagtgtatacttttcatgcattttagggccgaatgttcaaatctcctcctcaaaaatgtcaaatgtacacccattacatggaaaatattcctacatttgtgaagtgtgaaataaacaagtaaaatcaataagtatgaaaaatgcaattttagggttggccttttgtgccgcaatgcctttgtttgctcagcagaaggctacagtgactgttcatccggaacagggaaaacaaatcatcaataaagaaatttatggtcagtttgccgaacacctcggtacatgtatctatggaggtctttgggtaggagaggattcttccatacctaatattaaaggttatcgtaaagatgtgttcgaagcattgaaagacttgaaagtgcctgtactccgctggccgggaggatgttttgccgatgaataccattggatggatggtatcggtcctcgtgaaaaacgtccgcgtatggtcaacaacaactggggaggaaccgtagaagataacagcttcggaacacacgaattcctgaacttgtgcgaaatgttaggatgtgaaccctacatcagcggaaacgtaggtagcggtagcgtggaagaaatggctaaatgggtagaatacatgacttctgaacaaggaagcccgatggcaaaactgcgtttggaaaacggacgtgagaaaccatggaaggtgaaatacttcggagtaggaaatgaaagctggggatgtggaggtagcatgcgtccggaatactatgctgatttgtatcgccgttattcaacttattgccgtaactatgatggtaaccgtttgttcaagattgccagcggtgccagcgattatgactacaactggactgaagtgctgatgaaaaacgtgggtcatcgcatggacggactttctctgcactattatacagtgcttggatggagcggaagcaaaggttctgctacgaaattcaacaatgaggattactattggacaatgggaaaatgccgcgaaattgaagatgtgctcaagcgtcacattgccattatggacaaatatgacccgcagaagcagattggcttgatggtagacgaatggggaacctggtgggatgaagaaccgggtactatcagcggtcatctttaccagcagaataccttgcgcgatgcctttgtggcttctttgagtctggacatcttccataaatatactgaccgagttaaaatgactaacattgctcaggtggtaaatgtattgcagtctatgattctgacgaaagaagacaagatggtgctgactccgacttactatgtgttcaagatgtataacgtacatcaggatgctacttatctgccgcttgatttgcagtgcgaacgtaagatcgtacgcgacaatcgtatcgtaccgatggtaagtgcaactgcttcacgtgataaatcaggtgctattcatgtgtcactttctaacgtagacctggaagagtcacaggaaatcacactgacactgggtgatgtaaaggctaaatcggtaagcggacagattctgacttctgaaaagattgacgattacaatacatttgaacagcctaatctggtgaaattggccgatttcaagggtgctaaattgacaaagaatggacttgtagtgaaattgcctgcaaaatcaattgttacattggaaattaaatagtatattgcagaatcttctttttttgtagaaaagaagaatttgtaaataccatataatcagtaaagtatcgctttctgaaaatcaaccgtccgttaacggaatttgatttcagaaagcgatatttttattttgtaatatgaatgtaacaggatgttacattttctttaagcgtatgacatctgtttgtaacactaatatgagacctttgtggtgtcaaaaaaatgagtctataggaaaaatgaaaacaaagaaaagagttttatgtctgttaagcatctggatgtgcactgtgggtgctgcctttgcagatggagcgcctgaagaacgggctcctggtgagaaaaaaggagatgccatcattaccatattttcggatgcgcattctggttttggttctgtcaatgatgacagagggtttaatctggaccgtgcctatattggctatcagtatgccttgcctcacggattgcagttgaaggcagtacttgatttcggtcagtcaaaagacgtaaatgaccatcagcgcatcggatatgtgaaaaatgcacagattacctggaggcaaaacggctggacgctgaacgccggattaatcactacgactcaatttaaggttcaggaagatttctggggaaaacgttatgtgatgaaatctttccaggatgaatataagttcggcagcagtgcggacttgggagtttcagtagcctataaatttaacaaggtggtttcggccgatgtgattgtagccaacggagaaggttataaaaaagtacaggtgaaagacggcttgcagtatggtgcaggcgtaacactgactccggttgagggtttgacggtacgtgcatacggttcgtataatgaatcggtagaagaaggggaaaaaggtattacgaatctggctgcttttgtcggatataagcatacagccttctcagtggcagcggaatacaactaccagactaatacgaaatatgtgcctgattgtgatcaggatggtttctcggtttatgcgtctgcacagttaagcaagaaaataagtcttttcggtcgttgggacttgctttcttcagagaaagactggaacaaagatgcggacggtatggccggaatggtaggtaccgaatttaaattaggtaaatacatcaagttagctcctaacttccggttgtggtcgccgaaaacagaaggcggcaagacagccagttatgtatacctgaatgcttcgtttgcgatttaactcaatgaataacatagatttgtaacttatattaaatgtataacacaatgaaaaagttttatttgcctttaattgctggagcgatggctttgtcgtttgcagcgtgtggtggacagaaatcagctaatggtcgtgaatcagtagaactgacaggtgcaggtgctacattcccattgccattttataatatgtctttcgaaaactacaatgcaacttctggtgacaagatttcctatggtggtattggtagtggcggtggtgtccgcaacttgaaagacggtatcgtagactttgcaggtagcgatgctttcttgagcgacaaggaaatggctgaaatgcagccggtggtacacatcccgacttgtatgggagctgtcgtaatggcatacaacttgccggatgtggttaaactgaatctttctggtgacgtgattgccgatatttatgcaggtaagattacagactggaacgatgcgcgtttgcagaaactgaatccggatgtacagttgccggcaaagaaaatcattctggcataccgttcagatggtagtggaacaactttcatctttacagactatctgtcaaaagtaagtgaaaactggaaaaacacttacggtgcaggtaaaaccgtggatttcccggtcggacaggctgctaaaggtaatccgggcgtagcaggaattatcgcacagactccttactcattaggatatattggttctgaatatgcttttgctcagaaaattccttacgcaagcgtatataacaagcgtggtgaattggtagtaccttctactgaaagtatctctgcagctgccggtgacattcctcaggatactcgttgttcaattaccgatgcagatgcagcaggagcttatcctatcagttgcttcacctggttgctgatttacaaggaacagcactatgcagaccgttctatggaacaggcaaaagctacattggacttaatgcaatatatgttgagcgacagcgtacagcagactactgctaccgtacactatgcgccgctgcctaagaaggctatcgaacaaagccttcagaacctgaaagctgtgacatacgatggacagccgattcttaaataaataagacaataagttatgcaagacaaactgtttaaagtcttacttatcttatcggctatagtgataccggtcattggtgggggaattatttactccctcaccgttgacgcttccggcgctttcgaggagtttggattctggcattttatcttctctgacgactgggtgaccactgccggtaaagaaagttatggcgctcttccttttattacgggtacactgcttacaacggcactggcgttgctgatgtgtattccattttcacttcctgtcgcactgttcactggtgagtatttccgtggaaagaaaatcgcagccgttctgggtacagtgattgatttgctggcaggtattccttccattatctatggtttgtggggtttctatgtacttcgtaccgtattcatgcacttgaatctgtctccgcagggttccggtattctgactgctgcgtttgtgctggccatcatgattgtgccgtatgcagcttccttgagtgccgaatttatcaagatggttccttccgacttgaaagaaggggcttatgccatgggagctacgcgtgcagaggtaatcaagagagtgatattcccgatggcgggttccggtattttctcagcctatattctggctatcggacgtgcgctgggagaaacgatgacagtgaccatgctgattggaaataccaaccagatgccggacacactgcgtaccacgggtaataccatggcaagtatcattgcaaaccagtttggcgaggcagacggtttgaagctttcttcactgatcgccatcggtttgttactgttcctgattacggccatcattaatattatcggaaagattttgattcgtcgtgcccgtcacgtgtaatctgctaaaaagatttgtgcttatgttatatggaaataatattaagatacgtatcctgaaaagccgcttgctttatattctggtttgcgtattgtcgggtgtgacagcgattcctttgctggcgattttgggagaagtattgatcaagggttggaaacaattgggatggtcgtttctcaccgaagctactccgaatgcctataaggcgatgatggccgcttctgccggagaagcaattccggggggaattgcaaacggaattatcggaaccttcctgatgcttttgctggctgctgtagtcgctatcccggtaggaattctgtgtggtatctgtctgtcagaatacagaaaaagctggtttgccgtgtttgtcagctacctgaccgacttgcttcagggtactccctccatcattatcggtatcattacttacatctgggtggttgtcccgatgaaaggttattcggccattgcaggaagtgtggcattgttcatcatgatgcttccgctgattatccgttctacggaagaaaccatgaaggtgcttccggaaaccttgaaagaggctggactggcattgggaggtagttactggagagtgatgctgaaggtgatggtgccttctgcactgggcagtatctttaccggtattttgttggccatctctcgtgtagtcggtgaaacagctccgttgatgtttactgccttgggaggagctgctatcagctggaacatgaccaagccgatgtcggctgttcctttgcttatctgggagttcttcaacgacccgaacttgcagagcctgatatggggagcttctttgttcctgttgacttttgtgttatgtctgaatttattagctaaacgaattgcaaagaaatggaaaatataaaggatccgattcttcaaataaaagatgtgtgtatatcatataccagcgacgtgatggctgtaaagcatgtgtcggctgatattgagaaaaatacgattacggccatcatggggccttctggatgtggaaagagtacgttactgcgtgccgtgaaccgcatgcacgagttgtacaagaatatccgtgtgacgggagagattttactgaatggtgaaaatgtgcttcagatgcacccgatggaagaacgtcgtcgcattggtatggtgttccagcgcccgaacccgttcccgaccatgaatatttacgacaacgtgctggccggatatatcttgaatggtattcatctgtcaaaatcgcagaaggatgagattgtggaacgtaacttgcgcaacgtatgtttgtgggatgaagtaaaggactctctgacaaagcgtggtactttcctctcaggtggacagcaacagcgcttgtgtattgcacgttctctggcgcttcagccggacattctgcttatggatgagcctacttctgctcttgacccgattgctaccaagcacatcgaagggttgatggaccagctgaaaaaagaggtgactatcctgattgtgactcataacatgtcacaggctatgcgtatctccgaccgttccatgttcatgtacatgggtgaactgatagagtatgacaatacggagaaaatgtttaaagatccggttgacgaacgtacaagagcctatctgacaggaaagatgggataaccgttaggatgacaggtataagaaaggggttgcaggctgaaatcagcaggcaaccccttaatgtttttatttgtatgaaaaatttgggcttattgggcaaccagtacttccggtttttgtttgttgtttttcagaatatgccatacttcttcttccgttccggaaaaaggaccagatttttctaacttgatagtagacatggcagctgcaaaacatcctgcttcttcgtatgaagctcctttgtttcgcatgtagagatagccaagtacgtaagtgtcaccgcatccggtagcatcgactacttctttaggagcgtatgccggaattttatagaactttccttctgcataaataagtgatccaagacttcctaaagtcagcagaacttctttaacaccccactgagccagttgcttggctgctttttcagggtctttgaagcccgtcagcacttcagcttcgtgttcattgactttcaggatatcaatgtatttcagggcttttttcttttcatgccagtctacagggaatacgtgctcaccttccacttttcggagatagccttgtgcgtcgacagccaatgtacctttctgtgccaactcctttactacttcaagtggaaagtcatccgccagcaaacttcctaaatggaaaatgtgtgcattttcatcttttaaagcatctgcggtgaaagggtcagccttagccaatacacgctgggaacggttgtcctgattctcttcgtatgtattttcgaaatatacggtgtgacggcttggcaggacttctacctgaagcccttcttttctcatttcttcaatgatgccatattcactaggagccacagcggttaccagcttgtagtttttgaaatctttcagtctgcgtataccgtgtgaaaaatagtaagaagtgcctcccggcatgtaagtcgtttgttttggagttacaattttgtctaatgtaatgtgtccaatgcaacaaatatcattcatgtagttgagtatttctttaaatgcgtctgcaaagatacgcattattttactctctgataagtcggttaatggctttttcttctgaatttatggcttatttttacttattagcaaataaaaaagctcataaaagctttatctaattaaacaaagtcttaactttgagcaatttgttacctgcactttgggatatattcttgaaaaagacttgatttcgaaggcaaggataaatgtaaagttattaggaaaaaaaggaatttagaaatggaaaaaatgaatgtaaagcccgcagaaggtaagctgggcgtattgtgtgttggtctgggagctgtggctaccacgtttatgacaggggttttaatgactcgtaaaggattggcaaagccggtgggctcaatgacgcagtatgataagattcgtgtaggacgtggggaggcaaagaaatatttgcattacaatgaaattgtccccatggctaagctggacgacattgttttcggtgcatgggatgtgtatccggccaatgcgtatgagtcggctatcaactgtgaagtgttgcgtgagaaggatattaatccggtgaaagatgaactggaaaagattgtgccgatgaaggctgcctttgaccgtaactatgccaaacgcctggatggaaacaatgtgaaagattgtgctacccgctgggatatggtggaacaactgagagaggacattcgtaaatttaaggcagacaacaattgtgcacgtatcgtcgtgctttgggctgcttctactgaaatttatgtaccggtttgtgaaagcgtacatggcaccttggctgcgttggagaacgcaatgaaacaggatgaccgcgaacacattgctccttctatgtgttatgcatacgctgctttggccgaaggagctcctttcatcatgggtgcgccgaataccactgtggatattccggctatgtgggaaatggcagaacagactaagatgccgattgccggtaaggatttcaagactggtcagacattggtgaagtcgggctttgcgccgattatcggaacacgttgtctgggactgtcaggatggttctctaccaatattttaggaaaccgcgacggtcttgtgttggatgaaccggctaacttccatacaaaagaagtgagcaagctttctacactggaatctattctggtaccggaagaccagccggatttgtattctgattattatcacaaggtacgtatcaactattatccgcctcgtaatgacaacaaggaaggctgggataatattgatattttcggctggatgggctatccgatgcagattaagatcaacttcttgtgcagggattctattttggccgctccgttgtgtctggacttggtattgttgagcgacttggctgcacgtgccggacgttacggaacacaacgcttcttgagtttcttcctgaagagcccgatgcacgattatacagagggtgaagttccggtaaatcatttgttccagcaatatgtcatgctgaagaatgctttgcgcgagatgggaggctatgaagctgatgaagaaattgactaaggcttactgtcttttttgtaaaaaaataaaaccggcaatgagggcgcttcattgccggttttttcgtaggtgacagaagaaattatattctattattcataaaaaaaggtaagaatatcgtttttcagggagtgaaatttgtaagagattatttcactctgtatttttacaaacttgataagctggactattaaggtgttaatgagatatatgataaaaagattgctttttttaatcgtgttgtgtctgggagttgtgaaactttctgcacaaatcagtggagtcgttacagactccgaaacgggtgaccctatcccttatttgaatgtatattatgacggaaaaggggtgggaactattacagatatagatggtaaatattcaatagctgctcatgcagggtggaataaattgaccttttctatggtgggctatggtacggaggtacgtgatgtgtctgccaagacgaagacattgaatgtgaaaatgaagcccgacttggtgctggatgaggtcgtggtgaagcctaagaaggaaaaatattctcgaaagaataatccggcagtggaaatgatgaagaaagttattgcagccaaaaaactgaatgatttgggggtgaatgacttctatcattataataagtatcagaagattacattttctttaaataatattacaaccgactcgttgcgtgaatcaaacctgtttaagaagtatcctttcttccgtgaccaggtggagcagtgtagcgtgacgggtaagaatattctgcctatttccgtggacgagacggtgacggaaaaactgtaccggaaaaatccccacgatgaaaagacgattgtaaaaggtattaactctacgggagtcaatgaattgtttaatacaggcgatatgttgtcgactgtattgaaagatgtgttccaggatattaatatttatcaggaccgcttccgtttccttcagtacccgttcgatagtccgatttcgaatgcgggtatcaatttctataagtattacatcatggatacgatgatggtggataaggaaaaatgcttccacttaactttcgtacccaacaactcgcaggattttggtttcaccggtcatttgtatattcttgcggattctactttccgtgtgaataaatgtatcatgaatcttccgaagaagactgatatcaactttgtggataatatgattattgaacagaagttcggtcagttgtctacgggagaatgggtgctgatggaagatgacatgctgtgtgaactgtcttatttgaagaagatattgggttctttccaggtaaggcgtaccacacgatattctgattttggatttgacgagattcctgccaagatattcaagaagaagggagatgagataaaggatgtcaatgccatgatgcgtgacgactctttctggaaagaatatcgcccgacggagctgacaaagtcggaagataatatgggacagtttgtggacaatctggcgaaaatcaagggatttaagtacatcatatttgtggccaaggcctttatcgaaaactttgtcgaaacaggagtgaagggaagacccagtaaggtggatattggcccgattaatacgatgatttcaagcaactacattgacgggttgcgtttgagagcttctgcacaaaccactgcgaacctgaatcctcatctcttcttacgcggatattatgcgtatggttttaaggacgagaagtcaaaatacaaggctgaggtggaatattctttcaacaagaaggaataccttccccgtgagtatccgattaattcgttgacgctgtcgtattcttatgataatatgttgccgtccgacaagtttatgggaaccgacaaggacaatgtgtttacttcatttaaggtgacatcggtcgaccagtataactacgagcgtacggccagcgtgaagtatgaattggagaaggaaagtggtttgaaaacgacctttatgctgaagcataccaatctggaggcttgtggaaaattgttttatcgtacaatggcacaggaaaatcagttgcagcaggatttggcatcgggtgcactgacgggaacggaatgggtacattctccttataatacgaaggatttttcactggctgaggctacgctggcttttcgttatgcaccgggagaaacattcatcaataccaagcagcgccgtttgccggtcaatctcgatgcaccggtctttacgttgcagcatacgctgggattgaagggtatcttgggtagtgattatacctataacatgacggaaatgagtctctacaagcgctggtggctgagctcctggggaaacattgatacctgtgtaaaaggaggtatccaatggaataaggtacctttccccttgctgattatgccggcggccaacttgtcttatattcttcaggacgaaaccttcagcttgattaataatatggagttcctgaacgaccgttatgcatcgctggatgtatcatggaatctgcagggaaaaatcttcaaccgtattcctcttctgaagaagctgaaatggcgtgagtttatcggtgtgaaatgtttgtggggaacacttaccgacaagaataacccgttgcttccgcagaatgccaatgatacggagctgatgttgttcccgggacattacgatgcagcgggcaattatcatacctcgagctatgtcatggatcccaagaaaccttatgtggaggtaagtgcgggtattcataacatcttcaagttgctccatgtggaatatgtgcgtcgtttgaattacaatgaactgcctacagccagcaagtggggtatacgcttcatgattcgtaccgtattctaaattatactttttggagtaaatgcatgtacgggtttcaaactttttgtaaatttgccatataatcgaagactatatggtgaaatcagagatacagagtgtaaaacttcgttttggcatcataggcaattgtgaaggactgaaccgtgccattgatgtggctattcaggtggctcctacagacttgtctgtactggtgacgggagaaagtggagtcggtaaggaaagcttccctcagatagtccatcagtttagccggagaaagcatggaccgtatattgcggtaaactgtggagcgattccggagggtacgattgattccgaactgtttggtcatgagaaaggggcatttaccggtgccatcagcgaccgtaacggatattttgctgaggctaatggcggcaccatctttctggatgaggtgggtgaacttcctctttctactcaggctcgtttgcttcgtgtgcttgaaagcggagaatatataaaggtcggctcttctaaggtgcagaaaacggatgtcaggattgtggcagccacgaatgtggattttacggaagccatagcgaacggacgtttccgtgaagacttgtactatcgtctgaatacggtgcctattaaagtgccggcactgcgtgaacggccggatgatattcctcttttgttccgtaagtttgctgcagattttgccgaaaaataccgtatgccggccattcagttgatggaggatgccaagctgttactcgtatcgtatacctggccgggtaatatccgtcagttgaaaaatatcacggaacaaatctccattatcgaaaccaaccgtgagattactgccgaaattcttcgggggtatttgccagttcaacccgtgtctaaattcccgacattgctgggtggcgtgaagccgcaaggtgaaaagagtttccagagtgagagagagatactttatcaggtgttgtttgacctgaggagggatgtgaccgaattgaagaaactggtgcatgacatcatggccgaacgtgcggctggtggaacggtcactgctccgtcgtctatgccggtacattatatccccgaaactccatccagcctgatacagccttctgcagtggtattgaatcctgcggaggaagtgggcaaggtatccagcgtgactccggtaacgaatgtgtcacaagtaaatccgaatgtgaaggttacacatgcagatgtgtcggacgatgtgcaggatacggaagaatacattgaagaaaacctttcattggatgaagtggagaaagaaatgattcggaaggcattggagcggcatcatggaaaaagaaaaaatgcagcgaatgatttgaaaatttcagaacgtaccctttatagaaaaatcaaagaatatggacttgaataaaaaatatagcagactgagtaaatattttctggccttttgtttgtgtatccttacggcatgtacggtttcgtataaatttaatggttcttccattaactatgataaggtgaagacaatcagttttcagaactttccgaaccgttcggctgcctttgtatggggaccgatggagtcgatgttcaacacggctttgcaggataaatatatgcagcagactcgtctgaaacaggttcgtcagggaggtgacctggaattgtcgggtgaaattacgaactacgatgcttacaataaaggggtaggttctgacggttattctacgatggcagagttgagaatgacggtaaatgtgagatttgtcaataataccaatcatgcggaagatatttctgaccagcagtttactgccagccgtgaatacaatgccagccagcagttatcgtccgtgcaagaagagcttgtacagcagatgattgacgaaatcgtggagcagatatttaatgcaactgtagccaactggtaagagcaggaatgatggtacaacaacgactacagcattggattgaacacccggaagagttgggcactgaaagcctgtatgaattaagacagcttctggtgcagtatccttttttccagacagcccgtattttgtatttgaagaatttgtatctgttgcgtgatccttcttttaaagatgagttgcgcaagggggctttgtttgtagccgatttgagtatcctgttttatgccattgaaggagataagtttgtcattaaccggcatgtagccgaaaaagaaaatgtatcgtcagaaacatctgatagaacgctggacctgattgaccgttttctggccgacgataaggacctttctgtggagaaactctttcctttgccggtagaagccgtagattatacttctgtgctgatggaaaaggaggaaaatacagaaaccgcttctgtaaatcccctgcgcggacaggatttaatcgaccactttatagaacaggcggctcgtgaagaagccgaaggagtggagccgataaaggagactgctttgtcggaagaggaattttcttctgaaacaatagaaacggaggaggttgtgcctgatacagaaaaagaagagtctgatacggaagaaggggaagattattttacggaaactttggctaaaatttatgttaaacagcaacgctatgataaagcgctggaaattattaaaaaattaaatttgaaatatccgaaaaaaaatacttactttgcagaccaaatcaggtttttggaaaaattgattattaacgctaaatcaaaataaaagaaaatgtatttattatttgttgtattaatggtgcttgctgctgtattgatgtgcttcgtggtactgatacagaattcaaaaggaggaggactctcttctagctttgcttcgtctaatcagattatgggagttcgtaagacaactgactttattgaaaaactgacttggggtttggctgctttcatggtagtaatcagtgtagctacttcttacgtagttccttctcaggtagaaggttcttcagtaatcatggaacaggctgtaaaagagcagaaaacaaatccgttgaatgctcctgcaggttttgctgctcctcagaagactgatgctgcggctactactgctccggctgccgtaaatgattctgcaaagaactaagataataatatgagataaggcacattctcttttgtgggagatggcgtgccataattgtagaaacgggaagcctgctttttaaaaacaggtttcccgtttttttattgttaattttacagacgatggaaaacattcaaaagaaagagcgaatcctggctattgatgcgttacgaggattcgcggtaatggggattatcctgcttcataacattgaacattttaatttttattcttttccagaaactacctctccggtgcttggcgctttggataaaagcttgtgggacatgctgttcttcatgttctcgggtaaggcatacgctatttttgccttgctgttcggtttcacgttctatttgcagagccggggttcggaaaaaagaggggaagattttaagaaccgctatatgtggcgcttgctgctattgctgggttttggctttgtcaattctttgtttttcccgggtgaaatcttggtgctatatgccattttaggttttatccttgtgcctgtacgtcattggagcaataagggattgctgatactggcactgatattgatgctgcagcccgtggaatggctgaaagtgctgtgtggttttgtcaatcctgaatatgcaccgaaacagatgattttctcgttgggtaatgtatatcctcagttaggaggtgaatcctggtgggagatggtgaaggtaaatttcacaatcggtcagttggccagcctgaactgggcctggtgctacggacgagttttccagacctgctctttgttcatccttggtttgtggataggacgtgtgggatattttgattcttcttctgaagctgctctgacaaaggcacgtacattctggacttatgtgttatgcttttcacttcctttggcggtgattttctattttcttaaaggttttatattttcaatagcttcacagcctctgatgcttgacagtttgaagaccattttcaattcctggtataacttctgctttatgctggccatcgtatccgcattcctcctgttgtattggatggggaagggacggatactgaagatacttgtaccctacggaagaatgagtctgaccgactatatcatgcaatcagtgataggaagttttctgtatttcggttacggactggccttgcataaatcttgtggcactacgttgagtttattggttggaattgtattcttcctggcccagcttgcttttgctcactggtggttccgccatttcaaacgtggcccgttggaaactatctggcatcgactgacctggttaggaaagacgaaccgttaatcatttgggtagatatataaacaagacagggctgttccaagagaattggggcagcctttcttatatgtagaaaaatatgttttcccagtactttcagggaaatacttcagtactgcaaaggaagtactgaagtactgccgaagaagtactccggtactgcctaaggagtactccggtactgcctaaggagtact

SEQ ID NO: 3843 - DNA, 3355 bp, Unknown
  gut microbiota DNA sequence
tggttctcaaagagaaaaaaatagaggccatcctcgtgattgaggtggcctccgttagtgatgaaagctatactttcaattatttcttgaagtatctgttgtacaagccttcgaaaccttttccgtgacgagcttcgtctttagccatttcgtgaacggtatcgtggatagcatccaggttcagctgtttagcacgagtagcgatacgtttcttgtcttcgcaagcaccgcattcagcgttcatacgtttttcaaggtttgtcttagtatcccatacacagtcacccaaaagttctgcgaatttagcagcgtgttcagcttcttcccaagcataacgtttgaaagcttctgctacttcaggatagccttcgcggtcagcctgacggctcatagccaggtacataccaacctcagtacattcgcccatgaagtggttgttcaagtctttgatcatttcgtcgtcgcaacctttagctacgccgattacgtgttcgtctacaaactgcaaaccaccttcagcttcttccatttctttgaatttagaagcaggagctttacacaacggacacttttcaggagctgtttcaccttcgtaaatgtaaccacaaactgtacagataaactttttcataagtcaaaaattttaagtagttagttattatattaataagttaattcttagttattcatcaatcctttttcagcacattcggggcaaattcccttataatactgatgcacttcttctacgataaaaccttctttacggaagggttcggcctcactgaggttctgtggaatctccacatcgtagattttattgcagaccttgcattgaaaatgagcatgcggatgcacatctccgtcaaaacaggcatttttttcatctatggtcagcattttggccgcgccgtgttctacaaacaacttcagcgtattatataccgttgttttagagagcgtggggatttccttgcacaaagctgtatgtatttcatcgatacatggatgtgtcttatggttcaacagataatccatgatggcaatgcgttgtacagacggcttgatgtggtaactgagcaagtattcgtatgctgtcatatttattttcaattatgtaattgttacaattctaattcgaaggcaaatatacaaagattttttataaccacaaatactctcctctgttttttattttttttgctttatgccttttctttaaaatctccctctttattctgtgtagatgttcaaatattctgtttatttttgcatatctatttatatataacaaattatatgagatttggttttgtaaaagtggcggctgccgttcctgcagtgaaagtagccgactgcaaattcaatgcacaacagacggaaaaacagattgtaatagccgatggaaaggggattcagattattgtttttccggaattgaacctgacaggatattcctgtggagatttgtttgcgcaaagtttattgcttgagcaggctgaactggctttgatgcagattgtcaataatacccgtcagctggacattatttccattgtcggtatgccggtcgtggtcaattctacgctgatgaactgtgccgtggtttttcagaaaggtaagattctgggtattgtgcctaagacttatctgcctaattataaagaattctacgagaaacgctggtttacttctgctgtggcccatccggattccatgaatgtacgtttgtgtggtcaggtggtgccgatgggtacaaacctgttgttcgatacgccggatgtatgcttcggaatcgagctgtgtgaggatgtatgggcgcctgtacctcccagctctgcattggctctgaaaggcgcggagattatcttcaacctgtctgccgataccgagaatatcagcaaacatcagtacctccgttcgctgttggcacagcagtcagctcgttgtctggccggatatgtattttcatcctgtggtttcggagaatctaccaccgatgtggtttttgccggaaacgcattgatttatgagaatggaagcctgcttgccgcttccgaccgtttctcatttgaagaacagcttgtggtcagcgagatagatgtggagcgtttgagaggagaacgtctgacaaataccactttctccagcagcgtacgtatgtatcgtgatcagcatcctatgcagcatatctctaccgcccttgttgcttcccgcgatttgactcttacccgttcggtagaacctcatccgtttgtgccttctggtgaacgccagctggacgaacgttgcgaggagattttctctattcaggtagccggactggccaagcgcttggtacacaccaattgcaagacggtggtgttaggtatctccggtggattggattctaccttggcgcttctggtttgtgtcaagacatttgataagttgaatctgccccgtaaaggtattgtgggagttaccatgccaggattcggtactacagaccgtacctaccacaatgcactttcactgatgagctctctgcaggttaccacgaaagaaatcagtataaaggatgcctgcatccaacatttccaggatataggtcaggatatgtccgtgcatgatgtgacctacgaaaacggtcaagccagagagagaacccagatattgatggattatgccaacaagattggcggactggtaatcggtaccggtgacctttcagagcttgctttggggtgggctacgtacaatggtgaccacatgtccatgtatggagtaaatgccagcatccctaagaccttggttcgctacctggtaaactgggtggctcagaacggtgtagatacactttcacgaaatacgttgttggatattatcgatactcccatcagtccggaactgattcccgccgatgaaaacggcaatatcaagcagaaaacggaagacttggtcgggccgtatgagctgcacgatttcttcctcttccatttcctgcgctttggtttccgtccggcaaagattttctatctggccgaaattgccttccgtggggtgtacgacagtacgactatcaagaaatggcttaccaacttctatcgccgtttctttgcgcaacagttcaaacgttcctgcttgcccgatgggccgaaggtaggttccgtatctttgagtccgcgaggagactggcgtatgccgagtgatgccagtgctgcattgtggttgaaagaatgtgaattactttaagcataagtgcctgtatattatagaaggagtaaaaaacaagaggctgtctcaaaatgagacggccttttttgtgtttgcaaaaaaaatcgggcaagtcctaacttcgctcagtcagaacttg

SEQ ID NO: 3844 - DNA, 169 bp, Unknown
  gut microbiota DNA sequence
gaaactaagtcagacggaacaggagcttcatgaccgtattcatgagctcgagcggaaaatcaagtccctggaagtagagttgaaacagtccaacatggcccgtgacgcctacgactacatgatcgatcttgcggaaaagacctataacattccggtaagaaaaaactcc

SEQ ID NO: 3845 - DNA, 1097 bp, Unknown
  gut microbiota DNA sequence
ggaagcaaggactgccttgaagtcatttcatatagacgggcgtttcgatgtcattgccacaggttctcttttgggggtaaaaggttatggccaaagtaagaaaaagaaagaggatgtagggcaagattctgttccggtcggatacgaaaccgtgattgacatgtacccattggattttgaagagtttctatgggcaaacggaatcggtcagacagttattgattctgtaaaatcatgctttgagagcgaaaaggctgtgcctgacgggattcataaggtcatgatggagatgctgtacagatatgtgattgtcggaggtctgccggaagtggtgaattgcttccttaaaaccaggaatatcgaacttatctataagttgcagcgaaatcttattgccggatacgaagaagatatggttaaatatgcagaggatgcggacaagcccaatatccgggaatgttttgactctattccgaagcaactggctaaagagaacaagaaattccagtattcagttgtgaaaaagggaggaaggtctgctcaatacatcggcagtattcagtggctggaagatgcagggattatccgtagatgctataacacacagactacggagttgccgttagaggggaatgccattaaagattgtttcaaagtgtacacgaccgatataggtattcttgtggcaatgcttgactatggtactcaggcggatattttaaagggaaatcttcttggatacaagggagctattttcgagaacctcatggcggattttctgtgtaagtccggtcagaaactgtattatttccataaggacagcgggcttgaactggacttcctggtaaggctcaaaggcgaatgtgttctccttgaaattaaggcaaagtctggtaaagcaaaaagcatgacaacggttcttaaaaataaggacgtgtatcatgttaagagtgtaatcaagttagggcaatataacgtaggccgtgatggagatatacttaccattccactatacatgggatttcttgtaaacgacaaacttgcagacgttatcattcctgatgttgatgtgagtgcgttgaataatgaagaatgaa

SEQ ID NO: 3846 - DNA, 15888 bp, Unknown
  gut microbiota DNA sequence
aggtttttacgttgacccgtttttacgttgacccggaaaaatgttgtagatttgttgtaggaatcaaaaaaaaggagttaagatgtttatcttaactccttgattttcagcagtcggggtgactggattcgaaccagcgaccacacgccccccagacgcgtactctaaccgggctgagctacaccccgaattgcggatgcaaaggtactgctttattcggaataaccaaatattttccgcaataatttcttagtatttttagattacgtttaaacgctgtttgaacacgacaaaacttatcccatggtttcgcggtagaaatcaagcagttcgtagatttcctcttgtgaggcggtctggttgatacgaatgtcaccgattcctcctaaaagagtgaaattgatgacgccacatgaggcattctttttgtcatgcttcatgaagtcgtacagacattcatagtcatcgcaggtgaaataaaggctgccatagttttccttgatgaactgaatggtggtgcgcaacgcttctttcgggaaaccgcagcggatgtgtgacagataaagttcgcagaccataccccaggctacagcatatccatgaagcaccggatggttagtctttagggcgaaactttcaaaggcatgtccgatggtatgtccgaaattcaacgctttccggatgctttgctcataggggtctttttctacgatgtcttccttgacttgcacggactggccgataagtttctgcagcaatgcgtagtctatgtgagcaaagtcaaatgtcagcagttcgctccagtgtgacggctgactgattagaccgtgcttcagcatttctccgtaaccggacagcaggttgggcatatcgagggttttcagaaactggctgtcaatcattacctgatcggcaggatagaaggagccgatttcattcttgagtccgttgaagttgataccggtttttccacccacggcggcatcaatcatggaaagcagggtggtggggatgttgatacaagcgatacctcgtttgaaggtggctgcggcaaatcctcccaagtcggtcaccatgcctcctcctaagtttatgagcagcgagtggcgggtggctccccggttgctgagctggttccatacataggccagtgtctccaagtttttatgcacatcttccggaccaatgacaatttgttctgcatccttcagcaaggcgatgtcttgcagcagagggaggcaaagacgaaaagtatgttcgtcggtcaggataaaaatcttgtcgtatgaatgtgcagataacttctggctgagttccgtattgaaattttggcaaataatgacttcttgtttactcataagtgtatttgttttggtcgcaaatttagaaaaaaagttagaagaagtcggatgttggcttacaattaagtatttttgtgcgaataaaaaataatcaagttatgaaaggaatttttccggcttcgtgccgtttgttggggtatgtgttactgttattgtcagtatttgttccgttattgatgtatatgttcggacaagtgaatgacggtaatctgctgtatgtgaaactgggaatgaaactggtcatctggatttcattgttcatggtttttctggctaaaatgaaggatgaaaatgaggaagcttttgccattcggcggaaagcaatggtgatttcactctatttgtggggaatttattatgtaggagtgttgctgaatgcagcttatggaggaaatttgcaggaagcagacaattcagtaggtattgtgtacatggttatttgtgtgttctgtaaagagtttttgatgcagaaagcaaagattgaaaaaaacttcagacaaaaataagttaaaaaataaagagtaggggtaaaccttttttgttgataattgtcaaaggtacaattaatcaacaaggaagagataaaggcaatgaaaaaagttttattgggattgctgctgatggtgggggtaaccatttctgcttttgcacaaagcagcggcagccgtggaaccgtgacgggaacggttcttgatgaaggggataaatcgcctgtcattcaggctacagtacagctcctttccgtaaaggatagttcaatggtagtgggaaatgtgacaaatctggatggacatttctcactatctgtgcgtccgggaaagtatctgctgaaggtttcatatattggatatactccttttttcaagcaggttgcgttgacgcgtaacaatccgcgtttgaatgtgggcaaggtggagctggcttcggatgccattatgctggcagaagctgtagtggtggctgaggctccggaggtgacggcagtggccgatacgttggtgtacaacagttctgcctatcgtgtgcctgaaggttcggctttggaggaactggtgaagaagcttccgggggctgaagtggatgaagacggaaaaatcacgataaacgggaaggaaatcaagaaaatcatgattgatggaaaggaattttttgccgatgacccgaatattgccatgaaaaatcttccggtaaatattattgataaggtgcgtgcgtatgataaacaatcggacttggcccgtgtgacaggtattgatgacggcgaagaagaaaccgtgctcgacctgagtgtgaagcctggtatgaataagggatggtttggtaatgcggacgtagcagccggaacggaagaccgttacagtggaaaagtaatgttgaaccgattcattggagagaatcagtttacggtgattggttcaatgaataatgtgaatgataacggctatccgggaggaggcggtggctttcgttggggaggacagaacggtctgaccagcatcaagatgggtggtttcaactttagtacacagagtgagaaactggaaacaggaggtagtgtgaattataactacaaggatgcggacattatcagcaagcaggcttcggaaacattcgtttcttcggctaccagctctttcaagaatgcccagaatgctaatcgcaataagactacttcgcttacggcagattttcgtattgagtggaaaccggatactatgacaacggtgatttttcgtccgcgtttaacatacggaaagaatgataacaggagtgcgacaaattcttttacattcagccaggaaccggaatatacaaccgacgaaattttgagtgcagccgacaatctttcatctttgattccagaagaaaatattgtcaatacaattgcgcgtaacagtctgcagaaaggagataactttaatgtgggaggttcggccatggttaaccgtcgtttgggaaaaccgggacgtaatattactttccgtggctcctataattacacgaacagttcgagtgaacagttctcggtgtctgaaacggactattaccagaaaacagaggaggaacggctggaaattttgaaccgctatatttctacgcctactttgaactataattatggtgcacgctttacttatagcgaaccgatatttaagggtggcttcttgcagttcagttattatttccagtacaagcgttcaaagagtgacaattccacctacacaatgccgaatgactgggagatagcgcaaggttatggaggagataatgtgggagtgctggatgaaaagaacagcaagagtgcacagtacacatattacaatcatcaggcagatgtttctttgcgttggattcgggaaaaaatgagtttgaatgcaggtgtttctttccagccgcagaaatcgaaattgtcttataagaaagaccagttggatacggtggccgtacgaaacgtattcaactttactccgacatttgatttccgttataaattctcgaaaacaagccagttgagaatcaactaccgcggaagaagctctcagccaagcatgacggatttgctgcctattgaggatacgaccgacccgttgaacattcgtcggggaaatccggggttgaaaccggcatttaccaactcgttcatggctttttacaatacatttgatacagagaaacagcggggtatcatgacgcacttccgttttgaaaatgtattgaacagcattagtaatcgtagtacatacgacccgcaaaccggtggaacggtaaccatgccggagaatatcaatggcaactggaacttgtttggtatcttgggttctaatacggctttgcgtaataagaagtataccatcaatacctttacgatggcccgttataataacattgtgagttatatgagcgatgcacaggctgagaatgtgtcagataagaacaaaacccgtcagttgtctttgagtgaacgcttgagaggtacgtatcgtaatgactggtgggaattctctctgaacggttcattggcttatacgcattcgcgaaatagcttcaaggaagagaataatatggatacctaccagttctcgtacggagcaagtaccaatgtacgtttgccctggaatatgtcaattgcgacagacatctctcagaactcacgtcgtggatatgcggatgcaagcatgaaccgtgatgagttaatctggaatgcccagctttcgcaagacttcctgaaaggaaatgcagctacggtcagcattcagttctatgatattctgcgtaatcagagcaatatcagccgtgtaatcagtgcggctatgcgaagtgatacggaatacaatgcgatttacagctattgcatggtacactttatttaccgtctgaatctgtttggtggaaaaggtgccggcccgagaatgggtggtccgggaagaggacctggatttggtcctggcccgggacatggacctcgcagattctaaggttgaacatatataccgcaaaagtcaatttcacttttgcggtattttttttgcctttttccaaattactcgtaattttgttgaaaaccaagtcgtgagatggacatagcagtctggaatagtatctttttggccgtaatctatttcctttattttgcggtaatactgacaactatctttgtcgtgattcttgacaatcgtagtccggtaaagactatggcatggattctggttctcttttttcttcctgtagccggatggattctgtacttgtttttcgggcgtagtacgcgtaaggaacatcttatcagtcggaaagggtatgctcgcttgagcaagcgccctatggcggcctatcaggaacagccgtccgtaatggcagaatatggcaagcagcgtttgatggattttttttcacgggtaaataatgcactgcctttctccggaaatagagttacagtttatacggatgctgtttccatgttatcggaattattgaaagatatttacagagctcgtcatcacatccatctggagttttatatttttgaggatgatgcggtaggtcggttggttagagatgctttgattgaccgggctcgtgacggagtgaagatacgggtgctgtatgacgatgtgggttgttggaaagtgcctcatgatttttatgaacaaatgctttgtgaaggcatagaagtcctttcgttcctgaaagtccgtttccctagatttaccagtaaagtgaattatcgcaaccatcggaagattgtggtgatagatggttgtgtggggttcataggtgggatgaatctggcagaacgttatgtgaagggattgggaaaaggaaattggagagatacacacgtcagactgggaggaaaggtggtgtacgggttgcagacggcttttcttactgactggtatgccattgatcgcaccttgctcacttcagcagaatatttccctccgatttcggtgaagggaggtgtgctggggcaaattgtgacttccgatccggtaggtgagtggagggatattatgcaaggactgatgatggctatctgttctacccggaggtatttttatgtgcagactccttatttcttgccgaacgaggaagtgatgaccgctttgcagacagcagcattggctggggttgatgtgcggcttatgcttcctaaaagaggggatacctggcttattcataaaggttcgctatcttatctctcggagatgatgaaggcaggggtgaaaatttacctctacaaaaagggatttctgcattctaagttgatggtgtgtgatgacgaattgtcaacggtggggtctacgaatatggactttcgaagttttgagcataacttcgaggccaatgcctttttttatgacagggaaacggctatgactttaaaagaaatattcctggccgatcagaaggattgttttctgttgtcagccaggatttgggaaaaacgttcttggaaaaataagattactgaatcggttgtgcgtcttcttgctcctttactctgaaaaaggaaaagttgacacttccgtagtgacggtgctcgaaaaagcagggatgactctcaaagttgagatcttttccatgttccagaacgaaaataccttccggcttgagcaggttgtactgaaatatcaggtcgggtatgcttgccaattctttcagggcatacggagggtcagcaaagataaaatcgaactgcaggccgcatttctcgatgtatttgaatacatcggctcttaaagggatgcacttgtccgttttgacctcgcgcatgactttgctgatgaaggcatggtgctgcgggtctttctctacagaaataacctgatcgcatcctcgtgacacaagttctatactgatactgcccgttccggcaaacaaatcgagtgctgttattccatcttcaaagtcaatgtagttgttgagcacattgaacagattttctttggcaaagtcagtcgtaggacgtgccttgaatgtgtggggaacgtcgaaacgtctccgtttgtatattccgcttattactcgcatgagattaaagatagcatgtcaaatgaaatttctttgatgcggctcattgctgagtcgttgaattccatctgaggattaatgatgaatagttttcgtatgtatttttttagtcgcaatggcaattcttcccattgtggaacccgattgttcccgcaaatgtataactggtcatcttcttgattatagccagcctgctgccagatgttcaacagataatagcatgaatcattcaggccggaaatggggtaagtgttcagtagcagtagtttttctttttcgaaagctatcacttctacactttcgggatggaagatggcaaataatttacggcagtcactcggtttgaccttatgtgcgaggtactcggtaattggacttacggatgcaaacaaacgggcattggggaaatgctctgtcagaaacagatgggtgagcttgtccagcccaaaaagaatgacgaggttgctcttccctaaaatattacaaagtacgacttcgttattttgtgggggcaggttctgatagaacagaaggtcggtctgttcgtcttcatacaattccaacgagagtgtagtgtaacgtgaagtatgaataaggatattaacctgtttgaaacgatgtttcagttcttctgtttctgtcaaataggcttttacattggcagccattgagcgctgcgtattgactggcgaggaactgaaatatacttcctccgattgctgagggtgatagatagaaaaagaaaatccatccgtactcagacggatggataatatatactgttctgatttattaaaatcaataggttgggccataggattattcccagtttcctgcattgttgttcggctgttcgatgtcaccaactctcaaaccgcaatatttacccaattttgactgcatgtctttcaagttgatcaattcctggctgttcaagtcacccaagtatacatcgtatgcaacctgtgcctggaacaagttcagaggagcaccagattttgtagtatcctgacggatagccatttcaaatttagctccgtttccgtaaggaacgtatgccaaagaatccggattaaatccttttgcaaagatagtatccattacagccacccacattgtatcacgacggaagttctgtaagccttctttttcaacttcgctccagtttccagttttcttagccttgttaatcaagtccatagccttcttttctgtcataccgttgttcaactgatcatctgtcaatgaacccactttcatgatgaaaggaagtttagcagtctttacgaaagtaatcaaactgtcgaagtttgctgtataagcaccgttatgaacggtacgatattcctgctgagccttacggatgtcaatcaggcgagcgataattgctttttctctggtttttttcgcattgtcaaagttgatagggcccataatactgccatagcatatatataccaagcagataacgcaggcggctaacacaagattaagaactgttttcatgataatattgtttttttagtttatattcgtagcgcaaaaataagtaaattagttgaaccacgtcaatcttacgtaaactttttatactggcattatgttaaataatgatttatcgcaacaaattaagcgaaattttccttataaaccaacagaagagcaggaaaatgcggtgaaaagttttgccgaattcctgttttcgccttctgctgacagtgtgtttctgatgaaaggttatgccggcacgggtaagactacattgacatctgcattggttcgtacgcttgattcattgcaacggaaagtgattctgttggctcctacaggaagggcagccaaagtcttttccggatatgcggaacatccggcttatacgattcataagaagatatatcgccagaaagtcttttcgaatgagacggataattttgtagctaatcagaatttgcaccggaatacgctgttcattgtggatgaggcttccatgattgcgaatgaaggactttcaggtggccattttggtagcggacgtttattggatgatctcgtgcaatatgtatataatggattgggttgccggttgatgttgattggagatacagcacagcttccgccgataggggaggaagagagcccggcgctgtctgtagcggcattgcagggctatggactggaggtgacagagtgtgtgcttacaaaagtagtacgacaaaccgaaggttccggtatcttgtcgaatgctactgccttgcgtgaaaggattgtaaacgaggatttctttgaatatcctaaaatctgttgtaagaactatcctgatatacgtatccttcctggaagtgaactgattgaagccatagacgaatgttatggtcatgtggggttggatgaaacgattgttatctgtcgttccaacaaacgtgcttctctatataataaaggtataagaaatacggtactgtacagggaagatgaactgaacacgggagatatgctgatggtggccaagaataattatttctggggaacagactgtaaggaacttgattttattgcaaatggagatgtggcggtggtacgtaggatacggcgtgttcgggaaatgtatggttttcgcttcgcagatgtagtgcttgcttttcctgattatgaagggattgaactggaagtaaagattttattggatacccttcattcggaacttccttcattgtcgaaagaagaaaatgaccgtttgttctatgctgtgttagaagattatgctgacttaccgaccaagcgggaacgaatgaaaaaaatgaaagaagacccttattacaatgcgttgcaggtaaaatatgcgtatgctgttacatgtcataaagcgcaaggtggtcagtggaaaagagtttttcttgatcaaggctacatgacggaagatatgctttcgcccgattatttccgctggttgtataccgcatttacccgtgctacagaattattgtatttggtaaactggccagaagaacagacggaaaaataatttataaagcatacaccgttcattttatatgaatataaaagaaaggctgtccctctagttgtagaagaacagcctttcgacatgtgattttaagtagtaggttatttgatgacgtttaattcttttcctactttgatgaaggcctggattgctttgtccagatggcattgttcatgaccggcagaaagctgtacgcggatacgcgcctggcctttcggcactactggatagtagaatccggttacataaatgccttcttcctgcatgcgggctgcaaaatcctgtgacagtttggcatcatacaacatgacagcgcagatagcactctgtgtaggtttgatgtcaaatccggcagcaatcatcttgtcacggaaatagttgacattgctcatcagtttgtcatgcaaagcattgctttctttgagcatgcggaacatttccaagcttgctcctacgatagctggtgctacagagttagagaacaagtaaggacgagagcgctgacgcaacatgtcaataatttcttttttaccagtggtaaatccacccatagctccgccaaaggcttttcctaatgtacctgtaaagatgtcaatcttgtcgtatacaccgaattgttcagctactccatgtcctgtagggcctaccactcctgcagagtgtgattcgtctaccattacgagggcattgtatttttctgccagttcacagattttgtccattggagccacatttccatccatagagaatacgccgtcagtggcaataatacggtggcgctgtgcctgtgcttcttgaagacagcgttccaaatctgccatatcagcattagcatagcggtaacgtttagctttacataaacgtacaccatcaatgatggatgcgtggttcaaggcatctgaaataatggcatcttcttctgtgaaaagaggttcgaacaaaccaccgtttgcgtcaaaacatgcagcatacaggatggtatcttctgtatggaaatagtcagagatggcagcttccagttgtttgtgaaggtcttgtgttccacaaataaagcgcacggatgacataccgtaaccatgggtatccatggctttcttggccgcttcaatcaggcgtgtgttgtccgacaagcctaaatagttgttggcacagaaattcaaaacttcctctcctgcgttgaccttgatgtctgcacgctgtggagtggttattacacgttctttcttatataagccggctgcttctatgtcggcaagttcctttttcaggaaatctctaaagtttgtatacatatattgatattaaggttttgcttatgcaaagatgcaatttttttatttaggaaaaaagaacacgcttatttttatttcatttataagaacttttgtatatttgctccgcaatttaaaaatctagcttgtaaatgaaaaacattttaataattggggcaactggacagataggttcagaactcacaatgcttttgagaaagaattattctggtaatgtagtggctggttatattcctggtgctgagcctaaaggagaattgaaagaatcaggtccttcggctattgtggatattacgaacccgcaacaaattgccgatgcggtaagtaagtatcaagtagatacaatctacaatttggctgcattgctttctgccgttgcagaaaacaagcctcagcttgcctggaaaatcggacttggaggattgttcaatacgcttgaagtcgctcgtgaaaagcagtgtgcagtatttactccgagctctatcggctcatttggtcctggtactcctaaagacaaaactcctcaggacaccgtgcagcgtccgaagaccatgtatggtgtgacaaaagtttcaggtgaattattgagtgactattatttcactcgttttggagtggatactcgttccgtacgtttcccgggattgatttcgtatgtaactcctccgggtggtggtactacagactatgccgtagatatttattactctgcagctaaaggtgaaaaatttgtctgcccgattgctgagggaacttatatggatatgatgtatatgccggatgctttgcgtgcagcggtagaaattatggaagcagatccgtctaagttggttcatcgtaattcattcaacattgcttcaatgagttttgaaccgaatacaatctaccagaatatccgtaaatatcttccggagtttgaaatgcaatatcaggtagacccattgcgtcaggctattgcagaatcatggccaaactcattggatgatacatgtgcccgtgaagaatggggctggaaaccggaatatgatttggatgccatgactcaagacatgcttgcgaaactgaaagagcgttttggccgttaattgccaacagatttgatgctacataattaaaatcccctcactccctgtatgattacagagaagagtgaggggatttcttgtataggaatttcttttgttagaagatactttggaaaaatgtcttgatggcttctggctttatgtggtgaagtgtatgctcttttatttttgtggaatccatcaggcaatgcagccctttgtagccgtccgctgattcttgcaatactttttctgtatagatgttttctgctttcttgtttttctgactttccggttgatttttaaactggccgatatagatgttttcttcaaaagcatttcgggtagaagatgtaaaatcaaaatggctgggctctgctgcgtaatagatattttgacggaaataagtactgtctgcatatccatcccaagagtcggaagtgatcatcgtacggtctactgcatcagacggtttagggttggcgtggataatattacgttcgactaatgtttgttttacgggaccagctatgtggatactgggagaaaacataccttgacgtgtttctttcgggcgtataccgtctcctatactgatattgtatcgaacaatgcttccgatgtttccgcagctataatctccggcatttccactgttgcatataagtaccattcctccgtaattgtcgtgactgtaattgtattgtataagggtgttctggcaattgtagtcggaatcgaatccttgtgcatcccagggcgctttatgtccccatacttcattatattgtatgatggtattgtcacagctccaaggccagatgcctgctgctgcctctgtcatcggaagaatgtcgggtgaatcgcacatgagattatattcaatcagtgtactgtcacaacctatggggacaatgccgtcgccgggaactttttcaattaaattgttccgtacaatggtatgtttattcggataccagtttttacgatcgtaataaccactccaaatcatggcattgcgttcacatcttaaaatgtgacaattttctatggtcagactgtcaaagcgtgagcgaatactgtctcctccgtttacaatcagaataccacttcctcctccctcttctttgacaagagaaccattgacatcacgtatggtaaggttgtttattctgatgttatgagaaatgccataatctgtacattctacttttaatccagtacgtccggcctttcgttctttacctgtattactgatttcaaggttttgaattgtgaagtaatcggagttgaaaatacgtacggcatacatggaggtatcattccctgcaatacatggtttttgattgccctcaccgtatgcatcgataatgatggggtgagtgtaggtacctttgcctgtgacttccaatattccgggaaatgtttccccttttttgaatagaattttatcaccgggctgtagggagatttgtttcaaggcttctatactttgccaggcagaacgaggtgaggttccgttgttttggtcacttcctgaagtcgcatccaggtaatagacgtgtgatgagttgcatgcataaaaaacagatgaaagtaagcagaatgcaagctgtgtccatgtagatgttttcataatatataaattgtatttcattgtaaaggtagtgatattgttgaatataaaagcgattttctatttttgttgatggtttcattctattttttgacagaattgttttatacagagtagccgttttgtcttatttttgtatatggtatcttaaaacttaatatcaatgaaaaaactatggatggcgcttgccttatggggagctttagcagcgcagctgcatgcacaatggaagccggttgagggacggattagcacacaatggtctgaacaggtaaatcctgataaagtattaccagaatatccacggcctattatggaaagaacagaatggaaaaatctgaatggcctttgggattatgcaattatagaaaaaggtaaacattccccttctgtttttgatgggaaaattctggtaccttttgctgtagaatcttctttatcaggagttgccaaaacggtaggtgcagagaaagagttggtctatcgtcgttcgtttgacgttccttcttcttggaaagggaaaaaagtacttctgcatttcggagcagtcgactggaaaactgatgtatgggtaaatgatgtaaaggtaggcagccataccggaggatttactcctttctcttttgatataacggaagctttgcaagggaaaaacaatactctgctggtaaaggtatgggacccgacagataaaggatatcagccaagaggaaagcaggtgtctcgtcctgaaggtatatggtatactccggtgaccggaatatggcagactgtctggctggaacctgtcagtgaatcatatattcaggatttacgcattactcccgatattgataattccttgctttctttgaaggccttggtaaaagatgctacttcaaaagatttggtagaggtaaaagtctttgatggtcagcagctggtggcgcaaggaaaaagtattaatggagagtgtgtacaggtagcaatgccggagaatacaaaattatggtctcccgaatctcctttcctttatacgttgaaggtttctttaaagcagaacggaaaactggtggatgaagtgtccagttatgcagctatgcgaaaatattcttccaaacgtgatgccaacggtattgtacgtctggagttgaataacaagccgttgttccagtttggtcctctggatcagggctggtggccggatggattatatacggctcctacggatgaagccttattgtatgatatacagaagacaaaagattttggatttaatatgattcgcaaacatattaaagtagagcctgcacgctggtatacgtattgtgacaagttaggtattattgtatggcaggatatgcccagcggcgaccgtaacccagaatggcagaaccggaaatattttgagggcactgaaatgaagcgaagcgcagagtcggaagcttgttaccggaaggaatggaaggaaatcatggatgcattgtactcttatccttgcattggcacatggattccatttaatgaagcttggggacagtttaaaactccggaaatagtggagtggaccaaacaatatgacccgacccgtctggtcaatcctgccagtggaggtaaccattacacttgtggggatatgctggatttgcataactatcctgctccggaattgtatctgtatgatgcacagagagcgacagtattgggtgaatatggaggtattggctgggtagtacagggacatatctgggaaccggaccgcaactggggatatattcagttcaattcttctaaggaagtgacagatgaatatgtgaaatatgcagaaaaactttatgatttaatacctcgtggtttttctgcagcagtatatacgcagacaacggacgtagaagtggaagtaaacggtttgatgacatacgaccgcaaagtaattaaactggatgaaaagcgggttcgtgagattaaccgtaaactatgtgaatctttaaacaaataa

SEQ ID NO: 3847 - DNA, 2712 bp, Unknown
  gut microbiota DNA sequence
taaaccaaagattattatcttactaggattaccaggtagcgcgatacgctccagaattcgttcggattattgattttcagagtcagctgacctttatcatctttaacaagttcgtatgaactctgtgggtgggtagtcagtaattctgctcgtttggagtacagcttgatttctttttctttacgaatatcaatctgggtaaagtaatctttgttgaaatcattgtctttcagtacgtcacctttcttcaaaatcttctggtctttcaactcagatttagtgccgaatacataccaggctgtgttgagggctttatcctgagcttctacagtcttggtttttgcttcattttctgcgctcagctcgtctacgttcttattcaagtccataacagcttcatccaactctgcaatacggatattctttgcagccaattcagcttgcagggtttcaatctgctgctgtttggcagccagttcagcagtgaggttctttacggcttttttcagctgtgcagactggtatttgctgtttttcagttgctcttccaatttggcaatctgttcgcggtttgatttcagcttttcactgataaagcggatatcttcttttatcttatcggcagccgactggctttccaatgtgccttctttcaagtctacacggttttcagcttcgttgatttcgcggaatccttcttgaatttcattgaaggctcccatgatttcgtccagttctgtgtcgcggttagagagttcaagcatcagtgaatcgttctgagcttgtaaagtgcttttgttctggcctgagttattacatgctgtcagcagagcggcagcacataaagcagataaaacaacctttctcatagtttttgaatttagaattataatttagttttctttgcctcctaatataataacaatttctcctctggattcagtttctgtgaagtgtgcaataacttcctgaagggttcctctgacgctttcttcatgtattttggaaatttcccgacatacggaaaccgggcggtctgctccaaaaatttccgcaaactgggtcagcgtttttagcagacggtaaggcgattcgtagaaaatcatggtacgggtttcttctttcagggcattcagccgtgtcatgcgaccttttttctgagggaggaaaccttcaaaacagaaacgctcatccggaagtcctgatgagaccagtgccggtacaaaggccgtagctccaggcaggcattgtacttcgatgccgtttcttacacattctcttaccacaaggaaaccggggtcggaaattccgggagtgccggcatctgagattaaggctaccgtctgacctccttttatgcggttgacaatgctttccaccgtctgatgttcattgaacttgtggtgtgactgcattgcattcttgatttcataatgtttcaagaggatacccgatgtacgtgtatcttcagctaatatcaaatccgcttctttcaatatgcggatagctcgaaaagtcatgtcttccatattacctaccggagtaggtacgacatatagttttcccatactttgtacttcatgttataaaagcaaaggtaaaaagttttcgtatttacgtgttctatttgtcaaacatttaacagaagttttctctttacatgctgttttcgtccctattaataaaaatacgtcgatttttcgtggatttcgattcgtcgttgtaattttgcaattgtttttatgtcatgaaagaaaatatggtagtatattcagaagatcatcgggaggagacctgccgcagaggaaggattgaagtgatatgtggttctatgttttccggtaaaacggaagagttgatacggcgtttgcgcagggctacttttgcgcatcagcgtgtagagatattcaagccgtctatcgatacccgttattcagaggaagaagtagtgtcacacgataataacagtatcaaatctactccgattgattcttccgccagtatccttttgtttacgtcggagatagatgtggtaggtattgatgaggctcagttttttgatgatggattacccgaagtgtgtaacgaactggccaatcgcggcgtgcgggttattatcgcagggcttgatatggattttaaaggagttccgtttgggccgattcctgcattgtgtgccattgcagacgaagtaactaaggtgcatgccatttgtgtgaagtgtggcaacttggcctatgtttcgcatcgtactgtgcttaatgacaagagggtgttgctgggtgaaaaggaagaatatgaacctttgtgccgctgctgttatcagaaagcgttaaaagaagatgtgtctaagtagttgataattagacgaagtttaaatttgttgaaaaaatattccaataatatttggtagttactataaaaacatctacctttgcactcgcaatcgggaaataaccgatgcaacaaaagattgattcgctagctcagcaggtagagcacaacacttttaatgttggggtcctgggttcgagccccaggcggatcactcagaaaaaggcgattatcttgaaaaaggtaatcgctttttttcatatttgcacaaatggtacctgatgaggtgtctgttcgggtcaacgtaaaaacctgagggatttattgtttaggcataaattttagtcagtctgtacaaaaagaatgccttgtctttaa

SEQ ID NO: 3848 - DNA, 173 bp, Unknown
  gut microbiota DNA sequence
tattccagcggggaggtgagaagcacctcttccttcatcggttgcggagcctcacgcggataaatgcaggtactgcccaggaacagcaacttcttcaccccgtgacggaaactctcgccaatcacgttctgctgaatctgtaagttctggtagataaagtccgcacgatattg

SEQ ID NO: 3849 - DNA, 4754 bp, Unknown
  gut microbiota DNA sequence
atctcttctgatgtgagaatattttcactgctatgcagatatttatctatctgtttcatttctgcaggatttccagctatgacaagtttgatttctttatctccaataagtgttgataatttattcatataattaagaagactattgattataatttcattattccatgtaaagataatcgttttataaataaattcgatatgattttatagggaaaatgatactttaagtttaattttttgctaaaattcaaatggagaatcaaaatccttcaacagcggatgcttggtgtctttctcgctcagaatagcctgttccgtcggaatacgccagtcgatgcccagcgaatcatccaggatgctgataccgccgtccgcttccggatgatagaagttgtcacacttgtactggaagatggccgtttcactcagtacggcaaaaccgtgcgcaaagccccgcggcacaaaaaactggcggtgattctcctccgtcagttccacggccacatgctgcccgtaagtaggactccctttgcggatgtccaccgctacgtccagtaccgcacccttcacacagcgcaccagtttactctgtgtgtacggcggacgctggaaatgcagcccgcgcatcaccccgtacgatgacatgctctcattgtcctgcacaaaattaatctttcccaccttctcttcaaattcccgttgagagaacgattcaaagaaataccctctggcatccttaaaaatgcgtggctcgataatcaccacaccctctatcgctgttttaattacttccattttatataaacagataagtcatttaactattaactgaagaaacgcttttaatttttaacttttaattattaactataaacgttattccaggtttgccttccccgtacgctccacctcgtcaatcaccttcagcagatattgtccgtactggttcttcagcatcggttgcgcttcctcccgcaatttgtcggccgaaatccagcccttgcgataggcaattccttccagacacgccactttcaatccctgacgcttttcaatcacctcaatgtaggtagaagcctctgccagcgagtcatgcgtacccgtatccagccaggcaaatccccgtcccaatgtctgcaccttcagttcttcgtcttccaggaatcgctggttcaccgtagtaatttccagttccccgcgagccgacggcttgatgcttttggccacctctaccaccttgttgggatagaagtacaagcccaccaccgcatagttcgatttcggatactgcggtttctcctcaatggaaagacagttcccttccttgtcaaattccgccaccccgtaacgttccgggtcactcacccagtaaccgaacactgtagccttcttatcctcttcagccgtacgtaccgcttcccgcagcatcgcactcagtccgttcccatggaaaatattgtcccctaacaccagacaggccgcgtcatccccgatgaacttctccccgataagaaaagcctgtgccagtccgtcgggtgagggctgttccgcatattcaaaacgtaccccgaagttacttccgtcgcccagcagacgctggaatcccggcaagtcgtagggcgtagagataatcagaatctcccgtatacccgccagcatcagcacggaaatgggataataaatcatcggtttgtcaaacactgggagcatctgcttgctcactcccttggtaatggggtagagacgcgtgccgctaccaccggctaacacaatacctttcattcttaattcttaattattaattgatttagtctcttctgaaaatatcacgtgtataaactttttcctttacgtcatccaggcacgcatcgtagcggttggcaatgatggcgttgctctgcttcttgaaatcctccaggttgttcaccacctttgagccgaagaacgtagtaccgtcttccagcgtcggttcatagatgatgaccgtagcacccttcgccttgatgcgcttcattaccccctggatgctgctctggcggaaattgtcgctgttcgacttcatggtcaggcgatataccccgatgacacattccttctccgcttccggactgaaatctccgcggttgtaataatcgtagtatcccgctttcttcagcacctggtccgcaatgaaatccttacgcgtgcggttactctccacaatggcctgaatcaggttctccggcacatcctggtagttggccaacaactgcttggtatccttcggcagacagtagcctccgtagccaaaagaaggattgttataatgcgaaccgatgcgcgggtccaggcagataccctgaatgatggcctgtgtgttcagtcctttcacctctgcatacgtatccagctcattgaagtagcttacacgcagagccaggtaagtattggcaaacagcttcaccgcttctgcctctttcagtcccataaacagcgtatcgatgtccggtttcaaggcaccctcctgtaacaaggccgcaaactcgtgcgccttttcctccagatcttccccggcaattgcctgaatcgccgcgttctcctcgtcgcgtccgttaatcagtttcgggaagcccacgatgatacggctggggtagaggttatcatacagcgccttgctttcgcgcaagaactccggagagaacagcaggttgaatttctttcccgcaagggcaggagtggagcggaatttctccgcatacttcacgtacaggctacggcagtagcccaccgggatagtactcttgataaccattatcgcttccggattcacctccagcaccaggtcaattacctcctccacgtgcgacgtgtcgaaataattcttcaccgggtcgtagttggtaggagcggcaatcaccacgaagtctgcctttcggtaagccgatgccccgtctaatgtagcggtcaggctcagttccttttccgctaagtacttttcgatgtactcatcctgaatcgggctgatacggtgattgattttctccaccttttcaggaatcacgtcaacagccgtcacctgatgatgctgagccagcagtgtggctatggataaacctacgtagcctgtgccagctactgcgatatttaattgtgtcatcttcttattgtttttcaattatttctttcacaaagaaagagaataatccgtagaaaaacaaatactttcttataccgtctgatgattgatgcagatacctttcaggtaccattcatacaagcggtgaataccttcgtctatttctactttatgatgccatcccaggctatgcagcttgcttacatccgtcagcttgcgcagtgtgccgtctggtttcgatgcatcccagcgcagttcacccttgaagccgatttccttcatgattttctctgccacttcgcggatagacacttccttgcccgtacccacgttgatgtggcagttacggatttcagtaataccgtccgcatttttctttgacgcatcatacgtctgcttgaaatctacgttcagcaacacatgtacgctggcatctgccatttcttcactccacaaaaactcacgcatcggcttacccgtaccccaaagcgtaaccgcttccggtgtgatgccgaacttcgccagcttttcaagaatctcctcgtccgtattacttccgtttacaccttccaccgggcgcaggttgatgtccttgcgtaccgcatcccagtcgccttcgttcaggcatttcgccaggtgaatcttgcggatcatggccggcagtacgtgactgttttccagatggaaattatcatttggaccgtacaggttggtcggcattacggcgatgtaattcgtaccatactgcaggttgaagctttcacacatcttcagtcccgcaatcttcgcgatggcatacggttcgttcgtgtattccagcggggaggtgagaagcacctcttccttcatcggttgcggagcctcacgcggataaatgcaggtactgcccaggaacagcaacttcttcaccccgtgacggaaactctcgccaatcacgttctgctgaatctgtaagttctggtagataaagtccgcacgatattgtaggttggccatgatgcctcccacatgtgccgcagccagaatcaccgcatccggctgttcctcgtcaaagaacttctttaccgctatcgggtccagcaaatccagttccttgtgcgaacgtcctaccaggttattataacctctttccttcaggttattccagatagcggaacccaccagtccgtggtgtcccgctacatatatcttcgctgatttgtccatattcgacaaattaattgtttattgtttcagagacagaagaacaaaagaacatataatcttcattattaattcttcgttcttcattcctcattcttcattatttcacgattcccttctccagatactctgccaggtttgtgcgaatctgttctcctgccttttctacggccacttttgccatatccgcatccaccatgatttttaccagttcttcaaaggttgtcttcgacgggttccagcctaacttagccttcgcctttgtcgggtcaccccagaggttcaccacgtctgtcgggcggtagaaatcctcgcttacctctaccaggcacttgccggtagccttgtcgtaacccttttcgttgataccttcacccttgaattccagttcgatgcccgcatacttgaatgccaggtaacagaattcacgtaca

SEQ ID NO: 3850 - DNA, 596 bp, Unknown
  gut microbiota DNA sequence
cccacgacgttccgattcatggttgaacaagatacccgagcagcaatacatattgtaagcttcacgatattctttcacaatccagaagccatacagcttagccactgcatacgggctgtaaggatggaacggtgtgttttcattctgcggcacttcttccacctttccgtaaagttccgaagtagatgcctgatagatacggcaggtatctttcagtccgcacagacggacagcctctaacacgcggagcacccctgtggcgtctacatcagctgtaaattccggagagtcaaaacttacctgtacgtggctttgtgcagccaggttgtaaatttccgtgggctgtaccttgcttaccacttgcagaatactcatggagtcccccaaatctgcatagtgcaagtgaaaattcggtttaccttccagatgtgcgatacgttcgcggaagtccactgacgagcggcggatggtaccgtgtacatcataacctttttccaataagaattcggccaggaacgatccgtcctgtcctgtaatacctgtgattagtgctacttttctttccataatggtagaatcaatcaaataatgttttt

SEQ ID NO: 3851 - DNA, 2563 bp, Unknown
  gut microbiota DNA sequence
gtcaaacagcaggtctactttctttcttaaaaaaagattatccaaaattagtaattgtagatattttgtgtcatagtgttccaagtcctctcattttacatgaaatattaaagaagtatgcccccactaatatttctttcagagataaaagtctaggttggagaaaatcatatagttttcaaataaaagaaaacaataagattatacacaataatacattcctcaatcttttctttaaaggccttattaatcggccatcctgctataattgtatattcacaaacacataccgagcttcagaccttactataggagactattggaatattaaagccatagactcaaaattcgaagacccactaggggtttcttgtattctaattaattctcctaaagggaaatatatatttgaacaaattcaaaataaaattgaaaatatacgaacagatttaaagccagctttacaagcttgcttacaacaacatacaacagagcctgtacagaaacgaagaaaattttggactgattatcaagagaaaggctttgactattgtaataaaaattatggctattatacacctatcgaaaatatcaaagccaatatattagctccaatagctcgaaaaacaggaattagcaaactccttagagtcataaaaaagtagaaattctaaaatatgaacataggtataaaaattagtatttcaattccttttatttgggataaaatttggacccctttctataaaaaaagtatgaaattttgtgggaaaaaggtttacatacgccccacatgttcagattttaagggattatggaatttaagtataaacgattacactagtatacccaaaggggcagtgttttattgcactgaggctcccttaactatagggaaaaaagttatattcggccctcacccaaccatcataacaggtgatcatcgaattgatgtagtaggaaaatttattattgattcacatgaaaaattacctcaaaatgatgctccagtcacaatagaagatgatgtgtggacaggtgccaatataacaattttaaagggagtcataattggcagaggaacagtaatagctgctggagccgtagtcaccaaatcttgtccgccatatgcaataattggaggggtaccagcaaaaattataaaatacagatttactatagatgaaatattagaacacgaaaaaaaactttatcccgaaaaggaaaggctaactcgagaagaattaactatacaaaggaataaatataaaatataaaatgacaaaagtattagttattgcaacttcacataaaacaagaggtggaatcacttccgttataaaagctcaccagaaaggtgagcaatggaaagaatttcattgtaaatggattgaaactcatattgacaaaggtagtattttcaaattattctatttttgcaaaggatggattctgtttatgctaaatcttccgttttatgatatcgtacatattcatacaagtgaacctccatcagctattcgaaaatgtcttttcatgtggtggtctaagctatggaaaaagaaagttattgtacattttcatgcattctctcctgagacgactatcaatggaaaatatcaaaaagtatacaaatatcttttcggccatgccgataaagtaattgtattatctcagctatggaaaaaatacgtaaatgacacttttcatttaggagataaaatacaagtcatttataatccttgtacgactgaaattctcccaggaaaatacacaaaacagcatatcatattatatgctggtactgtaaacaaaagaaagggatatgctgacatgattaaagcctttgctaaaatagcatctcaataccctgactggaaaattgtttttgccggaaatggagaaattgataacggaaaaaaactagcaaaagaactaggaattgaatcacagacacaatttttgggatggataaatggaaaagataaagacaaggctttcaaagaagcatctattttttgtttgcccagctatgcagagggctttccaatggcagtgctagatgcttgggcatacggcttgcctgttattactactccagtagggggaattccagacattgcaaaagatggagagaaccttctgctttttcagccaggagattgcgataaacttgctattcaaatgggacgtatgatgaaagatgagacattaagaaatcatcttacagaacaatccaccatactgtcccaaacaattttcaatattgatactatcaacacaaaaattgaacttctctacaaatctttaataaattaaaattccatcaaataacatgaaagaacgaaatatcggtattgacatcctaaaattttttgccgcattgcttataaccaactctcacatggaattactttatggaaaatacagcgtattagctacaggaggagctattggagatgtattattctttttttgttctggctttaccttgtttctaggaagaatgggaagatttgacaactggtataaacgaagaattaatcgaatctatccaacagta

SEQ ID NO: 3852 - DNA, 2488 bp, Unknown
  gut microbiota DNA sequence
cgtaggctcggtacagaacgccttactgcctttcggcagtaggttttcccgtacctgcccccaaaccgtacttgcatgtctccacgcatacggctctccgttgataacatgactttatttagcatggctgtgtattttggcataacacttttcacagacaaccaatgtcttcctatgcttttcaagcatcagcctgtcacattcagtttttcctttaagctgatttagctttctgacatgacgcatgactacaggtccgacttttccacataattcacatgttctcgcatccaatcgctcagtaagtgtcggctgtggaattgcgattgtgtagtataagtcgtttacctccgtatagtacattggtggtttacgtttgaatccctcattatagaatttcctgtaccgtaatttaccttttgcatcctgatatggcactataatgtcattcccaaccttatatttgtcaatgactttgcttacagtgctattggtttttcctgcaatggtatggtacatactgtactccatgatgtatccaaactttgagagcgcgtatgccacgttgttggcaatgcagtagtagttgtagaaccctctgatttcagagttatatgccgccactatgtcctcgattttcttcttcataagattgcctctgaactttgcaaaccaaacttgtcggccattttctaccttgtatctgatggcgctgtattcttccagtttgttccgcaccgtttctatggcgacctttaggactatcttaccgttgtaataacgggctggcacattgttcttgtcccgcttgatagcatcagacttacggactgaaacatcgaagccaagaaatttcgcgggcttttgtgcgtttgttatcaatgtcttttcctgtgacagttccagcttgaggttttcttccatatacttggtaatgtccgacttgattttaacgcactctgccttgcttccgataacaccaatgaggaaatcatctgcgtatcttacgtatcgaagccttctgtatgtttcatccatactgtctctgctctcaatcttttgcctttcacgtctcagtttctcatactcatccctaagctgtaatctgacatctgcatcctgtatgttcttgatgcttttaaggatgcgttgcatcttatcgctaagttgcttgtattctttggtgatgtgtctttcttttcccttattgaagcgtagggcgtattcttccatatacttgtcaaaattatcaagataaatgtttgccagtataggactgatattaccgccttgtggagttcccttgtttgtattatgaaacttccagtcttcaatatatcccgcattcaacaacttgcggataagccttagaaatctatcatcggcaatccgtttccgcaaagttgcaatcaatacattgtggtctatgttgtcgaagaatcctttaatgtctccttccacaaaccattttgtacctgtaaatgtcttttggatatgggtcaatgcggtatggcagcttctgtttggtctgaatccatgtgaggtgtttgcaaacacctcttcatagacggcttcaagaatcatgcgcaccacctcctgtacaagtttgtcctcaaaggaaggaattccaagcggtcttttcttaccgtttttcttgggtatgtatatcctttttgccggattaggcttgtaagactcatctctcaaagatgcaatgactttgtttattctttgaagactcatccgattgatggttttcccatccgtaccgggtgtcatattgcctggtttggcgtaaatacgctggtaagcaacatgaaacatctcctcattgaataagatacggtacagcctttcgaacttgtaatccgaaactttaccatgcttgtttaaagcttttaatacttgctcaggacttctcataatgtctcacacattttccattatttgtattaagttatctaactgcttcccttcgccatgtacaaggctttcccttgctcggactactacggaagctccgttcccatgtcagatattcagggtcctatgcccatagccttacggcattctgatttagggaatccccatttgctttcacaataactgtttggctcggcagactgtcggatgcgacttacgttcctattccacttattgtggttgctctgaagccagctcctgctccattgtaatttcggtttacatggggtgcttcagcccgacgtgaatcaaatacctttcgtcggggctggtacgtgtgcagcagaactatcgttcaaccaatcaggcttcatccttgtgtctgtcttttcctctcgccatgcagtcgcagcttggtatttagctgactaatgactttaccgacatgcttttgtcacctttggatttctcctccagctaagtcgttgaggataggtctgttgaactctaacctaatctcttgccatagagatatttattgtgtagcctatatgggcgcatcgaa

SEQ ID NO: 3853 - DNA, 1071 bp, Unknown
  gut microbiota DNA sequence
gcatcagaactgctcaagcgcatcaatccgagtactaaaattacttgtgataacgcgcattatacgcagttacctaaaggatggttagttgcccccatgcaaatactatgttctttgattgatggcaataaacaaaatggcatagaacgaataaatcttgatgtcaaatatttgcgtggtgaacgagaaccgaagactttaacttcaggcaaatttatacctgcaaattctcttttaattttagttgatggggagaactctggtgaggtattcagaactccaatcgaaggttatcaaggtagcactttcaaacagttgtctatcaacgaaaatatgaatacagaatatttgttacaagttatcaacttttatagaaaattattgcgagagaacaagattggctctgccattcctcatttaaacaagaagctgtttaaagaaatcaaagtttctataccaccctataaggagcaacaaaggatagtagattctataaataaagcgtttatgtttctagatatgataatggagaatttataaactctccattatcatatctaatttagcaaagatactgtgaacggcaaaaacaattcgtttttgctctttttggggtggtattggtatctctaatttagaatattcagaaatccaatatcgtttatgagtgtcacctattaatcttgttatgctcataaagattgctacataatcaatctcaacattttgatttactttaagtattttcattgccgatgattttaccttgaaagggaaattaaccagttttgaatctgttgtaaaatcatcaaatattatacaaggaagatttgaatatatacctgtcgtttcattagtatagccaattataaaagacttaccagccgtcaaaacaggagttgaataagaagtatcataatccgtagattctacgatataatccgttggttgttcataatcagtaatttgctcaagtctacaaatagcccatcctttaggtaactgcgtataatgcgcgttatcacaagtaattttagtactcggattgatgcgcttgagcagttctgatgc

SEQ ID NO: 3854 - DNA, 980 bp, Unknown
  gut microbiota DNA sequence
ccagtccttctaacaccactttctgttcgtctgccacgtgtaccacgcagttccggcagtcgaacaattttacgtgattacccacttgggcattcccgttttcatcctgcggcaacagcccgtgcagcgagccccagcttcccaggtcgctccatccgaattccgcaggaagtacatagatgctttctgccttttccatcacggcatagtcgatggataccttttcgcaggtagggaagtccgctttcaaggtctccgtttccttttccgtgtagaaatccggcgccatcttctccattactccggcaatctgcggggcatatttctcgatggcatgggtaatggtctgcacgttccatacaaagatacccgcattccagaaataatttccctgtgccacgtatttttgtgccgtttccaggttcggcttttctttgaacgcctctaccttgtagattccgttttgtccttctcctgttgcggcaatgtatccatatcccgtttccgggcgggtaggtttcattcccagtgtgacaatggcttccgagtgggccgtaaattccagtgcctgactaatgcaccgtttgaactcttccttgtcgagtaccagcgcatccgaaggggtgactacgatgtttgcgtccggatactgcttcttgattttccagcacgcatacgcgatgcaaggagccgtatttctggcttccggttctgccagaatgtgctgtgtcggaatctccggcaactgttcctttacgatgccgacatacttttcggaggtaactacccaaaagttttctttcgggcacactccttcaaaacgttctgcggttagttgtatcagtgatttccctacgcccatcacatcgatgaactgtttgggatattccggtacgctcatgggccagaaccggctgccgattccgcctgccatgataacgacgtgattttgcatttgtgtttatattagtttaaaaact

SEQ ID NO: 3855 - DNA, 1020 bp, Unknown
  gut microbiota DNA sequence
ctattggtactaaaagtgatgactttagccatatcaatagaataaattagtatatttgcaatagtatatatttaatagaatgattgagatgaaacgtttatcagaagaacttttggaatattttagcaataccccagaagaacaattacaaaaagattgggaggctatacactgcaagtatgcttatggaccggaaatcaatcaatttattgaagaatgtgaaaagaatgccttgcgcaatgaaattgtagccggcatctacggaagccatccaacatccagagtgaatgtagaatcccctatatcccaggatttcgggtctgactcatatttgcctatggcagtataaaacactaaaatacatcataatgaagcaagccgttttttcgctaaaaaattactccgtagtcaacgtaatgcttgacttggagaatattccaccccaatgtatcttcgatctgaaaatagaaccatccggcatctattttcagagagaaagacagtatgtattgactctggtattcaaggcttcatataagaaagaaaatactgactttgaagttataaacatcaaacttaaagccgtcttttcttttggggacatggtacaggctgacaacatccctccttatttttatgcgaacagcattgctatcattttcccttatgtacgtgcctttgtaagtactataacattacaggcaaacgtagctccgataatgatacccacactgaatgtatcgttgttggaacatgaactaaggagaaacacggtcttaaagtaagaagccttcaatgaacagaatcatataccagaccgttgaagacagagggaaccccgactatgtggaacaacatggtccgttcatttgtacgaataaaaacgcatggcttggagaaggctattatttctgggatacaattatagaacttgcccattggtggggaaatctttgctataaggacagcggatatataatcagccagtcagcttgtgatgacaaattagaaaaggtattt

SEQ ID NO: 3856 - DNA, 22144 bp, Unknown
  gut microbiota DNA sequence
tgctcccgtttcagcgggaaagcgtttgcaaaggtaaggcgttttttcgtaacctccaaattttttcgaagttttttttcgaaaaaattttcggaaggttttcagaaggcgtgcggcttaccctttctcgctcccttgcacatcgcaaggtaagatactcggtgcagcagtcagcactatctcccgtagcctcagctctgccagtctgtcatcttcagcggctctccctctcgaaagcggttgcaaaggtacagactttttcctttcatgcaacttttacaccatacttttttgcaggattttttcaggttcttgcctaactcgctgatttactttatgctataaagcatattttttgtttccatacgaaaacggatgtgaaataccctacattatataattcgtgcgggcgcgtacgtgtgcgcgtaacgagacggaaaaagttttacaaaaaataggggaaaacagctgcaaagcctgaagctgcgaatggaatacggaaaaaggaacggagtttttacacggacaaggaggaactttttacgtttccgctacgaaaaacatacggttccgcaacgcaaaacgtacggttcgcacggcggaaacatacgtttcgccaaaggaaaacataaaaataatggaaacgttacgagattttcgacccgaggttttctaaaaaaacggattccggaaaaaaagacagcccttcgcgtaagggcataaaaaaaggagttccgctgaactccaacctttgttaaccttaaatctaatactatgaaaaacacagtacaaaagtatttattttatccggaatggcaaaatacaagactaaaaaagaatgctttacaacatacattaaccaaattctatttaccgattaaatcccttaacaaatacagactcaaccttaaaaaaatcaagaacgagactgcattatcatattacctctcccaaccatcaattacttttgtctaaaaatcatacaccccatgtcaaaaatttagacactcacagaaagctgaaaaatcgcatatatctataaatcaaagatttgaaataatggcacgaaaattgtatcgtacatttgcagtaaaaacaaaaccaaatacagaaaaatgaaaacttactttacctttttacagcgcaacaagctttttacctttgtcaatgtcattgggttaagcatctcactcatgtttctcctgctgattactcacatggtgacccgacagctcaccgtagacaaagacatgaaagatgcagaccggacttatgtactggctaacgagatatgggctggggggcacatcttgctgggtgacaaactgcaaagccgttatccggaaatagaagactggtgtgccgtaagcggttcctatgaacagtttgtcaaaactaacgaccagccggttaatatacaaatgatgtttgtccgcgaaaacttcttccggttcttcaacttccatctgctggaagggaatccggaaaccttgctggccaatgagaacaacatcgtgctgacacgttcctgtgccatcaagctgtttggtacggagcatgcgttagggaaaacacttattgaacaagcattcggtgaccgacgctgtacagtgagtggaatcattgaagacattgataattctatttttccttccaatattgaagcattcagccttcataagaatgtgcgatacgttaattggagtgccagcgaagaaaatacccagttgggcaatgccgccagctgcatcttcttcctgcgtttccatccgaacgtcaaccccaacgacaaagccgatgacattgcccgcttcttcaaagaattcttctggatttaccagtatgattccgttaaagaagtattattcatccccatacacgagttttacttctccgatacactggccgccggagccatactcaaccaatatagcctgaaagtggtacttattttcctgaccatcggcgtcttgattctgtttatggccatcttcaactataccagcatgagcattgcccagaccagctaccgggcaaaggaaatggctacccgacgcctgttaggttcctccaagaaaagcatcttctggcgcatgattgccgaatcgttcctgctgaccacgctggcctttgtgattggttttctgctggccaaggctgcagaacctacagccatggaactacttcatacacggcttgacattgtgggtgacttaaatcccgttaccctattgtgctacctgcttctgattaccgtactttccttgctctccggattcgtacctgccaccctgctgtcacaatacaatccgctggacatcgtaaaaggtaccttccgccgcaagaccaagactttatacctccgtctgctaaacattgtacaaaacggactcaccatcgccatgctaggatgtgccatttacctgagtgtacagatttaccgcatcctgcatgccccattagggtatgaatacggtcatgtcatccactacccgcctatggtcagcgaccagaaacttcagcttttccgccaggaagcccagaaacttcctttcgtaaaacgtgtcagttttgcacaaggtactcccattgacggcggaaacaatgatagcatgtacttcacatcggatgacagtaccaaagacctaagcttccagacttttgtggtggactctgccttcatcgacatcttccatatccaaattacggaagaccgccatgcaggatacaatccaaaaaatttctttgtaagccagtcggccatgaaagacttacgtcagttgggatttacagactttgtaagaagtgaccgtgggggctataccatgaacgtggttggagaattcaaagacttccagattcgctctctgcttatgaaagatcctcatccgctgcgcatgcaaattgctccatccgacagcatcagcccatggaacatcctggtagaagtacgcgatgaacaacccgaagcttataaaaagcaactggaccagctctattccaagataatagacggatacccgtttgattcagaatggtatgacgcactggtacagaaaatatatgaagacattacccgtatgaatcatctgattcttatcttcacctgcgcagcactggttatctccctgttaggacttaccgccatgagtatctacttcatcgcacaacgtaaacgagacatcgccgtacgcaaggtattcggttccgacagccgcagtgaaatgctccggctaatgaaattttcttccgcatcactagcggtcagtctgatcatcggcctcccgctgatgtatatcggcattcagcagatagacaagattgtgacctacgaaagcagtttcccctggtgggtaccggttgccgctttcctgattgtagccctcatctcactggcctccgtctggctaatcagccgaaaagccgtacgggaaaatccagtactgaatctgaaaacagaatagtctttatcaactcagaaacataaaaaatgaaaatatgaaaaccatcctacgaaatctattctatacgctgaaacgcttccagagcgcctctgtgctgaacctgatgggactttcggctgcctttgccgccttcgtcctgcttatgatgaaggtgagctacgaacgcgatttcgatacctgctatcctcataccgaccgcctggtcatgctgaatctggcacaacctcaagaggagaattatgtcagtacactcccccgaggccctatcgactacctcatccagcaagtaccgggcatcgaatatggcaccatctattccccggcctggcagaagcaggctttctacaccgaccccaagaatccgcaatacttctacgaggaaccttgggctgtgtatcccaatttcggaaaaattatcggactgaagttcgtagaaggcagtgaccaggagatgaaccggcccgaaagtgtcatcgtatccgaaagctatgcccgcaaactattcccgaatggagatgccttaggttcctatctgtacacagatactccagactggcgaaatccggaagccaccaaattccgaatatgcggtatttttgaagacctgccggaaaactgccagttcaaaaatgacctctttgtcccgatgggaaaacttcaggagaacgactggggcagccagaacttttttgcattcttcttgctaaaaccaggagtcagcgtggaagaaatcaaccagcagattgcagctacagaagccaacaaacgactgtttaccggggatcaaggtactcagaaactctatgttctcccaattcagaaactatattatgacatgcattccccttactacttccaaacaggtagccgcagcaccatgaccctgctggtaagtatcgggttcctgattattcttatcgcctgcatcaaccttatcaatttcagcacggcactggctccggtacgcatgcgcagcatcaatacccagaaagtgctgggaagcaccaatggagaattgcgccgtgccctggtagccgaatcggtgagcatcgtattaataggatggctattatcattgggtattgtcgcagccctgatacgcctgaacgtgctttcttttatgggcttcaccccttccctgctcgtttactggaagtatgtgctttataccggagtaatagccctgcttaccggtatcgtggccggactgtatccgtcatggtacatgacctctttccctcctgcccttgtattgaaaggaaactatgccctgagcggaaaagggaaacggcttcgtacggtactcatcggtttccagtatattgtttcgtttgccctgattgtgaccgcagcttttatttttctgcagaaccgattcatgcgaaaccatgaactgggcatcgacaaagaccagatactggtcgcttccctcccccaaatgccttatcacagcagtccgtaccgcaaattcgacactcagctgaaaagttttgctgaaatcgacgacatcgcctacgccaaatgggagttaggaggcaccgagggatatacacagtataccttccgctacaaaggaaacaactacggacatcaatatattgacgtcacaacgaacttctgccgagtcatgggaatgcacattctgtcgggaagcgacttcctgcccagcgattccatctacacctcccagctaaactttatcgccacgcaggaccttcagaaagaaagcggtatcccggcaggagagacactcgactttttcccatggggaatgagcgccaccctcaaaggatatgtgaataacgttcagtttacttcactcaaaactggctccgtcccctatattttctgtcccaacggtatctacagcaacaatgtgctaccatttgcctacatccgcgtaaaggccggaagtaatatggacagcgcactgaagcatatccgtcagacaatgagtgaatgttttacgggctatcccacagaagtgaaattttacgaccagatatacggccagctttaccaaaaagaaacaaaccagcaaaagataatcacctggttcagtctgctggccattctcatttcactggtaggagtattcggactgattatttttgaagccgcacaccgccgtaaggaaatcggggtacgaaaagtgtatggagcctccacgggacaaattctctggatgtttggccgctcctacctcacgctttccatcgtctgttcactcctggccagccctatcgcctggtatgccgtatcggaatggctgaaacagttcaatgaaaaaatacctatttctccatgggtatttctgattacatgcgtcataatcagtctgattacactgattaccattactatacagaattaccggacggctcgtaacaaccctgtaaacagcttgaaatcagaataaatacaagagaaatagcctagaaaaaggcataaaaaaaggagttccgctgaactccaacctttgttaaccttaaatctaatactatgaaaaacacaatgcaaaagtatttattttatttgaaacagcaaaacgaaagagctaaaaagaatgttttacaacatacattaactacaaagtaccgggcgataaaacccattaacaaaatcgagttcaaatataaaaaaagactatcagaagcgactgcctgtcagcagtcggccagtttataagtccggaagcgtttccctttcttaagtttgaacaccagttccctccgatctttatggaaaaagcgatcgtggatattcacaccaaactcacacgtttctccttttttcatattaggaagatgaatccggcatattcttttctttttatagaacaaatagaaacaggtcttacgcatcaccttttctccctcattactgattttcattttcagacgttttccatcgtgcatcgcacaaaataccggaggataaatcaccatttccttcagtacatcatcgctgtcattagactccaccagccgcaggcattcattgtccgatacagactgagcacaaatttgtccgataaagaaaatccacacacatacgattcctatgattctataatacttcataacccaatacctcctttgttatacccatggcacctaaagttacaaaaagattcaattgccttgcataaatgaaaggtttatttcacaaataaagaataaaaggccagtttcaggataaatcataccataaagcacgcggcctgacacaccgttatagcatgccaggccgccctgctgaaatttacaattcttacttatttttcttccattgttctttttctatcaaataagagatgacaaggcctaaacctcctcctaacagaacgcacgctccgtaaattatggaaacggcctcttttacggtataagggtaattatcagacaaataatccggttgggtggtacatgccaacatgtatcctaccaaaagccctgcccccaatccaagcagcaagcatcctatacgcagtcctccaaacgaatacaggctgggacgatacataatgccattcttaaaagtttccggcgtcagtttgtcgcccatcttttcaatcagcatcatccgttctcttcttccggcaaacagttcaaacaatttataaatcactccaaaaacaattgccacattggccacaatcatcaattcttccattttattcagtttttaatttgttactttgccctttagacgcaacccatacaaaaaggttacacttttaccgagaaaaatatttttctattttcagtgtaaccttttactttgctctgcgtctaaagggcatcatgaatcacgaggaactacatatcatagcatctatcctgagcggacgaaccgaacagttcgcctattttctcgacacctacgggccacaggttttccacctgatagtccgcatgataggctcaccggaagatgccgaagaactgacacaagactgttttatgaaagccttcacccacctttcctcgtttcatagagacagcagtttctctacctggatttaccgcattgcctacaatgaagcgatctccgcactccggaaaaaagataaagaactgctttcattcgacgaccggatgtggaacagtctttcagataaagaaatagatgaggagctggatactgaaaacgaagtgcaaattcagaaactgcagcaggcactcacccagctcaagcccgatgagcaggcactggtcactctgttctatgaagaagaaaaaaacatagaagaaatagcctatatctttcacctgacagaaagcaacgtaaaagtaaagctgcaccgcatccgaaaaaagttatgtaacttaatgaaagaggagatttaagccatgagaacaacagatagaggacttcagaaagcaataaaaaggcagccccattacgagctgcccagcaatttcagttaccgcatgatgcaaaagatacaagaggaaagtatcttacgcgaaaaacggcaggaaaaaagaatgttcatcctcttccttgtcttcgccatactcagcgggggaggctgcatcggattttttatttggaaatacggaacaaccttcatcagctattggcacacctgtaaggaaatacttccggactcccatacgctccttttctacctgcctacgttctgcgccctctgtctgttgtacttcttcgaccgatggttacggaaaaagatagaccttgaaaaaaaatagtctacctattttttcacacaaacggttacagactttccacaagaaataccctgaggcatgggcaccacaattttttgcccattccataccaacgtaatttcttttaatgtggcatccattctggcatccgttactgacacataacactctgtatccgtctcacgcaagacaagtgcacaaggtgcagaaacctccaacgttaacccctttgcttttaacaccggagcttccggatagaacacggcttctaccacctttttgtctgtcgaacgaacggcttgaatcaatgtatcgtttctcaatacttcaaacggaagcttacgagccggttcatctttccccaagtaaaccgtatagccataggtatcattcttcggactttgcccatggtctgtccacaaacgcaatacagaaaccttttcaggtagtcctgatttctttttattccgtgcattcatctttgcccaatgagccggacaactctctgaagcgacgtataaattagcctgatactccggcaaaccttgataggcaaactgtccttcttgtataacccaggtatctttcatcttacgtgcatccaaaagcatgcttccttccgccacatctgtcttcttacctttcttccaaagataaaccggagccacccttgctgtctgatccaatgtggtccggatgtgcccttccatatccggacagttattggtcactcctgctcctaaagctaccagataatctcccaatacaaaataacctttataagccttaaaaccatagagtaactcattcttcaccttacggtcacctttatcattcacattttccttatcggctccatgcattttttcaaaaatatagccaccagctgcataatctgccccatctgctgctcctgcagcgaaattatgacgactacaatatcctcgccagttcgttaccggagtcaagcgctccattccttcacgtgcagtaacaccgggagaagcggtcacatcccaaccttccataatctgaaaatattcatttccatgacgctgaaataaagtcatgccatctgtcggataaaaattatagttgtccgcgaatgctgcactttcaagcccgtcacagcgcacagaagccatattaatcatcaaatgataatctggagtatgcttcatcaagtcatcattattaaagaaccagcgtgtaccttgataaacacctttttcggttcccttcatccggatacgatttgtttctgcctcagccagaagttgctgaagctctttctgctcttctggagaaaaagaagaaagccaattcttcaccacattgcgtaacatcttgtaataaggtattgcttcctccttatcccgatactcataagaatttcggtccaagcaaggcaaacgataaccgtcccgataataccagctgcctccacggaaaaaattcatcaaggcatctgcattttcacgactgagctgctttgcccagggagtgccattgagcatacccagcatattcaaggcactggaagttccatcaatgggataaccccatatcaaacattgcatgccatgtacccatcctgctccgtcagccgtgaatccctccgtccagaaagaatcatcataggtaatctgggaagtcatgctaatgccccgctgacaaacttcagtcaggacatccagcatcggaacagagctatacatcacagccaccggaagcaaggagcgataagccagcgcattgcctcctacccaccacacatgattacggaaacgctctactgacaccacattcttatcagtctcatcccttctcaaaggctgagtataagcctgaagtcccaagattttcagcatatcacatgcattcttcaagtatttatttccttcgccccgttctgcacggtccatatcttctgtacaagcaaaataaatattcacggcagccgtaggtatcgcaaaacaagaagcatgaaaacgtggtttatcattcggacgagaaatttccaagttaccataatgcaccacagccttccaaagtttatctgtaaattcagaagttttctccagccgtcctttccggcaagcatcagccaactgatatatacggttcaatgcaccggcaataaaaattccgacacggtcatccgttgtattctcatagccttgttgataagcattctcacgttcaaactgctcctctgtagaattcaagtctgaaaaccggccatcttctcctaacagggaagccatctgaatagcctgagaagcatcaattgattttacagcccgataagggtgttgagaaaaatattctctcaatttcttgactgcatcttttttctcacctcccgcatgacaacgtgcctcctgataataacgacgatagtttgaatatgcaaactgagattccgccttacgaacaacaaagtcgctcacttgtacatggtttttccacaaacgaatagcaaaatatccatccccctgtcccctgcttataggatggcaaaacaattcctcaccatcgacagcaaacgtagtttttccatccgtcacggtaatcaccacctcataccaacgattaggcttcagcaaatgtgcctcatctgtatattcttttaccagaggttttattttgttctcatcaatgccataaaattcactgtgatattcccgaaaacgagtggtcttattctcatttcctccataacccacatagaaaagatttaatgtgttataattcttgaatatccctgcacgccaatcctttctggcataaatattatcagggtatttcaagtctttagcccccccaaaagcagttcatgtcactcaaacggtcgtattttccaccttccatcactactttaatgcggtaactgatttcatagtttccagtcaggcactcatcataccacaaagtcagaccatccggtgatacaatgtccagacaatcgtctactttaatcatcttgaacttacccgaagagtcttcgccaatccagtttttcaaagatatttctgaagcagtaatccccaacaaggaataaaacatcccccataagaaaaataataattttagtttacccataataaaagattaaatatttcatgattacatatcgcaaaaataaatattatcttttaatgatcataaccactataaacaaaaaggacgaatttcgaatgaaattcgccctttccatttctatatcaatcagaaatcttattttcgatagctttccagttcttctgcctggaacttacggatgaagttgaaatgcttttctacttcagattcagcgtagttcacatacacattcaatgacttgccaaacatgtcaggagcctttgtcgcatcctgcaatagcaaatggctcatcacgcacacagctgccatctcatacaaacgacgagataccaaatccagcaattcctggttctgtgcttccttcactgcattggtacatgcttccaatttacgagtcatatccttgatacgattcatataaccttcaaattccggcgcacaaggaatcatttcatattcatgcaaggtagccgcatacgaaccgtttgttacataacggatggcagctactgtctgcaactgggtagtaccttcatagatgctggtgatacgggcatcacgatagatacgctgacaagcatattccatcatgaaacctgaaccgccgtgtacctgaatacagtcgtatgcattctggttggcatattcagagttcataccctttgccagcggagtaaagctgtcagccagttttgcataacgtttctgttcctgacgttcttccggagtcagcttgcgttcacgggcaatgtcatccaatgctttgtagatatccacgtaacgagaagtctgatacaacaacgcacggcctgcatccaatttagccttgatggtagccagcatgtcatacacagctgggaattcgataatggccttaccgaactgtttacggtcttttgcgtatgccaaagcctcatcgtaagcagcctggctcaaacctacagactgagcggcaatacccagacgggcaccgttcatcaacgccatgacgtatttaatcaaacctaacttgcgctcaccgcaaagttcggccttcgcattcttgtaaaccaactcacaagtaggagagccatgaatacccagcttgttttcaatacggcgtacgtctactcccccatcgttcttgtcatagatgaacatagacaatccacgaccatcgtgtgtaccttcttccgaacgggccaataccaggtgaagatttgcatcaccgttcgtaatgaaacgtttcacaccgttcaggcgccagcagttgttagcttcatcgtatgtagctttcagcatcacactctgaaggtcggaaccagcatccggttcagtcaagtccattgacatggtttcaccggcacagatacgcggaatgaaacggctgtgctgatcttcgttaccgaattcataaagtgtttcaatacagtcctgaagtgaccagatattaccgaaaccagcatcagcctgagccacgatttctgcacacatggtgtacggcgtaatcgggaaattcaaaccaccgaaacggcgcggcatggtcattccgttcaatccggcctttaccatggcctccaggttagcctttgtacccgaagcatattccacacggccattggcatgatgcggaccttcctggtctactccttcggcattgggtgcaatcacctcacccgtgatttcaccagtaatttccaacactttatcgtaagagtcgatggcatccgcataatcctgcggcgcataatcgtactcgtctttatctctgtaatcgcgttctttcaactgacagatacgctccatcatcggattgttcaagtgatacttgagttccggatgttctgtataaaagtttgccataattttaattttttattttgaggctttgaggttcggtatcttaaatgcaatcggcaacacaaaacgaattttcttaaattccccaaattgcacggctggttcccactctgttttcatcaagtcttcttccacgaaacgaatcgcttctttcctcaaataataattctccgtactttgaggaagtacatgatattccacgattctaccacgctgatcaaaagtcaattgtacaagtacacgtccttccaccttttgtgctgaggcttccaaagggtaatgcacatgctctttcataaaaagtgccaacgcatccactccacctggaaaacctacaatccgctcagacggatagaactcaatttcatttcctgcagcattgtacacatgacctccttgtgaacgtccttttcggaactcttcagtccgccataaagaaccattgggataatacatctccaactgtccttcgcgtctgttattctcaaaatggcaaaggtacttcaactcgccgtttctatagaaccgacgatactcaccttccttctttccctttacattcatataggtatccgaaagttgtccatctgcataaaaaatggacgacactccatttacgatacattttttagggtcatctacaaaataggaaaagtgatgtaaatagagcagtgtatctcccaagttataaaccttcacctcaatattgtcttcggccaaatcaacccgagtacaatatcgaaacgcattctccttgctatccagccatctaccttttttatccaaataaatcgtatcttgcgaaaaggcaggagccgcaaaaaagaatatcagcagataccacagccaccatttaccgcccatacttacctcaaattattacttactgttctttttgtaatacttaatcattttcgggattacttcttccaccgtaccgttgatgacataatcggcaatagtattaatcggagcattcgggtcgctgttcacagagatgatgatacctgcatcctgcataccggcgatgtgctgaatctgtccggaaataccgcaagcgatatacaacttcggatgtaccgttacccctgtctgaccaatctgacggtcgtgttcacagaaaccggcatctaccgccgcacggctggcacccacttctgcatgaagttccttagccagttcgaacagcatgtcgaaaccttccttactgcccataccgtaaccaccggctaccacaataggtgctcctttcagattatgttttgctttttccacgtgacggtcgatcaccttcaccacataatctgtttcaggtacatacttcgctacatcatgacgaatcacttcaccctgataattggcatctacgatttctttcttcatcacaccttcacgtacggtagccatctgcggacgatgttccgggttgatgatggtagccacaatgttaccaccgaaggccggacgaatctgatacagcaggttttcataggtgataccgtttttcttgtcttcatggttaccgatttccagctgcgtacagtcggcagtcaaaccacttgtcagtgcggaagacacgcgcggacccaggtcacgaccaattacggtagcccccatcaggcaaatctgcggtttttcctccttgaacaagttgacaagaatagaagtatgaggaagtgaagtataagggaacaagcccagagcatcgaacacatgtacacggtctactccgtatggcaacacttgtttttctacatctgcaaggtctgtaccggcacaaatcgtttccagctgacatcccagctgagtggccaacttacgacctttggttaaaagttcgagactgacatcggccacatgcgcgccttccatctcacaatatacaaatacgttattcatagtctttatccgatagtatggttagccaacagttcaacaatcaagttttctacatctgcatcgctgccggtaagcgtcttgctttcctttgcctggaagatgatgttctcaatcttctttaccttagtcggagaacccgacagaccgcattgtttcgtatcaccgtttacatcggctacgctccattctgtgatattcagataaggacggctttcatacaaagaagcataaggcagttcagctccgtctttggtaatggcagctttttcctgaccacccagtgcacgtttgtacttctgtaccagtttcgcattgcgcggacggcaaggagctgcactaccgtttacagtcaatacaatcggaagcggaccttctacagtttccacacctccgtcgatatggcgtttcacacggatacgtccgtcttttacctcctgaatttcttctacgtaagtcacctgaggcaagcctaatttttctgctacctgcggacccacctgtgcggtatcaccatcgatagcctgacgtccacccacaatgatgtcatattcaccaatcttgcggatagctgttgccagcgcatacgaagtagccagcgtatctgctccggcaaaagcacggtctgtcagcagataaccgttgtctgctcctctgtataatccttcgcggataatttcagcggcacgacccggacccattgtcaggatagttacagtagaaccaggatgtgtgtctttcagtctgagtgcctgttccaaggcattcaagtcttccggattaaaaatcgccggaagtgctgcacggttaattgtaccgtcagcattcatggcatcttttcccacacagcgtgtatcgggaacttgtttagccaatactacaattttcaaactcattagattctttattttggtattagtaaattcttgtcggcaaatttaatgaaagcatttgttccgcaaaaagatatgaagaaaataaatgttttagagggtatatttccattttgcaaactctaagaacttgtttatctttgactcccgaaaaagacttttataaaatatgaatacaatgaatcaggaaactgcgcaacttctccagcaaataggaattgagaaatctgatttgagctggaccacacaagttgtactcattctagccattttactggtatcttatcttactacactaatcttccgccatcttatcatgccagccgtacgaaagattacggcccgcaccaaagccacgtgggacgattatctgttcaatgacaagatgatgaaagcctcttgccggatgattccacctatcacctggtacatcctgctcccttttgcctttgatgacaaatcagcctatctgcttcaaatcttactgaaaatctgtctgatttatctcatcatcacggccctcatgctgattaaatgcttccttgactccctctatgaaatatccagcgagcatgaagcgttaaaaaaccgtccgctcaaaggtatttaccagatgataaacctgatatctataggagtaggtatcattctcatcatcagcgtcctgattgaccggaacgccactgctatcctgaccggactcggtgcctcggccgccatcctgatgttgattttcaaggacagtattctgggattagtggccggcgtacagctttcggccaacgatatgcttcgcccgggcgactggattaccatgaccaaatacggtgccgatggttatgtgattgaagtatcactgactaccgtaaaagtacagaacttcgacaagaccatcaccaccattcctccctacgcactggtcagcgattccttccaaaactggagaggcatgcgcgagtgtggaggtcgccgcatcaaacgctcgctgttcattgacatgactaccgtgcatttctgtacaccggaggaagtgaaccaattcgtacaaaaaggatggataactgctccaaccgaaggaaatgaaccacccgtcaacctgcacgtgttccgcgagtatgccctcaaatacatcagcaaccatccagaagtgaatcacaacctgatgcagatggtccgccagttgcagcccaccaccgaaggtatccccgtagaaatctactgtttctcgaacacccccgactggattccttacgaaaccttgcaaggagaaatctttgaccacctgatagccatgataccggaattcggcctgcatatcttccaacgcccggccggaaccgattttcaacccaatgagaaaaatgaatttataacttcaaaataaaaaacaatggaaacaggacttacatacagcagcaccgtacaggtaaattccaccaacaccgccttagcactcggctcaggagatatggaagtgtttgctactcccgcactggtagccttgatggaaaacgctgccatgaatgccgtaaagcccgtactcccggaaggctctactaccgtaggtgccatgatacagacctcgcacctcaagccctccggtctgaacgaagaagtgacagctaccgcggaactcacagaaatagaaggccgtaaactaaccttcaaagttagtgcaaccgacagcaaagggctggtgggagaaggtactcacatccgctacattgtggacagggaacgtttcttgagcaaactttaacagcacacaatcgtctaccatagatttatagacagacaactgcatcaacggtagaactctaaaacatcatttacgttttccattctgcatccctaagttttccgatgcggaaacctatagatgcagaatgagaaacataagtttccgcaagggaaaacataaaaaacaaaagtcgaaataccacttatctccttcgtattttttcaattagcgtgaaagtgtttttccctcatcctctctatgtcatttaacacagaaaaaaaagaatccctgaaacaaggatatttcacttgcttcagggattttttcatatacatattattactattacacaattaccagtgcaatcagctgaataaacaatatcaggaataccatagcaataggatatactgtagcgtatgccactcccggaatgttactgtctgtcatcgaatcggcagcagccagaccaggcgtactggtcataccgccggtaatggtacctaacaagtcgagcaggcttaccttaaagacccatcggcccactatggcagccaacagcatgggtaccaatgtaaccaacgctccgactccgaaaagcaggaaaccactttcctggaaggtggctaccaaggtctttccggctgaagttcctacctctgccaggaacagcaacaagcccaactgacgcagcaactgattggcaggacctgacatggaccacataatcggaccagtcttaccaatggcgctcaggaacaatgccatcatcagtacccctccggtcagtcccggagagaaagtcatgccacctccgaaagagatgtgcagttttccgaataatacgcccaacacgatacccatagctatcgggaagaagtctgtatccgacaaacgctttacatcatttcccaacaaacgggctactgcctggataccttccttctcacctaccaccatcagcttgtcaccaaacttcagtgccagttccggtgagggagacaagtcaataccgcttcgacgtacacgagtaaccgtacagccaaagttcttctgcaggttcagttcacccaactgcttgttaatcatatctttcttggtgagcaacaaagattcaatggtctgtgtatggctcaacggaagttcaccttcttcacgctcacccaacatcaacgccaaactgttcaatgaattctcgctgcccacagcctgaatgcaatcaccttcctgcaacacggtatgtgctttgggtatcagaatctcttctccctgcttcaagcgtgaaatcacagcccctgtcatggcacgtatgttcaactggcttaacgtacggccaaatacagccggattcgtcacccggaacaagcaagtgctcagttcagggaactggctgcgccgttccttctccagtctgtgtgcttcttcattcaagtccactcccatcagtttgggaagcaacttcacaaaaagaatcaccccaatcaccccaaacggataggcaataccgtaggcaatggaagccaacggcgactgggtactgtcaatggccaccgccaaaccaggtgtactggtcaaggcaccggctatcaagcccacgatacttggcgtatcgatgtcaaaaagatatttcattccgacccctgtcaggcaggcagaagccactatcagcagcgtaatcagaatcaaggtttttcccttgctccggaacgaatggaagaaacccggaccggcctgaatgccaatcgtaaagataaacaacaccagcccgaaggttcccagttcctttggaatggataccccccaatgcccgaaggcaagagcaatgaaaatcacggcagacacatcgagcgataggcccatcactttgatacgtccgagcataaagcccaaggctacaatcaagaaaattgcaaaatacgaagtttgcagtaagtctgtcaacatggttaataaagataaatgaataaaactgggataaagataagtaaattttacggatttccccaattggctgctatcatatccccctatagttcatgaaaggcttattcatttaccaacagacctctgcttaaaaccatcctcacggtacggaatttaggagttacctcagattttccacgcataatcttcacctcccattccgaagctttccacaattctttcggcaataacagcgtatgcaatgcatttttcccttgaacagagcctatcttcacttcatttacatacacgtctgcatcttttgctgcgtcagggaaagattcgattctcacggcattgaccggttttcccttggacttcattttataagcgaaccatccgcgggtttcacgccagggggttccctgctcactgcctatcaccgaattttccatctctacaaagtggtcactttccggctgttgctcaccacacaccaccatatcggccgtagcctgctccaattgggcacgttctttctccacttcagcaagttctttttgccgctgtccgagttcctccttagacacaagttcccaataaatcatgtaccggcactcgtgtgtctgatagaaaggtttcagtttcattccctcatatctggaagggtacactccagtcaacgcaaactccaacttatcaggagatactttcttcaggttgcccaaaagattattttcttctcccacaatcacaggcatgttctgcaaaggcaattgaggccctgaagcgatatgaccaccgcgactgtcgtccgcaaactggccgtccagtctttcttttcccatatcggctgccagcacaatgggaccatacataaatgaataataagaggacttgtccggaagttgcactgcacgcaaagtcatgggcaatgtcatttcaatagcatcgccatcctgccactttctctctatggtgtaatagccatccgtcaaagttgcctctgccttctttccgttcactgcaaaagccacctttgacttatctatccattccggacaacggaagctcactttcatctttttggacttatctgtatgtaataccattcgagtgctttccttttccgggaaagacgtttcctgcgtaaaggtcatgccatattctttccattccaacacagaagaaataaacatgttgacaatcagctcgtccttacgtgatgcatatatcatctccccgtactttgcatggttctccattcccgatcccacacaacaccagaaacagctttgaggctgtgaatataccctgtaatgccctgaacgcatgggagtgaaatacaccaatcctccctgcaccggattctggcttgacaagatatgattatacaaagcacgctcataataatccatatacgccatatcacccgaagtctgatagagcatctttgtcaggcgaagcatattataggtattgcaggtttctggaccctgctcactggtcatcatactcgaaaagtcatctgctttatggaaatgttctctgacgctatttcctccgatagatacactccggttgtttacgaccgtatgccagaagaaatcggaagcatcactccaggctttctctccgtcgaggtcggcaattcgtttaaaaccgattactttcggaatctgcgtattggcatgcataccggtaagctggtcttttttctcaagaagaggattcaagaccaccctgtgtgaaaaacgtttggccaagtcaaggtattttttctctccggtcagaccgtatacatcggcaaatacctcattcagtcctccatgttcactccggagcatatcctgaatctgttcgtcagtcagtgtggaaaccgtattcagcatccagtctgtcaaagcaatcagcatcccttcggcttcttccttaccggctatcacataggcatcgcgcaagcccgcatacgttttatggatattatataaaggtacccatctattattgagcccgaaaggattggcatcgatttttccattctttatttcattccagatagctttcccgttcggaactccacaaagatagccattgcctgaagcctcctgacaacgtttcatttcagaaaggaaataatccaggcgtttcccgatttcctcatcacccgtagaagcatacatataagataaagccgaaagataatgccctcctatatgcccgtcgagtccggtattttcccagttcggatagttttcagctttgggctgcaaacctgcttccttcatataaggagccagtaatctgtccggggcgagtcctaacagataacaaatatccatactttctgcatgcttgaacggtccggaaatcaaccggacatccgtaatgggaaatgtattgattttctgaggcagtcctgcgcccatacaaacagaggatgccaaaagcatccaacctaaaagatacccttttctcatgtttttcgtctcttattgtttatgaagtgatttaaacttttcttttccttgcacattttctcaatagcataacggaaaaagcgatgtagttccatgattcccagtt

SEQ ID NO: 3857 - DNA, 448 bp, Unknown
  gut microbiota DNA sequence
ctattatttcttcgactacctgttctggttgggagaaatggcacagaggcattacaagggcgagccaagacgccccgacggggagtccatgctgatgctttgcatcatgatatttatctatgagccgatcttccttacaaccgctcatttccttttcgactccacggtatttgagtggtttacagtcgccatgatagccggaatcgtcgcaattctccactatctatcgaatggtcggatatacccgttttcacgaagggaagcggtcatgcagcactatgagggacgcaggttcagccccttcagatgttacttcttcctgttctccctcggctttctgatgattgccgaaatgtacctgttgccaagcacactgatgcggatagacgggcgcaaggcggagccggtggagaacacacggacggaagttccgcaaaggtggagggat

SEQ ID NO: 3858 - DNA, 169 bp, Unknown
  gut microbiota DNA sequence
ggagttttttcttaccggaatgttataggtcttttccgcaaggtcaatcatgcagtcgtaggcgtcacgggccatgttggactgcttcaactctacttccagggacttgattttccgctcgagctcatgaatacggtcatgaagctcctgttccgtctgacttagtttc

SEQ ID NO: 3859 - DNA, 169 bp, Unknown
  gut microbiota DNA sequence
ccagttctttcagttttccgcttccgaaaagagaagcaactccgcttgttatggctgtcgctgctgtggtggctgtcttctttagtttgtcagtgcgtatttctgattttacctgtttcagttcctgctctgcaagatttatctgttcttctttgtgccgtttggctgc

SEQ ID NO: 3860 - DNA, 123784 bp, Unknown
  gut microbiota DNA sequence
tgcaggtgtaaagctggagacagcaaagccgagcattactaattgcccgtcagctttccttatccgcgcggagcggatggaaaattcatcggaaaggatgatatatacgtttagcatgaatgaagtgctgaagttgcttgcttgtgagtcatgaatatataaaggtattcaggtgactattgcacgaaggttccacctcttcccattccgaacagaggaagttaagcttcgtcacgccgattggtactgcgcaagtgggagagtaggtagtcgccgttttaacagaagccctgaggcagaaacgcttcagggctttttttgtgtttgtacgtttctggataagttttggattcagtatacaataatgtaacctgagctgcttttagcgatatttcagacaatattcatgatgaatttagttgctttgaataaaaaagttgctatatttgggcggttttaaaaacctcatataaatgcagtaatctttaataaatataaattcatcatggaaaacaagattcaagagctaactgataaaatctaccgtgaaggggtggaaaaaggaaatgaggaagctcaacgccttgtgagcgaggctcaggctcaggcggaaaaactgattgaagatgcaaaaaagcaggctgagtctatattggctgaagcgaagaaatcagccgacgaattgaatgagaacactaaatcggaattgaaactttttgccggacaggctgtaaatgcattgaagacggaagtggcaaacttgctgacgaatcagactgtagaagaaacggtaaaaggatttactgccgacaaagagtttctttataaatttattttggcactggcagaaaaatggtcagcaaatgaaccgattgaaatttcggtgaaagatgcggacagtctgaaaaaatactttacagctaaggcaaaagctttgctggataaaggagtaactattaatcaggtgaacggaatgaagatgttattctctatttcgcctgcggatggttcctataaagtaaattttggagaggaagaatttgaaaactatttcaaggaattccttcgtcctcagttagttaaaatgttgttttaatccagtggcatgagcaactattattatctggtagctggtttgccgtctgtgtcattggacgatggcaaactgagttataccgttgaaaactttaaatctgaactttatccttctctgtctgataaagacaaaaagctgattgatttgttttacctgaaatttgataatataaatctgttgaaacttttaaaggacaaagatgcgggaattgatgaacgaggtaacttctcggcagaagaattgctgcttctgatagaggctgttcgccaaggagatgcttgcgagaaaaagttcccttcttacttgtatgatttcatcgctttgtatctacaaaattcaggtgaggagcatttcgtggctgaggaggcgctggcggctgcctattatgcgtatgccatgagatgtggaaatcgcttcataagccgttggtttgagtttagtctgaatgtgaacaatatcctctctgcttttattttgcgcaaatacaagatggaagtggctccccggattgtgggagacacggaagtgtgtgagcaactgagaacttcgaatgcccgtgatttcggattgggagaacagttggcttatatggaagaattgcagcgcattgcagaaatggaggaactggtggaacgtgaaaagaagacagacttgctggcctggaaatggctggaagatgagtcgttctttaattatttcacagtagagcgtttgttcgttttcctcttacagctggaaatgattgaacgatggatttcactggacaaagaaaaaggaaatgaactgttccgccagatgattcagcatctgaaggaagaggtacagattccggaagagtttagaaaatagtaaaaataaaatagaatggcaacaaaaggaactgttttaggcgtaatcgccaatatggttacattgacagtcgacggtccggtggcacagaatgaaatctgttacatctcgaccggaggtgaccgcctgatggccgaagtaatcaaggtggtaggaaagaatgtgtatgtgcaggtttttgaaagtacacgtggactgaaagtgggtgcggaagctgaatttacaggccacatgctggaagtgacattaggacctggcatgctttcgaagaattatgacgggttgcagaatgatctcgataaaatggagggagtatttctgaaacgtggtcagtatacttatccgctggacaaggaaaagaaatggctgttcaagcctattgtgaaagcgggtgatgaagtgggaccgtctgcctggctgggagaagtggaagaaaaccatcagccgttgaaaatcatggtaccgttccaattgcagggaacttataaagtaaagtccatagtagaggaaggagagtataccattgaagataccgtagctgtacttacagatgcagagggtaatgacatccctgtaaatatgattcagaaatggccggtgaagaaagccatgactaattataaggagaaaccgcgtccttacaaactgctggaaacgggtgtacgtgtgattgatacaatgaacccgattgtagaaggtggtacaggatttattccgggaccgtttggtacgggtaagacggtgcttcagcatgccatctccaaacaggcggaagctgacatcgtaattatcgcggcttgtggtgaacgtgccaatgaggtggtagaaatctttacagagttcccggaactggtcgacccgcatacaggacgtaagttgatggaacgtaccatcattgtggcaaatacttctaatatgccggttgcggctcgtgaagcatctgtgtataccgccatgacaatggccgagttctaccgtgccatgggattgaaagttttgctgatggccgactctacttcacgttgggcacaggctttgcgtgaaatgtctaaccgtatggaggaacttcctgggccggatgctttcccgatggatatttcggctattatttctaacttctatggtcgtgcaggatatgtacatctgaacaatggagcgacgggatctattacctttatcggtaccgtatcgcctgccggaggtaacttgaaggaaccggtgacagaaaatacgaagaaagtagcccgctgtttctatgcattggaacaggaacgtgcagaccgtaaacgttatccggctgtgaacccgattgattcttattctaagtatctggagtatcctgaatttgaagcgtatatcacagaacatatcaacgcagaatggacgggtaaggtgactgaactgaagactcgtctgttgcgtggtaaggaaattgccgaacagattaacatcttgggtgatgacggtgtgcctgtagaatatcacgtgattttctggaagtcagaactgattgactttgtcattttgcagcaggatgcctttgatgaagtggatgcggtgaccccgatggaacgtcaggaagaaatcgtgaatatggtaatcgacatttgccatacagatttcagctttgacaatttcgtagaagtaatggattacttcaagaagatgattaatatctgcaagcagatgaactatgcacagttccgttctccgcaatatgtggaattccagaaacagttgcaggagctggttgccgaaagaaaagtaaaataagtgaaatcaataaatgggtagaaaatggcgacaaaagcttttcaaaaaatatatacaaagattagccagataaccaaggctacctgttcgctgaaagcaacaggggttggttatgacgaactggctatggtgaacggcaagctggcgcaggtggtgaagattgccggagatgaagtgaccctgcaggtgtttgaaggtacggaaggtattccgaccaatgcagaggtggtattcttgggcaagtctcctacgctgaaagtgagtgaccagctggccggacgtttcttcaatgctttcggtgaaccgattgacgggggaccggaggtagaaggaactgaagtggaaattggtggtccgtcagtgaatccggtacgtcgtaaacaaccgtctgaactgattgctacgggtattgccggtatcgacttgaacaatacgctggtatccgggcagaagattccgttctttgcagaccctgaccaaccttttaaccaggtaatggcgaacgtagctctgcgtgcagagacagacaagattattctgggtggtatgggtatgacaaacgatgactacctctactttaagaatgtattctcgaatgcaggtgcgctggaccgtatcatcagctttgtgaatacgacagaaaacccgccggtagaacgtctgttgattccagatatggcattgactgcggctgaatattttgccgtagaacataaccagaaagtattggtactgctgaccgatatgacttcgtatgccgatgcgttggctattgtgtctaaccgtatggatcagattccttcgaaggattctatgccgggttctttgtattctgatttggctaaaatttacgaaaaagctgtacagttcccgagtggtggttctataactatcattgcggtgactactctttccggtggtgatattactcatgcagttccggataataccggttacatcacagaaggtcagctcttcctgcgtcgtgacagtgatataggtaaggtaattgtcgacccgttccgttcgttgtcacgtttgaaacagctggtaagtggtaagaagacacgtaaagatcatccgcaggtgatgaatgcggccgtacgtctgtatgccgatgcagcgaatgccaagacaaagatggaaaacggtttcgacctgaccaactacgacgaacgtgcgctggcctttgccaaggattatgccaaccagctgctggctattgatgtgaacttgaatacgacagaaatgttggatgtaacctggggcttgttcagcaaatacttcaagccggaagaagtgaacatcaagaaagagttcgtagatcagtattggaagaaataaatttataagactttaaaatggcaataaaatttcagtataacaagacctctttgcaacagcttgaaaagcagctgaaggtccgtgtgcgtacgctccctatcattaagaataaggagagtgccctgcgcatggaagtgaaacgctgcaaagaagaagctgccgaactggaggaacgactggaaacgcaaatctcgtcatacgagcacatgcatgccctttggaatgagtttgacgcttcattggtaagggtgaaagatgtgcatctgggtgtgcggaagattgcgggtgtccgggttccgttgctggatgaggtggagtttgatatccggccatttagtttgttctgtagcccgaagtggtatgccgacggtattcatctattgaaaaaacttgcccagactgccattgaaagagagtttgctcttgccaagctggatttgctggaacatgcacgtaagaaaacgactcagaaagtaaacctttttgagaaagtgcagattccgggttatcaggacgctttgcggaaaatcaaacgttttatggaagacgaggaaaacttgtcaaaatcctctcaaaagattttgaagtctatccaggagaaaagaaaggaggcggaagaatgattgcaaaaatgacaaaagttacttttttggtataccataaagagtatgattgctttttgaaaaatatccgtgacctgggagtggtacatgtagccaccaaagcacagggaggtgctgagaatgcggctttgcaggaaagcattcgtttgtctgcacgttatgctgcggctatcaaattgctgcagggcatggaaactgcttctgccgaagtgcgtgaaggagatgcagccaaaggagagcaagccttaaagcagaccgatgagttgctgcaacagtcacagcagcttacgcatcgtgtacaggctgccgagaaagaattggctgcgttggaaccgtggggtgattttgacccacaaaatatatcccgtttgcataaagctggctatcagacgagcttttatatttgctccgaaaagcagtttaagctggaatgggtagacttgtatcacgcaacggttatcaaccggattggctcgaagatgtattttgtcactgtgacaaaaggaatggtgctgccggaactggaagtagaaacggctaagttgccggatagttcactttcagccttgcaagcaaaggtggccgatttgaaagcacagcagacagctcttcaagaaaaattgaaagacttggctgcaacggtgatttcagatttgaaggctgcccagcatcaggtacattctcagattgagttttcgaaagtcgtactcagcacggatgctttggccgacaataaactgatgttgctggaaggatggattccttcggaacgtctgccggaaatgaccgaataccttcgtacacaggaggtatattatgaaacggctgctccgacaccggaggatgatgtgcctatcctgctggaaaacaaaggcttcttcagactgtttgagcctatcatgcgtctgtatatgctgccgaaatataatgaactggatttgacaccgttctttgctccgttctttatgttgtttttcggtctctgtctgggcgattccggttatggcttgttcatgttattggcggtaaccctgtatcgtctgtttgccaagaaactgagtgcctcaatgaagcccatcctgacattggtgcagattttaggagcttcgacaatggtttgtggtttactcacgggtacatgctttggatttaatctgtatgacattcaggttcctttcttccagacgttaaaggaaactatttcgctggacaaccagcaaatgttcaacctttctctgattttgggaggtgtgcagatcatttttggtatgatactgaaggcggtaaaccagactattcagtttggtgtgaagtatgcgattgcaactattggctggattctgattctggtcagtacggcagtagcttttgcagctcccggactgatggcaatgggaggaacagtacatctgatattattggctataggaggcttgatggcttatctgtataacagtcctgacaagaatatttttgtgaatatcggtttgggattgtgggatagctacaatatggctaccggtctgttaggtgatattctgtcgtatgtccgcctgtttgccttaggactttcaggtggcatcctggccagtgtgtttaacagtctggcggtaggtatgagcccggacaacgtgattgccggtccgattgtgatggtattgatctttgtcatcggccatgccatcaatatttttatgaacgtgttgggagctatggtacatccgatgcgtttgaccttcgtggaattcttcaagaatgccggatacgaaggaggaggaaaggaatataatcctttcaagaattaataaacaaagtattaaaaactaaaaaacaaataattatggaaatgaatcttttgattgcctatattggcatcgcaattatggtaggtttgtctggtattggtagtgcgtatggtgtaaccattgcaggtaacgcatctatcggtgcattgaaaaagaacgacagtgcatttggtaacttcttggtattgacagctcttcctggtactcagggtttgtatggatttgccggttactttatgttccagagtatttttggtgtactgactccggaaattaccggtattcaggcttgtgccgtattgggttcaggtattggcttgggcttggtagccttgttctcagctatccgtcagggacaagtttgtgctaatggtattgcagctatcggacagggacataacgtattcggtaatacattgattttggccgtattccctgaattgtatgcaatcgtagctttggctgctaccttcttgatgggatctgctttggcataatcttcagaattctttttaatttatctactttgccccgctgcacactctttgttagtgtacagcggggacttttttatatatgattctatggtggaatatgatttcgtatcgtattgaaaaagaaacatctctgtatcttttcgttactattggcaggcataaattagtgtagcaatacaaaactttccttttttttcttccgattaaatattttttgtatattcgcggctgatttagaagatattaatgagacgatgatgaaacagttactaacacctgattatattttcgaatccagttgggaagtatgtaataaagtgggtggcatatacactgtattgtctacaagagcaaaaaccttgcagaatactttccctgatcgaattttttttataggaccagatttctggtcgggtaaggaaaatccgttgtttgtggaagattcaaagcttcttcaggcatggagagagcatgcaatcaagaaagatgatttgaaagtacgcatagggcgttggaatattccaggtaagccgattgctattgtagtcgatttcactcctttctataaggataaaaatgagatatatactcaggcatggatcgattttcaagtagattccttgcatgcttatggagattatgatgaagcttctatgttctcgtatgctgcgggaaaagtagttgaaagcttttatcgttacaacctgacaatgagcgataaggtgatatatcaagctcatgaatggatgactggccttggcgcactatacttgcaaaaacacgttccggaaattgctacaatcttcactacacacgctactactatcgggcgttccattgcaggaaataacaaacctctctatgattacttgtttgcttataacggtgaccagatgtcccgtgaactgaatgtagagtcaaagcactctattgaaaagcagacagcccatcatgtagattgttttactacagtcagcgatattaccaacaatgaatgtaaggaattgttggacaaagaggcggacgtggtcctgatgaatggttttgaagatgatttcgttcccaaaggagaagagtttgaaaagaaaagaaaatatgcccgtgctttgttgctgaatttggctaacaagttgctgggtactcatttgggcgatgatacgctgattgtaggaacaagcggtcgttatgaattcaaaaataagggtataaacgtgtatttggaagcgttaaaccgtttgacacgtaaaaagagcctgaaccgtgaagtcgtggcttttgtcaatgtgccaggatgggtaggcgatgcccgtgaagacttgaaacaacgtttggaaagcaatgaagattacaatacaccgctggaatgtccttttattacgcactggttgcataatatgagccatgaccaggtgttggatatgttgaagtatttgaacatgtctaactctccagagtcaaaagtaaaggttatatttgtgccttgctatctggatggcaacgacggaatattgaatgaaacctattatgatttgattataggggcagatttgagcgtatatccgtcatattatgagccatggggctatactccattggaaagtgtggcattcaaggtgcctgccattacgacggatctggcaggatttggcttgtgggtaaattcattgaaaggtcatcccggtacattggaagacggtgtaaaagttattcatcgtaccgactacaattattcggaagtggcagatgtaattcgtgatacgattaccgaatttgctaagttaccggaatctgaagtacagataattcggaaaaatgcggctgacattgccgaaaaggctttgtggaaacattttatacgctattattatgaagcatacgacgtagctttgcgcaatgcaaaagaacgttgcaaatcttataaacaaaaatgaacttataaaacattagtgatatgaaaatcaaaacaaactatgctaatactcctgtttggagagaaattaatgtgaaatctcgcataccggaatctttgaagatgctggaagtgatggctcgtaacatttggtgggcatggaatgatgatgctactgaaatgtttagagaacttgacccggaattgtggcgtgctgtcggacagaaccctgtggctttgctggaacgtcttaactacgaaaagctggaagctctgtctgtagataaagaaatgttgggtaagattaatgcaatctatgatagatttactgaatatatgtctgtaaaaccagacaaaaaccgtccgtctgtagcttatttctgtatggaatacggtttgactcatgtactgaagatttattctggtggtctgggtatcttggccggtgactacctgaaagaagcttcagacagtaatgtggatatgtgcggtatcggtttcttgtaccgttacggctacttcacacagagcctttcaatggacggtcagcagattgctaactatgaagctcagaacttcggaagccttcctttggaacgcgtgaaggatgaaaacgaccagccgatggtattggatgtaccttatttgaactattatgtacatgcatacgtatggagagtcaatgtaggtcgtgtgcctttgtatctgttggatacagacaatgaaatgaacagcgaattcgaccgttctattactcaccagctgtatggtggtgattgggaaaaccgcttgaaacaggaaatcttgttgggtatcggtggtgtgctgttgctgaagaaactgggtatcaagaaagatgtatatcactgcaacgaaggacatgcggcattgtgtaatgtacagcgtctgtgtgactacgtagaaagcggaatgtcatttgacgaagcattggaagtggttcgtgcttcttctctgtatactgtacatactccggttccggctggacatgactatttcgatgaaggactgttcggtaagtacatgggcggttatccgcagcgtatgggaatcagctggcaggatttgatggacttgggacgtatcaatccgggtgatccgaacgaacgtttctgtatgtctacatttgcttgcaacacttgtcaggaagtgaacggtgtaagctggttgcacggaaaggtttctcaggaaatgttctctggaatctggaagggctatttccctgaagaaaaccacgtaggttatgtaactaacggtgtacatttccccacttggtgtgcttctgaatggaaagctttgtataataaatactttgacaagaacttcatgcacgaccagtcaaatccgaaaatctgggaacgtatctacaacgtgcctgatgaagaaatttggaagactcgtgtggctttgaagaacaaactgattaactacatccgcgatcagttccgtgatacatggttgaagaaccagagagacccgtcacgtgtggtatctttgatggataagattaacccgaatgccttgctgattggttttgctcgtcgttttgctacttacaagcgtgcacacttgttgttcactgacttggatcgtttggctaagattgtaaacaatcctgactatccggttcagttcttgtttgctggtaaagctcacccgcacgatggagcaggtcagggattgattaagaaaattattgaaatctctaaccgtccggaattcttaggaaagattattttcctggaaaactacgatatgaagctggctcgtcgcctggtatctggtgtagatatctggatgaacactccgactcgtccgttggaagcatctggtacatcaggtgaaaaagccttgatgaatggtgtggttaacttctctgtattggatggatggtggctggaaggttaccgtgaaggtgctggatgggcattgactgaaaaacgtacttaccagaaccaggaacatcaggatcagctggatgctgctactatctacagtatcctggaaacagaaatcctgccgttgtattatgcaagaaacaagaaaggatattctgaaggctggataaagactattaagaactctatcgctcaggttgctcctcattataccatgaaacgtcagttggatgattacttcgctaagttctatggtaaggaagctgaacgtttccacgcgcttgaagcaaacaactacgaacaagtgaagaaactggctgcatggaaggaagaagtagctgctaaatgggatgaaattcaggttgtttcattcaacaagtgccaggatttgtgcaacggtaacgtagaaagcggtaaagactacaagcttacttgcgtggtagatgaaaaaggcttggacgatgcaatcggtatcgaacaggtggttacttataccaatgcagaaggccgtgaatacatttatgcggttaacccgatgaagatggtgaaacgtgaaggcaacttgtttactttcgaaatgattgcaggtttgtcaaatgcgggtagctttaaggtagcttaccgtatgttcccgaagaacgatgcactgcctcaccgtcaggatttctgctatgtacgctggtttaatgaataaagacctctgtctgttcagataatcatataaacaggccattccggataattttgatatccggaatggcttgttttgttttcaaaaactatatgccatgaaaatattaatcgttgaagatgatgcagacttgcgggaaattaccacccgttcgttggagaaagaacgttatgtcgtgtcgcaggcaccagattataaaacggcacttcgtaaaatagaggattacgactacgattgcatattgctggatataatgttgccggatggttccggacttgatttactggaagaattgcatgcgttgggaaaacggaccaatgtcattatactgtcggccaaggattctttggaagacaaagtcaaaggattggatttaggagcggatgattatctccctaagccttatcatttggccgagctccatgcgcgattgaagagtctgttccgtcgtaaccagcgggaaggagagaagaaggtaagctatggcaatgtagaagtcatcccagaccattttaaggttgcagtaggagggaaggaactggacctgaaccggaaagaatacgatattctgctgtattttatgctgcgtcccggaagattggtaaacaaaaccacactggctgaatctgtatggggagaccatattgaccaggtagataattttgactttatctatgcacaaatcaagaatctgcgcaaacacctgaaagaagccggtgctacggtggagttgaaagcagtgtatggtataggttataaactggtagaagaatgaaactgtttcagttggttatgtggcgtatgtccaccatcttagtggtcatactgacgtgttgggcagtattgttttatctggccattatggaggaggtgaacgacgaagtggatgattccttgagcgattattccgagtcgttgattatccgttccctgtcgggagaacagatgcctgatacaagcaacggctcgaacaatcagtattttctgtatgaggtcacgccggaatatgcagcctcctatcctaatatatcctatcgggacgaaatggtatatattaccgaaaaaggagagacggaacctgctagaatattaatgaccattttccaaaaggaggatgggggatacatggagctggtggtctatactcctaccattgagaaattcgaccttcagcgtgccgttttagggtggattgtctttctttatgtgttgctgttcctgatgattttagcggttaatgcctgggtgttccatcgcaatatgcggccactttatactttgttgaaatggctggaagattatcgtttgggaacgaaggaaaaaccgctcgatgaatcacttcggattgtggaattccggaaactgaatgaggcggccaatatgttctcagaacgcagtgagaaactctatgagcagcagaaactgtttatcggaaatgcctcacatgagatgcagacaccgctggctatttgccgcaaccgcctggaaatgctgatggaggatgaaacattgaccgagaaacaactctccgaactgatgaaaacccatcggacacttgaaaatctgacacgcctgaataagtcgctgttactattgtgcaagatagagaaccgtcagtttacggatgtaaaatctttgtgcctgaatgaactgcttttgcagtatctggatgattacaaggaggtatatgcctatcgtcatgtgcaagtggaagtgcacgtagaagaatgttttcgtttggaaatgagtgagtcgctggctatcgtcctgctgaccaatctgctgaaaaatgcgtttgtgcatgtgacggaggggggagtgatttctctttctttcacggcttcctctttccgtatcagcaataccggagatgcttcattggataagaaccgtatttttgaacgtttctataaagaaggaaaggccgagggctctacaggacttggactggccttggtagactccatctgtaaggcctatcatctcactctttcatatacctttgaagacgggcagcatattttttctattgtttcttgatttttttgtcgaaaaaggggaaatcttcagattcttttcagaattacatcccatttttgcagtacaaataaatcattaaagtattcatcttataaaaatagaacattatgaaaaagttagtttttttactggtatgtgtgtttacagtgtcaaccgtggcaatggcagataacgaaaaaccgattcaggtaggacagttgcctacgaaggcacagactttcatcactacttactttaaaggacataaagtagctttggcaaaattggacagcgatttattcagcaaatcatacgatgtgattttcaccaacggcgaaaagattgagtttgacaagtctggcgactggacagaagtgaaatgcaaatccggcgtaccgactcagattgttccatcagctatccgcacgtatgtgaagaataattaccctgacgcttccatcattcagatagagcgcaaacgcaatgaatatgaagtgaaattgtctaatagatgggagattaccttcgacagccagatgcgtgtaattgatattgacgattaagttggttatatccttcgggaaactgtagcccgttcctttttcagaaaaaaggggcgggctatgtgtttttatgtgggatgagttgatgggttgagtggggcgagactgatacacaatggcttggcgattcgcagtactttctaaggaggattgcagtacttctttgaaagtactgtagtacttccacggaagtactgggaaaacgtagttgctttttccttgcagactgatcattcttttcccactttatcggtagagcctgccttttcgtagttttttacatcttatccggtaaatattccatttcctgccctgtttgttttttgttattttgcatccgtaatacaatataacaaaaaaatatcatgaaaaatacactcatcgcctggttgttctgtcttccttttgcttcgtgtacaagtcctgttacacagatggatctttccggacagtggacggtatgtctggatagtactgatgtggggatggacgcttcttttggcggaaaattgtttgatacctccattacgcttccgggtacaacggatgaggctcgtctgggcactaaatgcacattgaaacctgcattggaaaaaccgcagctgctccatcttacccgtgcctacagttatgtaggtccggcctggtattcacgcgagattcaggtaccttccgactggaaagaaaaagattgtatccttcatctggaacgtgtattatgggatacacaagtatggatagacggacagaaagtagaaggtcatgaagaaagtctgacgactccgcatgaatatgacttgactccttatattcagcttgggaaaaaacaggtactgactgtcagagtggacaaccgcaagcgctatgatatgtcggtgaatgatctggcacatgcctatacagatgccactcaggtgaagtggaatggtatcttaggcgacatgtacatcaaggctgtggagaaaacacgcgtagaaagtctgcagctttatccggatgctgcttcacgtatagtaaaggctgtagtttctgtatataattcatcttcacagactgcaccggttaatcttagcctgcaggtaaaaggaaaggatgatggcaaatcgtacgcttctgtcgaagctcaagcagaagctgtgaaaggttattcaacggtagaactgacctgccaattaggggataatgctcctctgtgggatgaattcaatccttatctttacgatgcttctgtaaaattagtatccggaaaatcgacttcacttacaaccgaaactttcggattgcgtgatatacggcatgaaggaaacaaactggtgatgaatgaaaaaccgatattccttcgtggtacattggagtgctgcatttttcctttgacaggaacacctcctactgatgaggcttcgtgggaaaaactttatgcttctgcacgcgaatatggaatgaatcatctccgtttccactcctggtgtccgccggaagcagcgttcaatgtagctgatgagatgggattttatgtacaggtagagcttccggtatggagtgtgacgcttggaaaagattctgctacggtcgagttcctgcgtgccgaggcaaagcgtataagtaaggaatatggcaaccatccttctttctgcttctggagcatcggaaacgagctgcagtatgatttcaatattttggcatccatgttgggtgaaatgaaggctgcagacgaccgtcatttatataccaccacttcgtttacatttgaaaaaggtcacggcgactggccggaaaaccaggatgatttcttcgtcactcagtggaccaagaaaggatgggtacgtggacagggagtattcaatcaggaactgccgtcatttgataaagatttccgtgcatctatagacggtatggaagtgcctttggtgacccatgaagtaggacagtattctgtctatccggatcttacggaaattcctaaatatacgggaactttgatgccgctgaatttcatggcagtgaaagaagacttggagaaaaaaggattgatagacaaagctcctgagtacctgcaggcttccggaaaattggctgccattctttataaagaagaaatagaacgtgctttgaaaacaccgggcatcagcggattccagttgctcgacctgcacgattttccgggacagggaacggcactggtaggactgctcaatgcattctgggaaagcaaaggcattcttactggtgaagaattccgtgaattctgcgcaccggtagttccgttgctgcgttttccgaaagctgtatatacgaataatgaaacattcgaagcacaaatagaactttgtaattacggaaaggatgagttgaagaacagcactctttcctgggagattaccgcagacggacgttcgttgggcaagggaaagactccggcagctgcattggctttcggtcataacggtggactgggaaaaatttcatttccgttgcagcaggtaaccaacgcttcgaaattagaagtttgcttgtcgcttgacggaacagaataccgtaaccgctggaacgtatgggtttatccgtcatctgtagacacaaaatggggagacgtgaaatacacccgcagttacgacgaagcaatggtgttgctcaagaaaggtgagaaagtattgttcaatcctgactggcgcacacttcaaggcattgaaggaaagtttgtgcctgtattctggagtccggtacatttcccgaatcaggctggtaccatgggtgtactttgtaaccccactcatccggctttggctgacttcccgaccgacatgcataccgactggcaatggtgggatttgaatatcaattcgactaccttggtagtagacagccttcagggaggtgctcctgtggtagagatggtagacaattttgttcacaaccgtcgcctgacttccttgtatgaaggacgtgtaggagaaggaaaactgatgctggccacttttgatttgcagaccgctcttgacaaacgtccggtagcccgtcagatgctttactctatcctgaactacatgaacagcgaggaatttgctcccactcagttggaaggactggataagataaaagatatgtttggaaccgcacgtaaccagaaacagtcagctaagggtatttactaatgaaaaatctattataaccgtataaccatgaaaaatcatcaattgtttatctattttatttgcctggtgtctgccatgggaggacttctcttcgggtacgactgggtagtgataggaggtgcaaaacctttctatgaagaatattttcatattgccggcgatgagggcatgcaggcattgaccatgagtatcgccttgttgggatgtctgttgggggctactatggcaggtttcttggccgaccgttatggacgcaagaagctgctggtattatcagcttttatcttttttgcttcttcgtgggccacaggagctgctacggctattcctgcctttatcatcgctcgtcttgtaggagggatggccatcggactggcagccgacctttctccgatgtacatcgcggaagtggcacctactcagattcgtggtaaactcgtcacattgaaccagctgaccatcgtattgggaattcttggcgcacagattgtaaatatgctgattgcagagccggtgccggaaggtgctacggcggccgatatcttgaactcatggaacggacagaccggatggcgctggatgttttgggccgtatgcgttccttcgggactctttttcctgttggcattgtttattccagaaagcccgcgctggctggccagcatgaagcagatggagaaagctagaaaagtgctgtgttccattggaggaacagcgtatgcagacagtgaaattgaaaattatactcgtgcaggtgctgcttcacatgccgaaaaaggtgtattgtccttgctcttctcttctaaaatgcggaatgtactgattatcggtattgtggtagccatgttccagcagtggagcggtaccaatgtcatcttcaactatgcgcaggaaatctttcaggcagcaggctatggcatatcagatgtactgatgaatattgtcgtgacaggtattgccaatctggtctttacgtttgtggctatctataccgtcgaccgcctgggaagaaagacgttgatgctgactggttctatcggtttggcaggcatctataccctgttgggcttaagctatttctttgagttcaaaggcttcatcatgattgtgtttgtggtattggccatcggattctatgccatgtcgttagggcctgttacctgggtgttgctttccgaaatattccccaataaggtgcgtggggtagccatggcagtatgtacggctgcgttgtggattgcttccttcctgcttacctacacattccctttcctgaattccggactgggcactggcggtaccttcctgctttacgccgttatctgtttctgcggattcctgtttgtatggcgccgtattccggaaaccaaaggaaaatcgttggaggaattggagaaagaattgattaaataaacagatggaagaataatacatcttttccgctttttattccatttttcaggtacatagttttaccgaattttgtaccagaaaaacattgagaaaacaatctaacttatcatggaaaaaataacagaatatttgattcaaagcacggtaaatacttccgaagtgaaggcttgggaagagatcgtgatgttgccgacgtatggcataggtaaagaagaaaaaaatccgatttttcttgaaaagcgtgtgtatcagggaagctctggttcggtatatccttatccggtaattgaaaagattgaagatgaaaaacacgaccgtccctggagagctttctttatagagaatgaatacatcaagctgatgattcttccggaattgggcggacgtatccagatggcatacgacaaggtgaagaaacgtcatttcgtatattataatcaggttatcaagccggcattggtggggctgaccgggccgtggatttcaggtggtatcgagttcaactggccgcagcaccatcgccccagtacatatcttccgaccgactgtatgattgaagaatttcctgatggaagcaagaccatctggtgtagtgaggtagaacgtatgttccgtacaaaaggtatggcgggctttaccctctatccgggaaaagcttacatcgaaatcaaggcaaaggtgtacaaccgtactccgttcccgcagactttcttgtggtgggctaatccggcagtagtagtgaacaaagactattattcagtgttcccgcctgatgtcaatgcggtgttcgaccatggaaaacgtgccgtatccagcttccctatagccacaggtgaatattataaagtggattattctgctggagtagatatttcacgttacaaaaatattccggtgccgacttcttacatggccatcaattcgaaatttgattttgtgggaggctatgaagaacatatcgaatcgggtcttcttcatgtggccgatcatcatgtaaatgccggtaagaaacaatggacctggggacatggtgacttcggacaggcctgggaccgcaacctgacggatgaagacggaccatacatcgaattgatgaccggtatgtactgcgataaccagccagactttacctggttgcagccatacgaagaaaaatcatgggtacaatatttcatgccttatcagaaagtaggtatggtgaagaatgctacgcgtgatgcgctgattaatatgattcctgaagaaggtggtaagatgaaggttatcctttatactacagctgctcacaaggaagttcgcgtaatgcttacaaatacagaaaacggtaagatttatcttgatgcgcttacagcagtggcaccggataattcatatatcaatactgtagactgtgacactcagaaaatggaagaactgaaacttacagttcttgatgaaaagggtaaggtacttgtaagctatcaggctgcaaaaccagaaatcaaacctattccggaaccggctaaggcggcactcgatccgaagaagattgccagcatggagcagcttttcctgacaggtcatcacctggaacagtatcgtcatgctacttacctgccgatggattactacatggaggctctgagccgcgatgaaagcgacatccgttgtaataatgccgtagggttgctcctcatgcgccgcggacgctttgcggaagcacagaaatatttcgaccgtgctatcaagacacagacagaacgtaatccgaacccatacgaaggagaaccttactataatttaggctggagcaagaaaatgcaaggcgatatagacggggcatacgatgctttcttcaaggctacctggaatgccgcatggcaagattctggctacatgggcctggcacagatagacatgattcgtgaagactatacaaacggacttgaccatattgaccgttcgttgtatcgcaactggctgaaccataaaggacgtcagctgaaggtttccttcttgcgtaagactggtgattttgcgaaggctgaggcgcttatcaatgactctttggcgatggataagttcaatatgggatgccgtttcgaatcttatctgattcatacattgcagggaaatactgaagcagccgctgccgcaaaggctgaaatgaaagctttgatgcgcggtgccgtacacagctatttggaatatgccatcgactatgcatcggcaggtatgtatgaagaagctgctcagctgttgtcttttgtaacagaagaaaatgaagccacttatccgatggtatattatgcattgggttatttcgcttccaagatgggtaagaaagacgaagcgctgaatctgtacaagaaagctgaaaccatgtgtccggactactgcttcccgaacaagctggaagaagtgctgatgctgaacgatgcgatgtcgcttaatccggaaggagctaaggcaccttattacttgggtaacttccactatgcagctcgtatttacgatgaagctattgcttgctgggaaaaatcagcatctatcgatgatacgtatcctacagtattgcgtaacctgtcattggcttattacaacaaacagcataatccgcagaaggcattggctacactggaaaaagcgtacaatttggatactaccgatgcacgtattctgatggagctcgaccagctttacaagaaacttcgctatccgcaccgccagcgcttggacttcctggaagcacatgctgacgtggtagaacagcgtgacgacttgtgtattgaacgaattacgctctataaccagttgggtgaataccagaaagcatacgatttgattaattcccgtaagttccatccgtgggagggaggtgaaggaaaagtcaccagtcagtatttactctgccgtgtggaactggctaagattgccatccgtgaggggcgttttgccgatgcggtccgcttgttgaaggaaacagaaaaatatccggataatttgggcgaaggcaaactgtctatggccgaagagaacgacatccactattggatgggatgtgcttacgagggtcttggcgaagaagcgttggctaaggaatactttacaaaagctaccaaggggtctgctgaacctgccatcgccttcttctataacgatcagcagcccgacaagattttctatcagggactggcatggcgtaagctgggtgaagaagacaaggcacgcagtcgctttaaccgcctgatcaagcatggtgaaaagcatctgttcgataaggtgaagattgactacttcgcagtatcacttcccgacttgctgatttgggacgacgacctgaacgtacgcaaccagattcactgcaacctggtgatgggtatgggctatctcggattgggtgacaaggaacaggctcgcaaattcctgtctgaagtagctcgtctggacatcaaccatcaggccggaaagcaacttctggaaatgtgtggataaggctatgtgctcactttttacagtatccatcctcttaagaaaatacatgtaaaaagtaaaaaagtacatttctaagaatggtttgatttatttcctttgtaagacaaattaagaactataaaacttttagttattaacctttatttatctataatatgaaacatgtttgttcagcacttttgtttgtaatgtttggttgtatgcctatgtatggtcaatcattggggcagaccgtaaagtgggattccaaaagcttattgtttgatgggaaacgcgtggttcctgtgatgggtgaaatacattattcacgtatacctgagaatgaatggcgtcaggaactgcaaaagatgaaggctggaggagtaacgatgatagccaactatgtattttggaatcacgtcgaggaaaaagaaggagtttttgattggagtaaacaacgttcgttgcggcattttctggaattgtgtaaggatgagaacttgcctgtagtgctgcgtatcggtcctttctgccatggagaagttcgttgtggcggtataccggactggatactggagaagaatgtggagttgagaagtgaggaccctaaatttttacattatgtcaagttgctttatcggcagatttttactcaagttcaagggcttttgtggaaggatggtgggccggtagtggcttgtcagtttgataatgagtatggaggtgaaggctcctatttgatggctttgaaacatatcgctcaagaaataggttttgatttaccgttttatacgcgtacaggctggccggaattgaaaactcctattccatacggtgagatgattccactttatggagattatgcggatggtttttgggatcgctgcattaaagaaactgcaggagattattggaaagcatttaacttcaaaccgtttcgttcctcttctgccatcgccagtgagcagttgaaagaggggaacggacggattacaaagggggatgaattgtatcctttttttacttgtgaattaggaggagggatgatgactagttaccatcgtcgggtgtatgtctatcctcaggatgcttattctcttgccattgtaaaactggggtctggctcaaatctcttgggatattatatgtatcatgggggaaccaatccggaaggtcacgcttatctgaatgagatgcagcgcacgccttatacaaactggaatgatcttccggttaagacttatgattttcaagctcctttgggagagttcggacagaaaaaccctcattattatattttacgcaaacttcatttgtttatgcatgactatggcgagactttggcctctatggatgcgtctttcccacaggctgacaagcctcaaacaaagggaatagacagttatttgcgttggagttatcgtcaaaaggataatagtgcgtttgtttttgtcaataattatgagcgcttgcaaaatataaccgataaaaaaggtgtacagtttgaggtgtgtggtgtgaaatttcctcaaaaaaaatgatcgttcctgcgggtacctgttgtatttttccagttaacattgacggtatacaatatgcgactgctcagattgtagccaagcgggatggaaagatttatcttgaacaaatagcgggcatccccactgaaatagcagtggatggaaaggtattgcgcaatgtgagggcaaaagggcttgtttcaccgatatataggaatatttatttgcttacttccgctgaggctgaaaacttgtttttgccggaagaagaaaagtatcgagtacaatcttccataccagtttcgtttcataaaaaacaggatgccggtctacttcgtaaaatcactatcggtgtggcgggtgtagctgaagaaccagttgatgccgattttgaacaagctgcaatttatcggatagatgttccttcagaaaaaggattgctgtccatcaaataccagggagactgtgcccgtctttacgcagatggcaagttgttggctgataatttctacaatggccgtgagtttttgtatgggctatggcgcttgcctcagggtgtcaaacagttggaattacgtattctgcctatgcaggccgatgaaccagtctattttccgcgcgaggcggataccacaccgggcgaaaaggtcattgcctgtgtattgtatgactaaaaacaggaaaatgttatagtgatattatctatattgttcaactctttaaattttaaatgcaatgagaaatacaattcagaatttcgcatgtaattcatggtctaagcggctgggattgtatgtttgttttctactattgatggtgggaacaatttgggcacaaaaccaaaccattaagggaacagtgcttgatgcaaacggggagtctattattggggctagtgtacttcagaagggcactactaacgggactattactgactttgagggaggttttatcttgaataatgtgccttcagatgctacgattgagattagttttgtgggatataaaacacaaacgattccggtaaatggtcgttccacattcaatatcgtgttgaaggaagacaatgaaatcttggatgaagtggtggttattggctatggagtgcagaagaaagcggatttgacagggtcagttgctaacgtaaacgcggacaaacttaacacacagagtaatgccaatatcggtcaagcgttgcaaggaaagattgccggtgtggatatcgtttcacaaggtggtttgcctggacaaggtacacgaatcatggttcgtggtatcggaacgttgaataacgcttctcctttgtatattgtggatgggatgtatatgaccagtatagatcatattaatccggcagatatagaaagcatagatgtgttgaaggatgcttcatctgctgctatttacggttcgcgtgccgccaatggagtggttatcgtcaccacaaagagcgggctgaacacagaaggagcacctatcattgatttctcagcgaatttaggagtgaacatgccttccaagtatctggatttgctgaatgccgaggaatgggcttctgtaacgactaaatcgcgtgaggcggccggactacctcctttggagatggctcaggatttggctaataaggaagacaatgactggcaagacatcatgttcaatcctgcgctgatgcagaactataatctttcggtaaaaggtggtggaaaatattccacttattataccagtgtgggatacaccaatcaggacgggactatgaaaggtacaaattaccagcgttatactttgcagagcaagctggatttgaaaaaaggtatctttcaggcaggaacgaacattgtgtttacctatgaccagaacaaaccgttgttgagtgatattcgtggtggtatggtgggacaaactatccagtctataccgacactggctcagtatgattctgataatgcaggcggatacggcggaacgtatggggatgtgtttaacttgtatcatccgttagggatggccgatgacaacttgatgaagcgccaggaagataatacgaaagtgtttctgaatgcatacgcttcaattgaaccgattaaagggttgaagtacaaaatcaatattacacctgattttcagttttatcgctataataaccataccgaagaatatgattttggtttgaatacaaaagattttacagagactactgaaactcaaactcgtacgcgtaatgtgttagttgagaatttgctgactttcgaccgtacgtttgatgtgcataagatttctgtgctggctggctacacttatcaggatacacgttatcgttatctgagtggaggcggacggaatatgcccgctggaataagtgagattgatgcttctgctgatggaatgagtgttaaggggaatagtacacgttctgtgatgacttctattttaggacgtgtgttttattcttataaagaccgttatttgtttacggctactattcgtagggacggttcgtctaagtttggaagtaataaccgttacgggaatttcccatctgtgtctgtcggttggaatatggctgaagaaagttttattaaaaacaagttaagttggttggaccagttaaagattagaggaggatatggtgtattgggaaatcaggaaattgatgattatcagtatacatctgtcgtgactactggtattaactatccagatggagacggtgaattgttggttggggttttcccgaaaaattttgctagcctagatatccgctgggaggaaacggctatgacaaatgtcggtattgattttatggcttttaggaatcggttgagtcttactgttgactggtatgttaagaatacaaaagatatcttattatctgttccaattcctatttcgacaggtggggctaacgatcccgtacgtaatgctggtaagattcgtaataaaggttttgaattcaatattggatggaacgatcgtattaataatgatttttcatatagtgcgaactttatcggttcatttaatagaaatgaggtgattaatatggggacagactcacaggttattacaggtggtactattcatggaggtacatggactacacgtactttggcaggatacccgattgcaggtttctggcttattccatgtgacggatatttcaatagtgtggaagaagtgaatgcgcatcagaaagatggagtattgattcaaccgagcgcacaacccggtgatattcgattcaaggataccaataatgatggaagtatcaccgatgatgaccgtgtctattgtggaagtcctttcccggactttactttctccataaacggcaatgtgacgtataaaaactgggatttggctgtgactttccaaggagtattgggcaacaagatatataatgccactcgcttggaactggaagatgtgacaagaggcggtaactatatgagtacagtattggattactggactccggaaaacccgaatgcttctgtgccccgtctgacttggaatgatacgaatcgaaatgcgcgttctgagtctgaccgttttttagaagacggatcttatttccgtatgcgtagtttgcagatagggtatactttcccgaaaaaatggttcaaaggatttgtagagaaggctcgtgtgtatgtcagtggagataatttgtttactattacgtcttacacaggctattctcccgacgtgaactctactaatatgtatagtcgtggtttcgatgagtttatttatccgaacagtcgtacatttatgatgggtattaatgttaccttttaaatgagaagagtattcattccgatacgacaaatgtattactttaaagaaaaaaatatgaaacgaattaatagtttactttatatgggattgatgggcatcgtgttgttgtcttcttgtgatgcacagttggatcaggtcaatccgaatgctgctactgaagaaactttctggcaaaatgaagcagactttgaaaaggctttagtgtcttgttacactccgttaaaaaatgcgctgaatggagggtactatgggacacgtggtgtgatgatgcgtattgcacgtgccgatgaagtagaatttcgaaatgatattagtgaagtgtatcaggcatgttattttacgaactcgaatggaaattccttgtcgcaaggtatgttctatcagttctacaatgccttgtatcgcacgaactccattttgcagagactggaagaaaaacaggaaatattgtccgctgactttatagacaaggtaaaaggagaatgcttgtttatccgtggcttttatttgtttcagttggccaaggagtttaaggacgtgcctttacgtttgacggcatcccagtctccctctaccttccctttggctaaatctacccaacaggaggtatggaaccaggcattggtggatttggatgcagccgcttcctttttgccgattcagccgacaggaaaaggaaaaccgagtaaaggtgcggcttatgctacgatggggaagatttatttatatatggaggaatatgataaagctatcaaggtgttggaaccattgacccactcgccttatacatataaactggtggattttgcttggaactttgatgaggcacacgagaacaatgaggagagtatttttgaactgttgatagaccaagtcggagggacggatgtctggggagacggggagaatattaattccactcagacaaacagtcgtccggtagaatatgctgctgaggaagttggaggttggtttgaagcccaacccactcagcagatgatggatatattcctgaaagaacgtgacaaggacgggaactatgattatcgcgcacgtatgagtgtggcatgggattatccagaatgtatgtattatttgcgtccgttccgcgatgtgtttcctaaagcggattggaatacgtattggatattgaaatatcagaattggaatacgatggaacgggaaccggctagtggtatgtcaagcattaatgagcgtgcaatccgttatgcggaagttcttttacagttggccgagtgttatttgttcagtccgacacagaaagatttggtaaagtctgtctcctatatcaatgagatacgtcggcgggctaatctgaatgattacagcggagctatgacagaaaatgctatttttgaggacttggaacatcagcgtgctattgagttttttgtggaaggggaacgtttttacgacttgcgccgctgggggctgttagaggaacgcttgaagacttgtaatcctgtacgttattcgcagtttatgacgggtgtagtgaatggtacgaaccgttattattattatcctattcctgcaaaggagttggagacaaatgatttgtgtacaccaagtgaaggatggtgattcaggggcaaattgttcgataatatttaaaaaaagaagggatgagtttttctcatccctttttcttcatccgatattctttaggtgacatgtgcatgtatttggtgaatacttttgaaaaataatacggatcattaaaggcgagttcaaaagctatttcttttgctttcttgtcggtaaagtccaagagctggcatgccttctgaattttcaactgattgaaatagttgatgggagacatacccgatttttgtgtaaagagtgtactcagataagtaggtgagtagttcacgcttttggccatgtcttccagtgtcagttgcttgtccagattagccttcatgtagttgatgactttctgtatggtatcttgtgttttgggcttgttgatttcgcggaactgaggaatgtaccggaaggagccgagcaggtaccataggcagagcgtgatgtactctaagttttcaatgctgtatcccatttcaaggtttactaaaatctcattgaacaactggatgcggtcgttgaaacgggccgtaggcgaatcgtcaatgtagatggtacggttgaacagctcggaaaacaggtggctttgttcaccggtaaaatgaatccagtaaatgctccacggatggctggtagaagcggcgtatacatgcggtgtacccgcttcgataatgaagaaatcgttcttttttaccgtgcatcttccttttccgatattgtaccagccttctccttcgtggcagtaaatcagaatgtgctgcgggcttccttctgcacgttcccggtagtgaccttccgcatgcggatagtagccaacatctgtgggatgcagcagacgagtcatggggttttcttttattttcaaaagattctcttgaggaatgacgatggctttctcattggggaatccgtctttcttcttttccatagtgtatttgtttgtgaggacaaatgtaggtatttatttggattttagtggagacttcctgaagagatttctcctttcagaaagataaaacttaaaatcgaaaaatattacatccttttgcgaaaataccacattcggagatggtggtttatgcgtaattttgtcatctgtgaaatggtttgtaaactcaaaatttgataatatgaaagcagcagcattactctcattttctttgctttgtttttcttgcagtcagcagactgacaagattgatctgtctggctcatggacgttctctacggacagtatggactggagccgggtgattgaactgccgggatcaatggcttccaacggtttgggggaagatattgccgtggggactgattggacaggcggtattgtagattcttcctatttctttaaaccttcgtatgccaaataccgtgaggctggaaatatcaaggtgcctttttggcttcaaccggtaaaatattacaaaggtaaggcgtggtatcagaaagaagtggtgattccggacagttgggaaggaaaggatatttctctctttctggaacgctgccactgggaaagccgtttgtatgtagacggaaaggaaatcggtatgcggaatgccctgggtgctcctcaccgttatgacctgacaggcaagctttcagctggaaagcatgtgttgatgctgtgtgtggataaccgggtgaagaacatcgatccgggggagaactcacacagcatttccgaccatacgcaaggaaactggaatggggtagtgggtgacatgttcttagaggtaaaaccggaagtaaatgtgtcttctgtcaagattatgccggagcgtctggccaagaaagtcagtgtgtcggcttccttgatgaaccgttatgagaaagaaacgagtgtggtactcgaaatgacggtaggcaatgaaaaagtacagcaacagtctaccttgaagccgggcaagaatcaggtggtgatgtcgctggccatgaagggagatattaagtgctgggatgagttttctccatccttatatgatttgaagctgagtgtgaaggatgcagagagcggtgaaacggatgtctatacggaacgctttggtttccgcgatgtgaaggtcgtagacggaaaattgaccattaacgaccgccgtttgttcctgcgtggtacgctggattgtgccgtattcccgaagaccggtttcccacctacggatgtagagtcctggaaaaagatttataccacctgccagcaacacggattgaatcacgtgcgtttccattcctggtgtccgccggaagctgcttttgcggctgccgatgagatgggtatgtacctggagatagaatgttcttcctgggctaaccagtcgactaccattggcgacggaggtgatctggatcgctttatctgggaggaaagtgaacgcatcgtccgtgagtttggtaaccatccttctttctgcatgatgatgtacggtaacgaaccggctggtgagggaagtaatgcctatctgactaatttcgttactacctggaaagagcgcgatgcccgccgtttatattgttcgggtgccggatggcccaatttgccggttaacgacttcttgagcgattccaaccctcgtattcaggcatggggacaaggagtaaagagtattatcaatgcacaggcaccgcgtaccgattatgactggtcggaatatgtcgggcgtttccagcagccgatggtgagccacgaaatcggtcagtggtgtgtatatcccaactttaaggaaatggctaaatacgatggggtgatgcgtccgcgcaactttgagatattccaggaaacactggctgaaaacggtatggcacatttggcagacagtttcctgttggcttccggaaaattgcaggctttgtgttataaggccgatattgaagccgccttgcgtacaaaagacttcggtggattccagttgttgggcttgtctgatttcccgggtcagggtacggcgctggtaggagtgctcgatgcgttctgggaagagaaaggctacatccgtccggaagaataccgtcgtttctgtaacagcacggtgccattgctgcgtttgccgaagctgatttataccaaccaggaaaccgtgaaaggtagtctggaagtggcgcatttcggagccgctccgctggaggtgacctctactgcctggaccctgaaaacgaaagaaggaaagactatcgcttcgggcaagctggcacatcagccggtaggtatcggcaactgcattccgctgggacaactggagattccgttggataaggtggacgttccttcatgcctgacactggaagctacattgggagattacgccaacagctggcacatctgggtatatcctgctacagtgcagaaagtggctgatgaagcacagctgctgatgaccgaccgtctggatgcaaaagccttgcaacgtcttcaggaaggcggtaacgtactgctctctttgcggaaaggctccttgcctgccgaagcaggaggcgaagtagcaataggtttctccagcatcttctggaacacagcctggacgttagggcaggcacctcacacgctgggtatcctgtgtaaccccgcccacccggcactttcagagttccctacagagtattacagtgattatcagtggtgggatgccatgagtcattccggtgctattgaagtggccaagattgacaagaacttacagccgattgtgcgcgttatcgacgactggtttaccaaccgtccgctggctctgctgtttgaagccaaggtgggcaagggtaagctgctcgtatccggaattgatttctggcaggacatggacaagcgtacggaagcccgtcagttactctacagcttgaagaaatacatgtgcagtgaccggttcaatccttcttccgaagtcgatgcgaaagatttaagtattttgtcttccgccaaaaatcaaaaataaccacagaaatatcattttttcctgcaaacttgggatagttcttctacctttgtttgcaggaattttcacatgaatacatagaacaatgaaaaacacaacgcatcttattttaggaatgctggccttgactttcggaatggaggcgaaggcacagattcagcttccgtcggtcttctccgatggaatggtattacagcaaaacagtaaagtagccgtatggggatggggaaatccgtctgaaaccctgatgattctttccggatggaatccgggagacaccgtgcgtacggtagtcgataatcagggacgctggaaagcagaggtaccgaccggacgtaccggaggtccgtatacacttgaagtgaaaggcggaaacgacagctggaaagtgtcggatgtaatgctgggcgaagtctggttgtgtagcggacagtcgaacatggaatggtcggccgatatgggaatcatgaacggcgagcaggaagtgaaacaagctgcctgtccgtccgtacgtatcttccataatcccaagcaaggagccgatacacctcagaccgactgccgcacaaagtgggaggtggctactcccgaaagtatgtgcaagaccagtgccactgcttacttctttgcccgctacctgactgaacatctgaaagtgcccgtaggcattttagtctctgcttggggaggtacaccggctgaagtgtggacaccggccgaaatcgtggaaaaagacgagatactttcaaagaacaaattaaaagactatccctggtggccgattaagccgggagtattgtacaatcagatgattcatccgctggtgccttatcagatagccggatgcatctggtatcagggagaaagcaaccatgagaatgcaccgtcgtatgcccgtctggtatccaagatggtggaggcgtggcgaaaagatttcggatgggacctcccgttctattacgtgcagattgcgcctcatacgtacggagcgaagaacaacaccccggctttgttgcgcgaacagcaggaactcatgttaggacaggtaaagaatactgccatgattaatatttccgatttggtagagaatgtaaaagacattcatccgcgtaacaagcgtgccattggagaacgtctggcctgtctggctatggacaaagtctacggacagttcaccggtgcttacgagagtccgcgtttgtatgaagcccgggtagtgaagcgaaacctggaggtcacgttggaggggaatttcaaaaccttgcattccactaccaaagaggtgacaggtctgacggtcgtagacggtacagggaaacaggttgctgtcaatgcccacttgaaagacaagaccttgcagattcccctgcgaggattgaaagcaccttatcaggtatattattgttttgatgaagcgaccattggcagtctccgtacagatgcgggtatgccggtgcttccattccgtacagcaaaaatagaagtgaaatgagaaagtggttatgtatgttagtctgctgcctgtccgtttatgtacaggcacaggtctggactttaaaagagaaagagccgactgctcccggcacatggtggtgtttccgtaatacggtaacgctggaagaattaccccgttcactggaattgcgtctggctgccgatacgaaatactggctttgggtaaacggcgagttgcaagtgtcggaaggaggattgaaacgcggtccgaacccttcggacacctattgcgatgtgattacttcacttcctgctttgcgtgtgggcgagaataccgtagctttgctggtgtggtattttggaaaagatggtttcagccatcgcaattcccctacggcaggcatcagtttctccctttcttgcgacggcaaggaagtggaacccgatgcaaaatggcgagtgaaaaagcatccggcctattatgtgccgcaaggcgaacagcccaactatcgtctggcagagtcaaacatcgggttcgatgcagtgaaagatatccctttcatgtcgcccgattatgatgacaagaaatggaagaaagccacggaaataacactggaaaaagccggatggaatcagctggtagaccgccccattccgttctggaaagattatgggctgaagccttatgcgaagacagagatgcagggcgatacgttgctgcgggcttacctgccttacaatgcacagataactccttacatccgcctgaaagcaccggctggcaagtgcatccgtatccgtacggataattaccggggcggttcggccaccaacgtatttgccgaatatcgcacgtgtgaaggagaacagacatttgaatgcaagggctggatgaacggccactatgtgctgtatgaacttccggaaggtgtggaagtgcttgatgtgaagtaccgtgagacgggttacgacacctcctttgccggcagtttctcctgcgatgacccgatgctcacccgtttgtgggacaagtcgcagcgtacgctctacatcaccatgcgcgacacctatatggactgtcccgatcgcgagcgtgcccagtggtggggcgacgtggtgaacgaattgggcgaagctttctatgccctcgacgaaaaggctcacctgctgactcgcaagggtattcatgaactgatggggtggcagcgggccgatagcaccatctttgcacccgttccggctggaaactataaggatgaattgcccatgcagatgctagccagtgtgagtcattacggtttctggacctactatatgggtacgggcgaccagcagaccattgccgacgtgctgccacgggtaaagaaatacatccatgtgtggaaaacagatgcccaaggcttggtgataccccgttccggcggatggacctggggcgactggggagaaaacaaggacatgaccctgctgttcaacctctggtatgcgattgccctgaaaggatacgaagaaatgaaccagttggctggcgaggcagaagaagctgcctgggcgcgtaccaccgccgacaagctgcgtaaagagtttcaccgtacgttctggaacggaaaatactacgtctctccgggttatcagggcaaacccgatgaccgtgcgcaggcactggccgtcgtatccggagtcttgcccaaagaactgtatccggtgattcgtcctttcttttccacctggtatcatgccagtccgtacatggagaaatatgtgctcgaagctctttgcacgatggggtattatcaggacgccctgaaccgcatgaagttgcgttatagcgccatgatagaaagtccgctgaccacactttgggaaggctggggcatcggcagtgaaggttccggaggcggtacctacaatcacgcttggagcggcggtccgctgaccattctttcacaatacatcgccggcattgaaacgctggaaccagctttccgtacattccgtgtggcacctcatccggcacatttgaacttcatccgtacccaggtgccgttgtcgggcggtcgtcgcatcgtgtttgaaatggacaagtcggctcacggtggaaccatgtacctgcgggtaccggaaggaacttccgcacaggtagtgcttcctgccgaattccagcgctggagtgtgaacggcgaactgaaaaacgaacgtcagctgacgctggctgccggagaatggcattttgaaatgagcgagaaatagtattctttagtccttgtgtgaaggacatccgttgcacccactacatccgcatccacatccgtttgatttcccttttcggcggatgagggtgtggaagaagtgcctgccggcccagagaaggcagcagactacaatgatatatacgagaacgttttgaatatccatattacgaatagttttagatgaataaacttcctatctgatagactccgaatgctacaagccaggctaatatggtggtgtaggtcgcggcaaagatggcccatttccatccacctgattcctgcttgatggcagctaaggtggcaatacacgggaagtaaatcagtacgaacaacatgtatccgtaggctacgagcggtgtgatggggatacgttcggaaaggtcgacggtatccacatcgtcttcgttggtgtagagtactcccaaggtacttaccacaagttctttggctccgattcccgacaggataccgatacccatcttccagtcgaatcccaacggctcgatggctggttcaatggcttttcccaactggccgatataggaattttcctgctgttcggcagtggtttcgtacgcttcgtggttaggataatatcccaggaaccagatgataatggaggctaccatgatgattccgcccatctttttgaggtattgctttcctttttcccatgtgtggcgcagtacgactttggcggtcggcatacggtagggaggaagttccatcacgaaggggctgtcatcgcctttcaccaggaacttggtgaagatgcgggccatgagtacggccagcaggatgccgatggcatagatggacaacagaatcagactggctttgccggggaagaatgcgccgatcatgaccaggtagatgggaaggcgggcactgcacgacatgagcgggttcactaacatggtgaccagtcgtgccttgcggctctcgatgatacgtgatgacatgatggcaggtacattacatccgaatcccatgatgagcgggatgaacgatttcccgtgaagtcccattttatgcatgattttatccatgataaaggccgcacgtgccatatagccggaatcttccataaaggagatgaaaaagtagagcagcaggatgttcggcaggaagacaatcacgcctcctacgccgccaatgattccgtcgataatcaggtctttcagcgggcccggactcaggaaggtctctgttccctgtgcaataagtcccacgagccattcaatggcttgttgcgggtattctcccaacacaaaggtaccttcgaacatgatatacaggaagatgaagaaaatgggaaatccccagaaacggttggtcacgatgctgtctaccactcgtgtaaacgcttccgtgtcatgattattttgggtgaaggtttccttcaaggctcctgagataaagccatatttggcgtcggcgatgcattgttcgctgtcgtcgttgcccagctcacgcaggcgtgccgcttcgttgtctctgatagccaggatttctgctccgttgggcaggggagcgatgacgcgtgtctctatatccttgtcgttttccagcaacttgatggccagaaaacgggtagagtatttgtggcggatattttcgtttttactgatttccctttttacgttgtcgatgctccgttcaatttccggtccgtggttgatgtggatgtggcggataaaacctttggcggtgaagttgtcttcttcgcctgccccttcatacttatgtccgggcacataggcatcgtgccattcgcggaagtcgcggagaatttcgttcttgatttcttctttctgccccatgaagtcggctccttcatacaagccgatgatgacgtggaacaggttgtcaatgccttcacccgtacggcttatcgtcggcaccatgggtactcccaacaattcgctcaacttgtggtagttcagtttgttgccgctgtgctgcagggcatcgtacatattcagtgccactaccatgcgtacgttcatgtcaataagctgagtagtgaggtagagattacgttccagattgcctgcgtccactacgttgataatcacatcgggtgtttcctcgatgatgtgtttacgtacatagagctcttccggactgtaggccgaaagggagtaagtacccggcaagtctaccaggcggaaatgataaccttgaaaatcaaagaaaccctctttggcatctacggtcacaccgctgtagttgcccacgtgttcgtgtccacctgaagcgacgttgaaaagtgaggttttcccgcagttcggatttcccaccaatgccacattgatggtacgtcgttttccctgagcaatgtttttcattacctcatcgcttacggggataccctgcgaaataggttcatggtaagtatctgtggcggctgtacgtcgtgcttcttcttcgctgacgatttcaatcatatcggcttcctgtcggcggagggatacttcgtaacccattattttgtatttgatggggtctttgagcggtgcattgagtaccacttccactgtttttcccttaatgaaccccatttcaatgatgcgacggcggaatcctccgtgtccgaggactttgatgatgacgcctttttcgccagttttcaattcagagagtttcatgttttattcactgttttaattcgatgcaaagatagggcattgcatctttttctgcaaactatttagaatgtttttaaattacgacatctgtatggggctttttcattttttatctctaagtttgtactatgtttataaggaaagtcagtcagtttatagaagaaaagcacttgttgggctctggcaacaaagtgctggtggcattgagcggcggggccgactcggtggctctgttgcgagtgcttctgcgtttgggttatgtatgtgaggcggctcattgcaatttccatcttcggggagaagagtcggtgcgcgatgagcgttttgtgcgggcattggctgaaagcttaggagtgcctttgcatgtgattcattttgatacaaacgcttatgcagcttctcataatgtatcggtcgagatggcggcccgtgagttgcgttatgactggttcgcaaaattgcggcaggaatgcggagcaaaggtagtggctgtagcacatcaccgtgatgatagtgtggaaacttttctgctcaacctggtgcgaggaacaggcatcaatggcttgcaaggcatccgcccggtgaatggagaggtagtgcgcccgttactgtgtgtaagtcgtgcggagattttggactatctttcttcgttgggacaggattatgtgacagacagcactaacctgcaggatgagtttgtgcgcaacaagcttcgtctgaatgtgattccgatgctggaaaccatcaatccgtcagtgagtgatacgattgtggaaaccgcacgcaggttggctgatgtggcgcaagtgtatcaggaggccatacaagcagccaggaaacgggtaatgcctgatggagaaactattaatattcctaccttgtgcagggagccgggcgcacagaatctgctttttgaactgctataccccttgggtttcaatgcggcacaggtaagtgatgtgtttcgtgcgttgcatggagaatcagggcggatgtttcacagccgcgaatggacgttactgatagatcgtgatcggttgatacgtcgtccgtcaggtgaagtagaacctcagcccgaattgtgtgtggagagaatggaagtggataccgattttttagtaccccatactaatgaggaagcgtatatcgatgcgtcaatggtacatggggaattgactttacgcaagtggcagtcgggcgacaaatttattccatttggaatgaaaggctttaaatcggtacgtaattatttgcgtgacaaaaagttttcccgttttgagaaagagcgtcagtgggtggtgtgtgatggcgaccgcatcgtgtggctcgtcaatgaacgggtagataatcgtttcagagtgatgccagagacgcggttggtcataaaaatgaaggtaaagtttgtgtaattgcataatctgcagatttttgtattaaaagatgcaaaaaaagagagggtaaagttatcacattgagggaattgtatttactttgaatacgtttaatttaaattatagtcagaattatgaacgaattaattgcaaaaatcaaagaattgaatgctgctttggttgcagatgctgaattgcaggctgaaaaaggaaacaaagctgcaggaactcgtgcccgtaaggcatccttggagttggaaaaagttttgaaagaatttagaaaagtatctctggaagagtcaaaaaaataaatagtttcaagacggactcatgtctgagggagagaggttatagccggtgcggttaagatgcacgctataatctctcttttgtttttttatcacacggcggggtgcttattaaaggggaacttcgtacatttgtgtggacttgtacgaacgtgtttatgaagagatttcggaagattggactggtgtgtgtgatgtgtgccgtgtgtggtatgctgtggctttcgtgcaaacgtccggtacatcagaggatgtatgcacacgtggattcattgaaccgcgtggcgtatgaggcccgttacaaggatctttctttatcttctaaggcagctgcggaagcctggaaattgtccgacggctatgcgtcgggcagggcagaggcattgaacaacatggggttttgtgcattcatgcggatggacttcgagcatgcagcccgtttgttccgaaaggcttcagaaaccagtaacaacgagattgagcgtctggtggccgatgtcgggatgatgaaaatctgtcagcgtacttccatgaacaaggagttctacgattatcataacagtgcattgcaacgcatccggcgtcttaatgaggatcgttcttcgcttgaaaagaacggtttggaaggtcggttgagttatgcgctttcggagttttatattgtttcgggaatttattattattatttgcagcaggacaaggagtccatgcaggctatcaatgccgtgccggaagaggctttgaaaaacgacacggcccaatggctgtactatgcgtatatgcgcgggtcgggtggtatgtacgaggcgcctacacgtgaagaagtgaccattggagaatttggctatctggtgcagtgtctgcaggtggcccaactcaggggatatacttatttcgaggccaatgcgcttcaggctatggctgagttgttagtgttccgaagcaaccgtctgttgctgagcgagaagagggcgggtatgctccgcctggtcaatccggataacttgccggtggacagtctgccgctggtctttgccaaagatgcgttgggcttgtttaagcgttatggtgactggtatcagatttcgggcacttatcgtaccattgcaacattctataattatacgggacagcccgaaaaggctttggtcaatttgaagagagctttgaattatgttaatctgcatcacgagaaatattatcattgcaaggattcgctcgaccgtttgcaggcctatttgccgggagacggtacttccatcgaattgaaatggattaatgacgagggcatcaatacggtacccgaatggatagcccggttgcgggaacagctgagtcgtacgtattctgccatgggatgcaaggcggaatcggattataaccgcaatgtgtacctggatattctggactacacccggcaggataaggaattggaaagccgtttcctggcattggaaaaggagaccggacagctgaatgtgctgctgtggcttgtggcgacgggttttctggtgctggtcgtattgtttgtctggctgaaccgttcctggagggtgaagaatacgatgtatctcacggaactcaaacgcattttaggactttgtcaacagattacgggagcggtacctgtttcggcaaccagccgggaagaggtggccgatgccgtagtgaaggtgatgaaaccggagctgtcggaattgtttggggtgcgtgacgtgtgcattacattctgcgatgaggaagagacggaagaagaaaccggggaattgcatgagggcccttcgttggtgtacgaccttcaattacccgacagggaggtgattgtaggaaaactgtggatgtggtttgcagttcctgtgcggaaggaggagcagacacttatccgattgctattaccttacctggcctggacgctggaacatggcatgaacctggtttcgttaggtgaggaacagcagagactggaaaaagaacagtacgtccacgagcttcacctgatggagaacaagcgtcagaatgaagtgaaaaaggcgtgtttgtcgattgtgacaggaatcgtaccttatattgaccgtatggtaaacgaggtacggaagctccgtacacttccggcagcgaatgcagaagttatacagcaggggaagttaggctatatcgatgagctggtgaccaaaataaatgaatacaacgatatcctggctttatggattaagatgcggcagggtacgctaagtctgaacattgaaaactttgagttgcaggagttgtttgcaatgattgccaaggggcgtcgttcgttcgaactgaaaaaacagacactgaccgtgggagaaacgacggcctgtgtgaaagcagataaagcattgacactctttatgatgaatacgctggtggaaaatgcccgtaaatatacgcaggaaggtggaaaagtgagcctttccgcagaagaaacacccgactatgtggagattgccgtggaagataacggaccgggtctttcggaaaaggaccgtatgtgtatcctgggagagaaagtgtacgattctggagccatcggtatggatactgccacggatacggcagagttgcaacgacagaaggggcatggtttcggactgatgaattgtaagggaattattgaaaagtaccggaagacgaacagcttgtttgcggtttgccggttcgacatacaaagtacgccaggaaaaggcagtcgcttctctttccgtttgcccaaaggagcgcggcggatggtcggacttttgtggataggtttgtgcctgttgctgggaatggcctgttcttctaaaccggagtctgccacgcatacggtcaacaatgaaaaggtggctccgtatgacagtttgctggccattgccaatgactatgccaattgggtgtatgagtgcaatgtgaacggcgaccatgctacagcgctggtattagctgacagtgtattgtattatatgaatgcccattatcttcgttattcgggaaaaagcggtccgttgcttcggctggagagtgaaggagagggggctgagttgacttggctggcccagtcgttcgatacggattattttattttgctggatgtgcgtaatgaggcagctgtggcttcattggccgtaaaagatttccggaaatatcgctataataatgcggcttacgcggctctttacaaacgtttgagcaaggataattctttggaggagtattgcttacagatgcagcgctcggccagcaacaagcgtattgccttgtctttgttcgtgttgctggtttgcggatgcctggtagcctattatgcactttatcttcgtcatcgtttgcattatcgttacaacatggagcaggtatttgtggtgaaccgtaccatcttttcggctgcctcttgtacggaaggactcggtgatgaggtgctggaccggattgtccgtagcatgtttaacgagttgaacgagatgctgctgctggagaatctggcattggctgtgtatgacgaggaaaccactcacctgaaaacggcatgttttgccacggaagagaatgaggaagaattgcatgaacgtcttcagcggtgttacgattcggggcagatgcagtggagcggtgtcatgaaatggagtttcctgcctttgtgggtagaaacaggaggcgacaaacattgcgtgggagtattggctttgaagctggcacgtgcctatagtcgggaagaagaccgtttgctggttgaaatggtatgtaactatctggcggttattttgtataatgccattgtacaggtgaaccggaagtttcatgacattgaactggctcaggatgaggcccgtcgttcactctttgaggagaatcaactgcatgtgcagaatatggtgctcgacaactgcctttctaccatcaagcatgaaacaatctattatccgagccgaatcaagcaagtggccgataaattaaacggtgaggttacggccgcacaacggacggagttgttggagaatatgtcggaactggtggggtattacaaggatatatttacgctcctcagttcgtgtgcttcgcgtcagctggaggaggttactttccgtcgtacggaagtgggggtagccgagctggcagagggtgcggagaaatatttgcgcaaggtgatgcgcaagcgtaattttacgctggaatggcagatggatgtaccttcactatgggtaacgggcgaccgggttttgttgcttttcctgctcgaaaatctgattgatgaggcagtgcgttatgaggtttccggaatcttgcgcttggtagcgaaagctgaaaacggttttgtgcgcgtggatttcattgatatgcgacggacttactctcaagaggaactgaatgccttgttttatcccgacagagagcggatgtgtccctcgggtgacggacaacggctggcgggcacagagtacttggtgtgcaagcaggttatccgtgaccatgacgagtatggcgggcgaagaggctgccgtatcaatgccaatccttggcagggagaaggaggaaagggattcagtgtgtggtttaccttgccgtttagacaaaagaaataacgaattagaatgaacataaaatcaagacaaaatggagaagtttaaggttgtcatagtagaagatgtcaaactggaattaaagggaacggaagaaattttccgtcacgaaataccgaatgcggaggtcattggtacggccatgaccgaggaagagttctggaaattgatggagacatgtacgcccgatatggtgttgcttgacttggggttgggaggttctaccaccattggcgtggagatttgcgcccgtcttcatcgggaacgtccggagctgaaggtgcttattttcaccggagaaattctgaacgagaaactttgggtggatgcgcttcgggctggggcagtaggcatcatcttgaagaccggtgaactgttgactgcgaccgatgtgcaggccgtcatggatggaaagaagatggtatttaacgagccgatactggaaaagattgtagcccgtttcatgcagacggtggaagtggaacagcgtcgtcaggaggcaattatcgattatgacattgacgagtacgacgaacgacttctccgtcatctggcactgggctataccaaagaaatgataaccaaccttaaaggtatgccttttggtgtaaaatcgattgagaaaaggcagaatgaacttgtaaaccggttgttccgctctgatgaacggactggagtcaatgcctgtcgcctggtaacacgtgcgtttgagctgcgcatacttgacatcgacaatctggaacccgatgaagaataaattcaatctgcatccggccacctgtttcctgttgctgtttttgctggctgccttgttgtcatggaccggcagtatttatgagtgggaaggtgtacgcagtcttttgagtgacgaaggactgcgatggctcttgcgtacgcttttagatgattatattctttctcccgtatttcaggccgtggtgtgtcttttctttggaggaggcctatttctccattccggattgggtgatgcctgtcacaggatggtgtcgggcacccgaaaattttcccgaaaggagaaacgtggaatgggactggctgccgtcacttttttagtgtacgtcggactgtgtgtcttgctggcttttggtccttggaatacggtgcgtagtgccatcggtacgttgtctgattctccgttggccgatggattctggggagtgtgttcgttaggggtagctctgccttctatcgtgtatggttttgcttctgattcctatctagacgattcggatgtagtagaaggaatggcttatctttacaagaaccgggctacgtactttgtcgtgcttcttttcattacgctttttttctcttcgctggagttcagcgggctgacagattatgctggattgccggatgaagtatgtcgcggtgcttatctgctttgctgtgtgctttttcttttgtaaaaaatagggctgtttcctctgaaacgattatctttgcccacgttattttcaacaaaaaccggaataaacgtataaaatgaaaaaaattgtattatttgcagcagccggactgatgtctttggctgcttgtcaggaaaaagcaggctatatcattaagggtacagccgaaggtgtggccgatggcgataccgtattcttgcagaaacagacagaagaaggttttgaagcactggattctgtagttgtaaaaaacggtacttttgagtttaagggaactcccgattcagtggctgtatctcgttttgtaacttacatgaagggagatgcccgtatggctgccatggtgtttgtagaaaaaggaaacattcaggtaaatctgagcccgatggaaagccgtatttcaggaacacccaacaacgatacttatcagaaattcatggatgaataccagaagattggtaaggaaatgaatgacatgtatcagaagattaagggtgataccttgctgactgaagttcagcgtgattcactgatggaagtactcgacaagaaagagacagaaggtatggacagtatttatcagctcgtgtctgagaatattgctagtgccgcaggggtacacttgctgaccatgttcggttcttcttttgaagtagaaaaagtacagcctttgctggaaaaagttccggctgcttttgctgaaaatgaagaggtaaaggctttgaaggaacatgtagagacagtggctaagacagctgtaggaaagaaatttatcgattttacgctgaatacgccagaaggcaaaccggtgaaattgtctgacttcattgctgccaacaactatacactgattgatttctgggccagctggtgcggaccttgccgcatggaaatgccgaatgtagtagctgcttatgcaaaatataaggcaaaaggcttcggcattgtaggtgtatctttggataacgatgtagaaagctggaagaaggcaatcaaagatttgaacatcacttggccgcagatgtctgacctgaaaggttggcagtgtgaaggtgcggctttgtatggcgtgcgtgccatcccggctactttgctggtttcaaaagacggtacaatcgtagcccgtgacttgcgtggtgaggacttggaagcaaaacttgcagaactgatgaaataatcagtttctttaaagtaagaacttattataaaagaaacgcggacctttttacagagaggctcgcgttttttatgggtatgtgaagtaagttctttatacttccatcattttcttcaattttcctgagagcaggaaaaggataacggcagctgctccgctcatgaacacgaaaagcatgaagaagtcggacagattttcaatgggatagcccatgaaacttttgcttaccccatgttccggatagtaaccgctcagcagaccagcaaacttgttggcagccgaggtactcaggtaccatacacccatcagcaatgaagaaaaacgggctggtgacagtttgtacaccaatgaaagtccgataggggccagacagagttcgcccatggtgtgaatcagataaagaccggtgagccataccatgctgactttcacacccggctcaatatctttcactccgaaggcaataaacagatagcctaacgctaacaatcccagtccgatggcttgcttgcggggagaacttggctcaatgcctcttttacccaagaatgaccatactgctgcaaagattggggccagtgtcacaatcataatagggttgaacgattggaagtaggcagctggcatttcccatcctccgatgtggcggtcggtctgttcgtcggcaaagaaggtgagtgaagcaccggcctgttcgtaggctgcccagaagaagataacgaaaaatgcaatgatgtaaatcactccgatacgcaacttttcatgtcggttcagtgagtgatcagtaatgataatcaccggcatgacgacggtagtggcgtaaatcagtgaaccaatccaatcggcatcggcaaacaggtgcgcgctgtctgcattccagttgatggagaaaagcaaggtaagcaggagggtgcttccgagcatcagaagggtgcgcgaagtggacttctgcgaagaagtttctgattgctgtgcggttgatgcgcttctttgtggggcaacacctactggattgccatcggggtcgcatatgtatttgttcttgaaaatctggaatgcggttgctcccagtatcatgccgatgcaggcagctaagaatccccatttgaagtcctccggatgtccggtgtttcctacgagtccgcataccagcggggcgagggtagagcctacgttcactcccatatagaagatggtgaaggccgagtccttgcggttgtcatcgggtgtatagagccgtcccaccatggtcgagatattgggtttgaaaaaaccgtttcctaaaatcagcagtcccagtccgcaaaacatcaggtatttggccaatgctacctcctgaaaatagcaggcactgaggaatagaaggaactgaccgagtgccatggtcagtgcgccaaccacgatggatcgccggttgccccagtagcggtcggcaatgtatccgccgatgagcggggtgagatacaccagccccgtgtaactgccatacacttgtgaagccatttccttgtcgaaaagcaacgcctgtaccatgtaaagcatgaacagcgcgcgcatgccgtagtaactgaaccgttcccacatctcagttacgaagagtaaataaagtccttttggatgcccttttgtttgattcattctgtttttattgataaaatgttagtaaattgattgtttttgcaaaaatagaaaatcattcttatccctgcaaatgaaaaagccatctcagagggtgagatggctttcaagtataacgtaattgtatggatttatcagtgaatcgtaacctgatccagttgctggtaagtggcagtgatgcgttccatgaattcggaagtaggagctactgccataagttgcagcatcaggtcgtttacatcagctttgctgtcaagcttgagtgcgcgtgtcaggtcgtcgagtgactcttcatagcgttcagtttcaaaatagagttgtgcgcgtgatttgtagttttccacatcctccggattcagacgaattgcttcattcaggtctgcttcggcacgttcccacattttcagattgcttagcagcacgcctctagaatagtgtgcaaatgaacggtattctgtatcggcttctggaataagttccagactggagttcaatgcctgcagtgccagtttggtatcattgcagaagttgcagataagtgccatgtagcaatgtgcatatccgttgtcagggtgctcattgatttctgcattcaaataagtataagccgcttcagggtttccttcattgagagcttctactccttttacatagttttcgctttcagggcgttgaatattttctccatacatttgtatagtagaaataaaacagcaaatcagaattgctgagagtgttttcatggtggctttcatagagtctagttttattaacgggcgcaaatctataaactttttgttattctgcaaagattttgtagaaaatattacaatgagatgaaggtaatccgtaaaaacttccctatatttgcagtgtagaaaaatcagaatattttaaaaggtatattgaataagtatagattctaattaaataatataataaacctaatttatttgctaaccatgaagtcacttaatgaaattattgcacaatttccggaggttggaaaggtaggggaaataattcctttgacagccggtttgattaatcagacttataaagttcagacagaagatccgcaggcttgcgattacatattgcagtgtgtcaatcatcaggttttcaaggatgtggaacttcttcaacacaacattgaatgtgtgactcgtcatattcgcgagaaactgaaaaaggctcatgaaacggatatagaccgcaaagtcctccgctttgtaccgactgccgaaggaaaaacatattattttgatggcgaacgctactggcgtgtgtgtgtgttcattccggaatcacaaacactggaagcggtaactcccgaatcttcttatctggtaggtgtgaaatttggtgagtttgaagccatgttggccgacctgcctgaaaagttaggggaaaccattcccgatttccataatatggaattccgtatgcagcagttgcgtgaagctgtggcgcagaatgcagccggacgtatggagaaggtacagtcactggtagatgatattgagaaagatgcagatgaaatgtgtgctgcagaacgtctgtatcgggaaggaaaacttccgaaacgtatctgccattgtgatacgaaggtatccaacatgttgtttgataaagatggaaacgtattgtgcgtaatcgatttggatacgaccatgccaagtttcgtcttctctgatttcggtgatttccttcgttctgccggaaatacggctcctgaagatgaacctgacttgaacaagattcatttcaacatggatattttccgtgcctttgccaagggatacatcgaatcggccaagagtttccttactccgctggagatagaaatgctgccatacgctgtgatgttgttcccatatatgcaggcagtacgtttcctggctgactatatcaacggggatacatattatcagataaaatatgccgaacacaactatgtgcgtacactggcacagtataagctgtatcaggaagcacgtcgtgcagttcctgaaatgaaggaatatatttcttccctgctgtaagcagattttaaaaggatatgagaatagggaccgtctttatgtaaaacaaggcggttcctattcttttttatagataccaaatcgtttcaattgtgtatataagtattttaatctgattaagattgtgaaggtataataaaaatagtatttttaccgtttaatagtttaatcgatgtgttcaaagaacaacaagtaacgcaatgaaataggatggaaaaacgtaggaaaagaagaagtgcagaagatgtggagaaatcgatttgggaggcagccactactttaatacaaaaagatggattcagttgtttgaccgctacgggtataatgcaggaagctgaaatagagcctgtacagttttataggagatacaaggatcttgatgcatttattgatgagtatgttaagaaatttgattattggtttagtgatgtgattaaagttgctgatctaggtaagaatggtcaggaatattatgagaacattctatgtaatcttttcaattctttatgggataataaaatcatgcaagagttgttaagatgggaaatagcaacggataatgaaataagtcaccgtacagcccagttaagagaattgcatactcttcctttgtgtaagaaatttgcaaatctgttctcggattcagatacagacattgtagctatctcagccttgatagttggaggagtttactatatgacacttcatgacagactatcagagtttagcggaattaatcttggtaaagagccggataaagaaaggattttaaaggctattaaacatctttccagtttattgtttcatgatcaatccaagtcttccgttgtaagtattgcaatcgcgatgaaaagggattctgtctcatccgaaaaaatttccgaatatacagggattcctttacaaattgttgaggaactttgaaaattcaggcggaaaataattactttaaagagagtcttggatggtaaaaagtacctttggggaagaggcgttttggatgtgatacttttgttttttagtctatgtcgggttggaataatctctaaatagaaataaattgtgctatgattttttacttaagatgttgattattaattgtatactgacgtgtgattgcctcgcgaaattttaattttgcgaaatcttctttatattatatttgaaatatcgaacttaaatgatggcttaagtgtaaattctcgaaaattacgtaaaggacaactattacgatatataaatacaatattgattgtatatatttgtgccgttttctttttcttcgtaggaagaagaggcatgaaagtaagtttaaaattctaaattagaaaattatgaagaaaaaagtcgtaatggtttgtatgctgatgacaagcatctgtagtttgtatgctcaaaatgtgacattggctcctgaaatgggtatttctgctgtacagagatacggatggggacaagaatggagaccttctgcaaaaattggtgtttctgtagattttaatttgaccaatcattttggtatagaatcgggattgttctatacatttagaggctattctatttccaatggaggaacttatagcaatggaaagtttacatggacggaaaatgtgtcacagacaagacattttttacaaattccagtgctggctcaatttagatggactttgaataagaatacgaaaatgttttttggcgtaggaccttatgttgctttctgtttgaaaaaccgctttgatagtaatccttattacatgaatggagcttatccagggaaatatgaacagtattacgatggttttatgtatggagaggatgcaatgggcaattccaatctttttctttatgaagaggctcgaaactttgattggggagtatcttcaaatataggcatagaaactaatcattggtatgcgaagctacaatatgatctttcgctgggtaaggaaggtaaaaatgacgtaattggggccaactatcacactctaactctttctgtgggatataaatttggtttatgatttgattcaattcagtatttgtattcctgattacgagaaagaagagattgtctcaaatatatgtgaaaattaatctaattcctctttttcaaacctcttttgaacttaggtaaaaacgatcctacgtttcattcaaaacgcaagtgcattttagataaaacgtcaaagcgttttggttgaaacgcacttgcgtttaaaagaaaacgcccttgcgtttggtaacgaacgcaaggacgtttttttttattcatttcagtcaatatttcctatggtaaatttctcagggtgttttcctttgaaatccttgaaatataacttgatttccttcatgtctttttcaatgtcacccgtgggcaagaggtattttcctgctgtaatgcacttcttttcataatctattccaatcaatacaatcggaatttttgcccccaaggcaatgtaatagaatccctttttccagtcgggattagccgaacgtgttccttccggtgtaatggccagatggaatgtgtcacttttttcaatgcgttgcaccagttggtctaccatagaagtacgcttgtcgcggtgtacggggatacctcccatttttcggaatatgattcccaacgggaagaagaaccattcctttttcatcagaaaacccgattcacgccctatggctgtgataaacaattttccgataaacaagtcccagttggtggtatgcggagccgcacagatgatgcactttttaaaatcgggtacatttacttctgctttccagcccagcagtttgtggtagataaaccggcagatagcttgtttcatgtgtgttatttcgacagttcttccagtttcttgaacacgttgtctacttcagcattgaagtccgctctcagttttttgtagaacagtttcacgctgcccggctctgtgtggctgatgcggctgatgatgtcattacgcaggttgataatctgcaggaatacttcgctgtaagcttcccgtttttctgcatttgcgtttgctgattccaccagacagagtcctgctgccagttctgtaatataattgactgtttttttcaatgatcttctactagccataattctaaagtttttagttaataaaaaatgattatggtgtaaagatacgatttcttttggaatatccatgaaacagtacccgattcttgtagataaaaacattccgtactgctccggcgacctgtattgagtgaagaatttgtcaccggaacgtacggaatgaaattagtaaagagagatctataggttgtcctttataaaaggcaaagtgttagttcgcaaatagcatgttgaattctttttttatcaaatgtttcttggctgttactgccgcacttcttcccggttcgataccttcattgatggtgaattccattattttggtagctcctatcagttcatcgtcaatttcgttgtcgggcgttcctataggaaatactccagatgtcgggttacttcctgatttaggagtaactgctatacctttgtaagtaactctgacggtatagtttgtggcaatagaggggtcacagtttgcaaacatatttacccatacctgatatgttcctttttgcatgcaatctgttttgaagaaaatgttttcactgtttttccagtcaatgtcgcagcctgcattggagtcaatatccaatccgatttttccccattcaacatctggttcattttcataatcatcactttccagccagtcattgataatttcgtattcttttgaataataggggaaaggctgaccgtaataaatgacatttccgttgggttctacgacatacaaatccacgtctttttcattactgaaacgcaggttgacttgtaaatcgcctgtaccggcttctatgtagttggtttcacttgtaaattgagaggaaacttcaccttgtttgtttactgtggtaaatacaagcgtgaagctgctattcagattctggcttaataatacaagcacagtataggtgtagattccattatttgtggtggcacgtccttgtacgtttgctggtgcatctaactttactttaaggtatccggattctccttctacaccgatatttacatagtctaattcttcataggaatttaatgtaagataggatgttcctccaggaagagctgctttatcaaaagtagcagtttgaagcatgggagtgtctcctacaggcatacttccttctgtgtattcactgttgtctacatcaataaactggtcttgcaatgcgcttttgcctggttcatcgtcacttccgcaggcatacagagccatggcacaaaatacaatactgaatagtttgagaagttgtttcatagtgtttttcattttatacgcctattcccctgatgcgagtgataaaatatgcgaacgcagggaatattccttgtagaaaggaatgtgttcgctttttgatttttttatttccaactgcaaacgtttttgttgtttttcatttttctcaaaagtaattgtatttttgtttcaaaacaaattcaaataagttcaaattgtttgtgattgttgtgattttgaaactatttgtgcgaatttgtggactatgcgggcgaaaaatctatgatattttagctgaatattttttacctttgcagcatggaataaggacgttatgaaacgaatattgatttatacaggtgcaggcttgctgctgttattgctgttactggccggtggactatggattttccgtaaccgtatcttgaaccggatggcagaaagaaagattactcaagtggaggagcggtacggactggaagtgcattacgatgagttgcgctttgagggaaccggatgtcttttcctgaacgggctgtcagttgttcccgaggagagggatacattattgacacttcggtcggccacgtttaatttaggcttctggcaattgctgaaaggaaatgtggaggtgatggatgtggcgttggacggattgacggtggattttgttaaagagaaccagcaggctaattatgatttcttgttccgaagcagatcgaatggtgaaaaagaaacggaacgggctcccgaaaaggcgggatatgacaagcgtgtgcaaaccttgctgaatggagtgttccgtttgttgccttctgaggggcgtctcacccgtctgcatgtgcgcgaacggaaggacagcgattccgtcagcctgtatgtaccggaattcaatattgagaatcaccggttccgtagccagcttacttttgtagaagaaggacatacacagcattgggaaacggagggagaaatcaattccggtgagcgccgtgtgtcggtctgcattcaggcacctgaactgactgtgccttacattcgccgccgtttgggagcggaagtggccttcgaacggttgtggttaagtttcacgcagcaggaggaagatgagaaaatggtgttgcttggtcagacggaggtagacggactgaaagtcttccatcatcgcttgtcgccggagcgtattaacctgaatcatgggaagctggattttcagttgaatgtggaaccgcatgccctggaactggacagttgcagtacgatacgtttcaatgacttgcagtttcatccctacctgcgggtagaaccgcccagccaccttatggcttccatacatcaacccctgtttccggctaaggagcttttcaactcccttccgcatggacttttcgagaacctggaagggattcgtgtggaaggagaattggcatacgatttcgaactggatgccgatttggctcgtcctgacagcctgaagttttattccgacctgcgtccgcagcatttccagatactgggttacggaacaaccaatcttggtaagatgtctgaagagtttgagtatacggcttacgagaatgaaatgcctgtacgtacttttccggtggggccgtcgtggaatcatttccttcctcttgacagtgtgcctcagctgatgcgcatggccgtattgcagagcgaggacggaggattcttttatcatcagggattccttcccgacgccattcgtgaagcgatggtttacgatttgaaagaacgtcgctttgcgcgcggaggaagtacaatttccatgcagctggtcaagaatgtgtttctgaatcgtcggaaaaatatcgcgcgtaaactggaggaagcattgattgtctggctgatagaacagaaccggcttacctcaaaggaacgtatgtttgaggtgtatctcaatatcgccgaatggggaccgggagtgtatgggctgttagaggcatcagagttttattttggcaagcgtccgtcgcaactgacgctggaagaatgtatttacttggcttccattattccgaagccgaagcattatcgcagttcattcgaagctaatggacggttgaaagaaaatcaggagggacacttccggctggtagcccgcagaatggcggccaagggagtaatttcggaagcagctgcagaaggagtcgacttgtcgcgtgtggtgttgaccggagaagctggaaaatgtttcgctgacagtctcagcttctctacgccacagcctgttccctgagttattctccgaggatggtagccacgatgcgccgtcctcctccgtggttgcggaattcacagagatagattccctgccaggtgcctaagttcagtcgtccgtcggtgatggggatagacaagctggcgcccaccagtgaggatttggcatgggcaggcatgtcgtcccagccttccaaggtatggtcgtaccaggactcgcgttcgcgcaccaggttattgaatatcttttccatatcgctgcgtacatcagggtcgcagttttcgttgaccgacagtccggcgctggtatgctggataaaaagattgagtagtccggtcttgggtaaggcaggcaggtgactgagaacctcgtcggtcacaaggtgaaagccacgcgcgcgtgcccgaagtgtgaaagtagtttgttgtatcataataataaacggtatgaaagattacggattttatctgctcaaagataacacaaatctttcagaaggagggaatatagcgtgaaaaacctccttttaccattcgttcagccactcgtccagtgtttctccatccgtgaagagctcgggctccagtgtctggatgcgtttcttcatccgcgatttctgctggtagactgaagtaggagagatggccgaaagtacggcaatttgcgataccgtaaaatgaagtttgataagaatacaatattggatatccatttccgtcagattcgggaaacgggtggtgaggcgtgaagtaaagttattgtacacgtcgtctaccaaagcagccaggcaacttttgtctgtttctttaatgaagcgcgggctgtggcgcaattcgttaatgagcggctgttcagagatgagtcgttcggccagtctgtgttccctttccctcaattgttccatttcattggtcagcgtctgaatgtgctggatatggcttttgtgattcatttttggctgggtcgcatttcgtttttcgtatgtctttttcaaacgattcatcttttctctggggtttattttttcacgctataattatacttttggcaaagttagcgcattcttatttactttaaaataaatccatatatacagcctttgttttgtaaattactgaaagttagtgttttatgttgttttctttttgtgtgtatatatacagagggccttttttagaatctgtgaagccataaatccagcgtttctccttcggtaaagctatccgttttttgttgcaggatgcgtttcttcatccttgatttttgctgcgatacggagctgggggataccgccatgaatacagctatttgcgacacactgaagcctaatttgatgaggatgcagagctgctggtccagttcggtcaggttggggaaagtatccgtaagccgttcggtaaaatgtggatagatttcgttgaccaaggtagcaatccggacaaaatcctcgggttgcagaaagcgcggtttgctccgaagttcagccactaacggatgggtagaaatcagttgtccggtcagtgcctcttctctttctttgagtcgcagcatttcggtggtgagttcctgaagatgtggagttttgagcggtgcgcttttcaattgtttccagtgcgcttcaatttggtgttgcagattttggttggcaagattcagttgccggttctgttcttccagttgcttgatgagcgacaattgtgcttcctgttcactggctttctgggtagagagttgcatttgcagttcctggatactttcattgttttgtgccattaatacctcgttgtcctttaactgcttactgtatttttgcagttcgctggaaaggcggtgaatggtgcgttccttcttcttcaggttctgctggtagaggacgataagtgccagaatcactcctaacagcaaggatacaattaccgcaatgcggagttccatttgctggcggttgatgatgagttcgtagtttcgttgttgcagctgggctctggtttcctgctgtcgcaatgccgtgttgtgcttgtctttgaggtcttctgtgatggagtcgcaataccgtctgaatacctgtccgctatatggaaggcccattctttcatttaatgcggactgcatctgataatataaggatttgaatgataacatgatttggtcttttttctgcttttgctctttgtccatgctttgggcagctttatccaaataatagaacgccgaatcattctttcctaagtttatataaatctctgccaggcttaactggacagcatacggcagaaaatctgggttgagacggataagccgttggaattgggcgatggcttccctgtatctgtgtgctcctaccagcatacagccatggtttcgcagaatatgatgggcgaacaaggtatcaccggcttctaatgccagttgaaaccctttctccggacaatcaatgttcgatgtatctcctcccaactgcgatacgagggccagtgaatataccatctggtaatgctccttcaccggtagcttgtgggcaatgcgaagcatgtcttcaatcatcgctttacattctaagaaacggctttgcttgtatagcacttccagtttcttgcgctgcagcactaacatgttggtggtgtcttttcgggagatggccagggcaatgcctttgtcgaacactgtgatggcctcatcgtttgcttctttccacctcaggtacatgccttcgagcaggtatgtatccagtagtcgtgcggtatctgttggctgttggcggtagtaggcaatagcctgatagagcagggaatcttctaacaaagacatttccagctggtagtgggccatcgccttgttccataccagtttcatccgttctgcttccggaagagacgtttcatccttgatattaaacagaagttgcaaggcagaatctggttggtgatgatgcagcaaagagtccgtttgttgtagcagagcacttgcgtgcggttgccttgtgcaagtagcaaacagcagcaagatgcctgctatatagagaatgggttttattttgtgtttcatgtggctgttgataaggtgatatcactttttcgtcctacaaatataacgatttcttgttacatacggtttttctggctttctccggctccggtacccttgtacttactcttggtagcgttgaacttgtagcgcatggtcagtgagattcttctgaaattggtgatataatctgtagtggttttgatgccgctataaatagtgcagtccacatcatctttttccaacagattggtgacttgaagttggaaactcaatctttctttgaagaaactcttatagagccccatagacacatccagagagttaatacccatgtacatgttctgtgaatgtcctttggtgtaataagtgccatctacatcaaataggaatcctgccggaagagtgaaactgttacgccacacaatgattgtccttggtttactcagtgtgagtttgccgtccggtccttctgcatgaagccactgcttaaagacctgtgcggtaagctgcggactccaccagctgatagtaggcgataaggtgatagctgatatgatattgttgtagggttccgtattgacggtttttagcaaggatatggtaggatcagcttccgaataaggttcgcaaacctgaataatatcgtctttcgtacggttataagtaaagctgaaattcacccatttataggatgcggaaaatataaggtcctgattgatgataggtttgagaaatggatttcccgtttggtaggtatatctgttgccgtaatatatgtttcctctcaacatatcgtatgaaggacgcgtgataccaccgctatagctcagctgaatttgtgtttttcctatgggaaagtttatgttgacagaaggaaatacattgttgaacgtgcggctttgttcgtcgatgtgttttccttgctcatagtagtcgaacttcacgttctcgtatctcactccggcttgcacatctaccttgccgaacgagtgtgagtagtccatgaaagccgcagtggaaccttcttttattttactgtcatcattgtcgaggatgccttcttggttgtgatagaggtttgttctgctagtatgcgaatactcaccgccgaatgacagattacctttccataaaggatacgacacaatcagttttgtggcatacagtgttccgttgtttttgttgaaggtattgacattgttctccgtttctccattggtgatttctcttgtgtgctggctttcttcttttacgttccacaaaccgtcggcattgaaatcaatgttccagtcgcctatctgtccgttatagtaatagttcaggctgtgtcttgtagaagggtcttcaccaatcattgtacttgcattgttttcgtacagttcttggtcagcatagatattggctgtgtaacgccagtcgcctgaagagttgaagtatttgtccatatcgtagcgtacacccatggagtgtttctcattgaactggtagtttagtgaaaggatgccttggacattactattggagttctttccgtaagaagcatccattttctgttcccacagtttgtcgagataagtcttcatgccaatctgctggttattcccgttgcggaatctgcctccgaacaatgttcccgacaggtcgaaacctcctttccggtaattgaaattaaactggtcgaaagtagtccagccatacgttcttcggtggcgggttacaaaacggttattaaatccgaatccttcgcctgctgctttctttgtaatgatgcgaatgacggctttcacggaagcatcgtatcttgctccgggattcttcacaacctccacgcgcttgatttgttcggacgataactggtcaatttccgaattgtcgcgtaccttgcgtccgttgatgtaaatctcggcagtgcccgagccaaatacgtttacttcttcatcttccgcagaaacgcccggaatcttgttcaataaatcttcacctgttccagccttttcgagtacactacccgtaacagtggtaatcatggcatcacctttgagctgcatcttgggcaaatcggcctttaccacgacttctcctaactgttgtgtgtctgatgtcagctgtattacccctaagttggcaggttggatgggtttgtatacagtgttgtatccgattgaagaaatacgtacaagctgattcggtgtggtggtattcaggctgaacgtgccgtcttcagctgtgacggttcccgtgacgaaggtcgagtcggggagtgccagaaggactacgttggcataaggaagaggttgtttgttttcgtcgattaattttccactgacggtctgtgcggcaatttcaccggcagatgtgaggctgcataatagcaggagcgcttttccaattgtgtgcatacgatacttgttttcttattatttgcaaagtgtgtttgtctactttttttgatagtagtttctgtattgcaaatatagaaagaagaattgtatgtatgcgaaaaacggtctctacaggtttgttcttgataaaacctgtatgcagctgatttattgtattttaaatataacatcggaatcatgtatctctacaatttgtgttttttatattttaagagctgataagttcttgaagaaagacattttcggtagtctgtttttctacatatacagtttttcagaataacaaataaaggacaacttcttgcgaggctgtcctttaaaatgtaattagagtgtgatttttataatgattgtacaagtttatatggttataccggtttcacgatctacattattcgtggtctttccctctgcattctcatcaatcagttttcgcttgttgaggagcctgccagaagtatcggtcgtcgttgacggaatagttcctcgggttccgttcctcgctgtcgcagccagtaggttgcaggaagatgtagttgatgagcttctcccggtcgctttccgtgttgaacccatagcgtgtccagctttccaagtagaacagatttttggccatgtattcgtacagatagtcttccgtcgtggtcttcttttcattgttccagttggcatcttcgttcacctggactggctggccgtttctgaggcgtgcacgcacttcctctacactcagcaggttgccttgttcgtctgtcacccaagcattgttcgtagggtctatccagagccatttgccgagagtggacgaatagacggcgttgatgacgtggcagtcgttgatatacgtcttcggcatacaggtaatgacacgcgacggaatgcccatcgataggtagcactcgttcagtaccgtagccaacccgcggcagttcaagccccggctgccgtccttgcaggcttcagcaaaattgatagagttgtttccacccttcgggttgccgttctgtccgtcgtgacgtatcttgtcgtgaatataagtcaggatacgtttgatggtaaccagttcattgcccggcacggctacactgtccagctggaaatagtcacggacacgcttcaggtcggggtcatcagcctgcgcatagacaatctggggcagactgtcgactgactgcgtgcgggtgtattccggcgcattctgcaggatataaaggtaatcggtggtttctttcagacgcttcagggcgggttgtagttcaggtgcgtccagaatgtctttcaggtcttcgtcgttggttatcctgttgtagcttacttcaatctttccgctgtccagtgctttgagcaggttgttggcggcttcttgttttttcccttgtattgcctgggtactggccatgttatagtagctggagtatttgaagtaagcatagccttcggccagttgcgtcgcatgtgcgtcgtataagtcgataatcttctgacagagggcttcggcagtcggatagtcctttccggtatatgcatcagagagcagtgtgttcagcgagtcggtggaggccagaaacttccgttcggcatcggtttgtgctgacaggcttgtaaagcagattaaattcaaaagtaaaatcagtaggtatcctttcagtattttcattgtgtattctgtttaaaaattggttttcaataggacgttcaggttataaaacattatattcttcagtcgtaccttttatgacattcattcttggaactgatataaaacttacatacggttcttctggctgtcgcctgctcctgttcccttgtacttgctcttggtagcattgaacttatagcgtaaagtgatgccaatatttctgcgggcttccatttttcctgtcatcagacggttaccactgtaaatggttgatttagcctgatatgagttgaaaagatcataggctttcagctgaaccgaaagacggtctttaaagaaactcttgtaaagactgatattggcaaaccagcaccattcttcgacctttgtattttcgttgtcacccggagtgtcaaaacctaaatctacatcgagactgatactaagaggcaacttgaaattgttgttccaggcaaagttcaatattggattattgaagttttctgttccattggatgtctccaccttataccattgctggagcagaaggaaattgaactggggagaccataacccgatggtgggagacaatgtcagagtggtatataacttgtcactgttatacatgttgtagaaggaatataacgaaacagtcggatcatcttccgaatatgccctgcttaactgtgtaatggcatcttctccgtgtatatatcgtgaattgaggtatatccacttgtacgacacattcagcgtaagacggtttatcagtgacggtctcagcagcgggttacctccttcataggtatatcggtttccgtacatgatgtcacttctcagcatccagtatgaagggcggtagatactgccggtgtaggtcaattgtgtctgtactttaccaatcggaagattcaaggatatggacgggaatacgttgtcgtatgtcctgctctgctcgtccatatacttgccatcctcgtaatagtcggaagacagatgctcatagcgcacacctaactgtgcctgtagcttgccgaagctgcgggcatattccagaaatgccgaagtggagttttctttgatgctgctgttattgttatccaggattccttccacattcatgtacgaattatcccggttcgtataggtgtattccccgccaaaagagaggtttcctccccataatggatgtccgaataccagtttggttgcataaagggtattgtctgtcagattcttggtggtgacagtctgtttctctaaggaacctcccgctggagtgaactgctcgagcatctcctgtggattcttcgtatccgaccagaatccgtccgcattgaagtcgatattccagtctcctacacgtccgttataataagcattgagagtatgtctggtttcctgtgtatttctccagcccgtagtgtgactctcctcataaagagcattatcctgatacaccagggtattcatcggatctaccgtttcatgacgttccggtgtccggtcataatcatagcgtgcacccagagagtgattctcgttaaactgataattcagcgacagcatggccgaaacatctttcatgtcatattgtgtgcagagatatgaatcctgtatccatgttttatccaacagtgttttctgtgtgatggtcttgcggtcttctgtgtatcctttcttgccatacagcatacccgaaaggtcaaatcctccttttcggtagttgaagttgtactggtccagcacattccatccgtaaccgtagcctgtataaaaacggttgttgaaaccgaatccttcaccttgcggctttttggtttgaatacggataaccgcattgaccgtcgcatcatagcgcgagccgggattgttcactacttccacgctcttgatgttgtcggaagcaagctggtcgagttcagatttatcccttactttacggccgttgatatatatttcaggagttccggcaccaaatactttaatatccccttcattagccgatacgccgggtattttgtttaacaggtcatttcctgtccctgcgttttcaaggatactacctgctacggtagtcaccatggcatccccttttacacgtatcttgggcaaatcagccttaaccactacttcccctaactgttgtgtgtctgatgtcagctgtattacccctaagttggcaggttggacgggtttgtatacggtgttatatccgatggaagaaatacgtacaagctgattcggtgtggtggtattcaggctgaacgtaccgtcttcagccgtgacggttcccgtgacgaaggtcgagtcggggagtgacagaaggaccacgttggcgtaggggaggggttgtttgttttcgtcgattaattttccactgacggtctgtgcggctatttcgccggcagatgtgaggctgcataatagcaggagtgcttttccaattgtgtgcatacgatacttgttttcttattatttgcaaagtgtgtttgtctactttttttgatagtagtttctgtattgcaaatatagaaagaaaaatctcatgtctgcgaaaaatcggtctctacagccctgtatgcaaatagcgtgcatatatctctgtttatcagtggatttatgtgagaaacctaaacgggaaatctctacaagtgtattttgagatgaattttatgaggaaatgagaaagaaaacactacgcgtagagtgaattgtaaatcctcaggacatttatggtcaaatcttttatcagtatctatgtttctcctgccggaacctaaagaatatctttgcttatttctatttagattggcgggttttcaagtctttggagagaggagaaaggaagcatttcgcataagggcataaaaaaaggagttccgctgaactccaacctttgttaaccttaaatctaatactatgaaaaacacattgcaaaggtacgcattttctgtttctctgcaagtaaaatgatgcttaaaatctgttttataacatctattataatttgcatttgccagaaaggtttttgttaacgcttcttttactacctttgcaattaaaaaatagacagattatggcatttgaagcgacgaaaagagaatggggagaactgtatgcgtttttccggctgctggccgacggttacgtgtacggtggtactcctgatgtgaagaaaaacgaagcactccgtcttccggtggcaatggttcagcgggaagaacatgacggtacgcgtcagtatattttggaaaaagataccgtgcatctgaaaggagagaatatagacaagcggattcctcgtgaagactttgctacggtggcagagcttatctatgcagcgattcgtcagagccgggaggatgatgtcacatctcccgatggcgtagaggagtttctggatgaagtagccatttttgatttggaagctaagacggacgaccgcacggatttcagcgtggctttttactcggtagatgctccgctcaccggattctgtgtccgttcccgtctgggaatgatgattccgttgcttgacgggggaagaaccgccaatttcaagtttgagcagacaggtgtgaagtttgctaccccgaccgtcaacaaaatcaatgcggaaggtgaggaggatgatgtcatatcccgcatgttgatgatagagcgtctgggaggtacgctgaagtacagtgatgtggccgataagattttccgcagcaacctgtccatgattgatttgcacatgggacgactgatggcggaaatgacacgcttgatgtggctggacggtattacgaaggtgtcggaactgacggaggaaatcaaaaagctgaatccgctgaagataaaggacgagctgattacgaagcatggcttctatgaatacaaggtgaaagagctgctgctggcattggccatgggacttcgtccggcaaaattgtacaacggaacagactctgccattgcagggttccttttcgtgacgggtgacggggaagtgttgtgctatcagcgtgctttccgccagacatttgccgatttccttttccagaacagccgcttggagaaaggttctacggaaaaagacaagtatggttatctggaacgtgaaaatggagtgtactattttaaactgaatctgaaaatcggtttgctgaagcgataagtcttagacagggataaaagaaaaacggattctccgactgaaacgtcagggaatccgttttttttgtgcatttccgctgagggaattattcttcgtggttgctgtaatatttcatgaactgtgtacgttcgaacgggttgatgtcgcctgcggctgaggcattcatctttcctttgaactgtgcaatggaatcatatcctttgtcgtccatccattcggtcagttctttcttcatctcttcaatcatctggttgccgtgctggtagataacgctgcaaacttctacggcagcagcgcctgaaagcagagacttgataacgccttttccgttgtgtacgccgcctgaaacagcataatccagctgaggaacttctgccgaagcaatggctgtccagcggatgcggtcagacaattcagaaggtgaactcattacattggctgtagtgaaagtcaggttgtcaatctggatgtccggctggtagaagcggttgaacaataccacagcagcagcgccgttggcatacaactggttgacgagtgcaaccggattagtcaggttgctgcccagtttcataatcaccgggatgcggactactttcttgatgtggcgcaggatgtcgatgtgacgctgttcgaagcttcccggtgtgtaatccttgctggtctgcaaagaaagaatattcagttccagagcatcggctccggcttcttccatcaggcgggcaaaatctgtccattcgctgtcactgtagcagttgatgctggcgattaccggaatcttgcagtgtttctttacgtcttcaatcagggtgatatgttcgttcagcgcatgtgagcgtacgtatgctcccaggtagtcgtcggcttcgggtgagccatagccctgcatgcttcctgcctgcatgtttatttgttcttcgaatactgatttcagtactactgcaccggctccggcttcttccagtttctgaattttagccaggctgttagtcagtccagaactgctgataataatcgggttgttcagagttaaccctgcaaaagttgtttttagttgtgccatattcttctcgtttttaatatactctatctccaaaaatcttgctgcctacacgtaccattgtacttcctgcctgaactgccagcggatagtcgtgcgacatgcccatggaaatttccttgaaggtatcacaatctttaaaataggtagctttcagttcagtgaagaaacggtgaaggctttcaaattcattggtgatttgtgattcgtcgtccgtattggtggccattcccatgactccgctgatgcatacatgtgtcagctctttccacggggtggtttccaacatctcgcgacaagcttcaaaagaaaatccgtatttgctttcttcttctgcgatatggatttccagcaggcaaggaatcacccggttgcatttagccgcctgtttgtcgatttcagccagtagcttgtaactgtctacggcatgaatcatggcgatgtagggtgcgatgtacttcactttgttggtctgcaggtggccgatgaaatgccactgaatatcggcgggcagggaagcctgcttcttgctcagttcctgttccttgctttctccgaagatgcgctgtccggtttcgtatgcagtcagaatcgcttcgttcgggtgaaatttggatacagcaaccaggctgacctggggaggaagttgtgcccgtatttcttttaaattagactgaatatccatggtgtgatatgtgtttgtttatcgtttgtctgcatccgggaattccggttttacgtcaggttctgcagagtaggggtatacgtccatcagtgcagtttcggcaaccgatgcgatgacgtagtcggccattgtacccttcatgccttcgtccagtttcttcacggcatcgcgcaggtcggcagcctgtaccagtacgttggttgctgttttcttttccgcaccgcttttctcgtcgagggtgatgaagtagagcttgcacttgaaccagcggtcggcagcttcctcgtcgctggggaagagctcgctgtagttggcgcgtttgatgtcggatacagtgaattctccgctgatgaacggagtgatttcttcgataatacgcgattcagcttcggtgaaactgagtgcgtccaccagatagggttccgttactttcttgttcattccgttttcggctattttctcgtaacggattttgcattcaaaccaattatgcatcataatttttcttgcttttcaatttgtaatatttcacacaaagatacgattataaattgaatgagagaataaatggttttgaaaaatcagtcaattcttggtttgcaacggttttgttgcatgaattcctgaatgaggtcggtgtaattcccttgaatcagaatgtggtggttgcctagcggattgtgcaggaaatagtctgccggcttatccaggcgtacctttagctgtgtgcggcaacaggttaccatattggtattttcaataagatgtcccgatgacagataatattcgtccaggcattctccgccacatttgaagagggtaacttcgcctgggtgtacaatgccctggatggcaatgccgctttctgtttcaaaatggtttcggataataaactcttcggccattttagtagggatggagcagtgtgccagcagtacctcgttacgggcaaggtctacaaatgaaggatttgccataaagccgggctttccgatgagctcttttaccatcagtaaggtcatgatggactgcaagtcaccttcgcatccggcaggtattccttcgtcatttagcagagaaagggccaagcagcctgtggttttcagactttggatcagcgagaagcaggacaaggtaagagcgtccaagttttcttcctggcatacacgccggatggccttatataatcgcatggcccgaagcagctcttctggggttgcttcctgaattcctttggcacggttggcaaacaaagaggcttcaggtcctatttcatcttccgtaatctcgtggaaagctttttctacggtttcaatggagatgtccgtgtaagtcactccccaacgctgtccggctaacaggtaatccacatgactggctaccagccaggaggctggagtgccgattacgccgatgcgtttctttttcaaggaacgtttggcggcaaacgcctggtgatgtaaaagtacctgatttaccatattgggcactgatccatggatgatttttaccttcatgtctctcgactgaatccatgccgagatttcaagggcggcagccagtgagttgttcaggccgtccgtcagcagagtgatgggatagggcaggatgctgaaaaaacgtactacagcattctctacgcctccgctggctatgaatgccattttgtattcatggctgggaatgctttcagagtctgtataattgacaaggtgaagggtgaaatgtttttccagttccacgaacaggtctttatgcttttcgtagacttgctctaccttgtatgtgccggctgtaaatataattaggtaaaggttcataatgcttgagtgtttggttatcgatagcaaacatacggattttttgggtagaagacttggaaaatgcctgaaaaggcgttaaactttacttggagggcctttttctcaaaagaaaggagtagccgtatttttctgagcacaaagttgtttaatttcgacaatcgctttatctttgcatttcagaatcttttttaaactataaaatatgccaaaaatatccatcagaggaactgaaatgccggagtcgccgatacgtaagcttgcgcctttggctgaagctgcgaaagagagaggaattcatgtatatcacttgaatattggtcagcctgacctgcctactccacgagcggccctcgatgcgattcgaaatattgaccgccaggtgttggaatatagtcccagccagggatacagaagttatagagagcgcctggtgggatattatgagaagtacgacattcacctggatgccgatgacattatcattactaccggagggtcggaagctgtgctgtttgcgtttatgagctgtctgaatccgggggatgagattatcgtgccggaaccggcgtatgccaactacatggcgtttgcgatttcggcaggagcggttatccgtacggtgacgactaccatcgacgaaggtttctctttgccgaaggtagagaagtttgaggagttgattaatgaacgcaccaagggtatcttgatttgtaacccgaataacccgaccgggtatctgtacactcgccgggagatgaatcagattcgggatttggtgaagaagtacgacttgttcctcttctccgatgaagtgtatcgtgaatttatctatacaggttctccttatatttctgcctgtcatctggaaggcatcgaacagaatgtggtattgattgactccgtatcgaaacgttattcggaatgtggaattcgtatcggtgcactgattacgaagaatccggaagtgcgcaaggcggtgatgaaattctgccaggcccgtttgagtccaccgttgattggccagattgcagctgaggcttcactcgatgaaccggaagaatatgctcgcgaaacgtatgatgaatacgtggaacgccgtaaatgtttgattgacggattgaaccgtataccgggtgtctattctccgataccgatgggagctttctataccgtagctaaattgccggtggatgattgcgagaaattctgcgcatggtgtttgtctgatttcaattatgaaggagaaaccgtcatgatggcacctgccagcggattctatactacaccgggcggcggtaaaaacgaggttcgtgtggcttatgtattgaagaaagaagacctggtacgggctttgttcattctgcgtaaggcgctcgaagcctatccgggaagggtggatgaatgatgagcaactggaaattttttattgcccgacggatttaccgtagcagggaaggagagaaagaagtatcaaaaccggccgtacgcattgcgatggccggtattgctatcggactggccgtgatgattgtgtcggtggcggtggtcatcggcttcaagcatcaggtgcgcgacaaggtgataggcatgggctctgatattgtggtttccagtatcgaaggagctcagctttaccagatgaatccggtggtagcaaacgacagcttgttgtcggtgatacggaatattccccaggtgagtcacgtgcagcgttacgctacgaaaccgggcatgatcatgaccgctgataactttcagggaatgattgtgaagggggtggcgcaggaatacgactggacgtacctgaaggcacacttgcaggaaggagagattcctgcactgacggactccgtagccagcaaccgtgtgctggtttcccgctccatggccgacaaactttcattgaaggtaggtgataagctttatacttattatatagaaggcaatgtgcgtgcccgtcggttgacggtgagtgggatattccaaaccaatttctctgcattcgatgattatttcctgataactgacatgtacatggttcgtcgtctgaacggttgggaaccggatcaggtgggaggcgtggaagtggccgtgtcggattatcgtttcttggactcggtgaatgacgatattcgtggtcatattcaggaacagacagaccgttatggggcaatctattgttcccgtacttcagaggaactttatcctcagatttttgcgtggctcgacttgctggatactaatgtatgggtcattctgattctgatgaccggagtggcgggctttaccatgatttccggattactgattattattctcgaacgtacgcagatgattggggtgttgaaagcgttgggggccaacaacgcttccattcgtcagatattcctgtcattttctgttttccttatcggaaggggaatgtgttggggaaatgtcatcggactgtcgtgttgtcttcttcagtattttttcgaaccgattaagttagatccggctacgtactatgtcaatgcagtgcccgtagagcttcatttgggctggattgtattgttgaacgtgtgtaccttgctggtatcggtagggatgctggtcggtccttcttatttgataagccatattcatcctgcaaaatccatccgttttgaataaatcctgctttaaaatcaagagcaaacaaatcttttttactaattttgcactctcaattgatattaaagaataaaataactacataaagttatggcaaaagaattaaaagacctaaccaagagaagtgaaaactattcacaatggtataatgatttggtggtaaaggccgatttggctgaacagtctcctgtgcgtggctgtatggtaatcaagccttacggatatgccatctgggaaaaaatgcagcgtatccttgacgatatgttcaaggctacaggacatgtgaatgcgtatttcccgttgttgattccgaaatcttacctgagccgtgaagctgaacacgtagaaggcttcgctaaggaatgtgcggtagtaactcactatcgtttgaagaatgcagaagatggttcgggtgtgattgtagacccggctgccaaactggaagaagaactgattattcgtccaacttcagaaactattatctggagtacttataaaaactggatcaactcataccgtgacctgcctatcttgtgtaaccagtgggcaaacgtaatgcgctgggaaatgcgtactcgtctgttcctgcgtacagctgagttcttgtggcaggaaggtcatacggctcatgctacccgcgaagaggctgaagcagaagcacagaagatgttgcacgtgtatggcgatttcgctgaaaaatacatggctgtgccggttatcaagggtgtgaaatctgcaaacgaacgttttgccggagcattggatacttatactatcgaaggattgatgcaggatggcaaggcattgcagtgtggtacctctcacttcctgggacagaactttgccaaggcattcaacgtgcagttcgttgacaagaacaataagctggattatgtatgggctacttcatggggtgtatctactcgtctgatgggtgccttgatcatgacccattctgacgacaacggtctggttcttccgccgcatttggctccgattcaggttgttatcgtacctatctataagaacgacgaacagttgaaacagattgatgccaaggtagaaggtatcgtcaacaaacttcgcagcatgggtatctctgtgaaatacgataacgctgataacaagcgtccgggattcaagttcgcagactatgaattgaagggtgtacctgtacgtctggtaatgggtggccgtgacctggaaaacaacacgatggaaatcatgcgtcgtgatacactggaaaaagaaactcgttcttgtgacggtatcgaagaatacgtacagaacctgttggaagaaattcagcagaacatctaccagaaagcattgaattatcgtaacgaacatatctataaggtagatacttacgaagaattcaaggaacagattgagaaaggtggatttatcctggctcactgggatggtactccggaaacagaagaccgcattaaggaagaaacgaaagcaactatccgctgtctgcctttcgaagcagatgaagaaagcctgactccgggtgtggatatgctgactggcaaaccttctgcacgccgtgtcttgtttgcccgtgcatattaattggctatacttacagtaatatcataaaaaagtccggttctcttgaaagagggaatcggacttttttttatgggctttattctgctttcaggcattccatatattcttcgtaactgatggaccggccacccattgacttgaggtgaggcgtctcaaactggcagtcgataagggtacctccgtgcgcatggagcagttgggccagtcgtatcagggcaagcttggaagcgctgggtacgagtgagaacatgctttcgccgaagaagcatgtgcccaaagtcactccatacaggcctccgaccagcttgtcgttttcccatacttctacgctggcggccaggttttgttcgtacattcggatgtaagcttcaatcatttcctctcccagccaggctccttcctgttcgatgcggagcttggagcagttccgtatcacctgttcaaacgcatggttgaaagttaccttatacttattcttgttcattagcgtgcgcatggaatgggagatgtgaatctcttccggaaagatgacgaaacgctgcaacgggcaccaccattggatgactttctcgcggaaggcataccagggaaagataccgttggagtaggccaggataaggcggtcgacggacaagtcacctccaatggccagcaggccgtcagggtctccccagtgcgggtccggaaaagccagtctttttgtcagttggaaaaccatggtatcgaaattattggagaatactcagttgattgttttcggccgttaccgtgatgtcacctccctgcttcagcgagccaaacagaatctcacgcatgagcaacggcttcaggtgggcggcgatggcacggtccatttcgcgggctccgtattccggtttgaaaccctctttcagcagccattcatgtgcttcgggtgtcaggtgcaggcagacgtgacggcgagccagcttttcatccagctggcgcaacttcttgtcgagcacttgcgtagccatttcccgactcatgtcatggaatacgacggaagccgacaaacggttgaggaattccggtttgaaggttttctttacctgacggagcatggcctgtccggtgcttacctgactgttgaaaccaatggaagcctgatgcgcatactgagcaccggcgttggaagtcatgataagaatcaggtggcggcagtccgatttccgtcctttgttgtccgtcagcactgcatagtccattacctgcagcaggatgttgaaaatgtcgggatgagccttttcgatttcatccagtagcagtacacagttgggcgttttccggatggcatccgtcagcaaaccaccatcctcgtatccgatgtaacctgccggagaaccgatgagtttggcgatggtatgcttttccatgtattcactcatgtcgaaacgtaccagtgagatacctaattctgaagctaacaccttggccacctcggtttttcctactcccgtaggaccgacaaacaacagactggccagcggcttgttctcgtccagcaatccagctttggccatttgcaccgcctccactacctgacgaatggcttcgtcttgtccgtaaatctgtcccgatatgcgttcgtacaatgcttccagtgaagcgttgtcttcctccttgagtgcattggcatcaatcttgcaggtacgtgaaagtacttcggtaatcagctttctgtccaccgtctttgtgccgtctgcggccggatgaatttcgcggtaagcacctgcctcatcaatcaggtcgatggctttgtcgggcaggaagcggtcgctgatgtagcgggcactggcctttacggcatactcaatcactcccggttcataggttacgtggtgatactcctcatatttttccttcaatccttctatgatgcggatagcctcgtcgatgctgggctcctgaatgtcgatttgctggaaacggcgtaccattcctttgctgcgtgagaaataacggttgtattcttcgtaggtggtagaaccgatgaaacggatgtctccctgttccaggtaaggcttcagcatgttggaggcatccatcgagccatcaccgatttgtccggctccgataagattgtgtatctcgtcaatatagagaatggccttcttctctgcgctgaggcttttcatcacactcttcaatcgctgttcgaagtcgccccgatattgtgtaccggccagcatactacccaaatccagttcatagatacggtttcccttcaggcgttcgggcacttttccggcttctatacgggctgccagtccgtaagccaaggctgtttttcctactcccggttcgccgatgtgcagcgggttgttcttgtctttccggcacagcacttcgatagtacgttccagttccatctcccgtccaatcagcggattgtgattctccaactgttcgttcaggcaggtaatgaaatttttggaaataccatgaggttcgtctgaatcattctcatccaggctgaggtcgtctccataaatgaccaccagttggctgatgaaatccggaatccgttccttcaggtgttttttcagaaaatagcaagcccaggattccggcagcagcaacatggcttgtactacgtgaggaatgtctagcacttcggcattggatgattccaggaaggcatacgcattctgaaacagcaggttggattgcacagaaaattgcagttcatagttggtatcttccggtacctgttccattttttgtgccaggtattcgtctacttcctcttccatcactgggatgtgacagaaacattcttctacggcctctacaaaagggtcctggttaaagagtgcgctgagaatatgttccggagtaataaattcatggcgataacggaacgccaggccttgagcaaacgacagcgctttgtctacatatacagatttttcgatgtgactcattgattctttacagtttaattgtcttcgggttctacggtcagtcgcagagggaatccttcttcacgtgccatctgagtggccttctgcgctttggattgtgctacgtcgtaagaataaacgcctgccgtggccgattgctgctggtgtactttcagcatcagtgcctcagcttcctcctgcgatttgaaaaacacgattttaagtaccttcaccacgaagtccatagtggtgaagtcgtcgttgtggagaatcactttataatgtttgggttcgtgcagctccacacgttttttttctttacataacgattgttctttttccatttgtctactttgatatagcgattcggactcgcgtcaacgtgccgtgttcaacgtaaattctttctggtcgtacatttgtccacgggtatcggtcacagccagtcggaaagtagctgtacccgttttgatacgttttccggcagtgacggtagccgtatacttcaccccgtttcccggctgaatctgttccaccagaatggaaggggagatatgcagatgtttcattccgctgatttctgccacgctgggaattacgttgtaggcaatttcatttccttcattcatgatttcgaagatgattttgctgctttctcccgagctgatgacatggtcgcggtcattatctatgaaacggatgttccgaatgtataaagaggagagagcagactgtgtatagtccggctcggcgtacacctgttccacgggatagtttgtcctgttttcttcacgcgattttggggctgtcagtgcaccaccaatggcagctccggccagtgtgccgacaatgcttccaatggcagaacctctgtaacttcctctccagccatgacgggagtcgcctaccagtccgccgatggcacctcccacactattgccgatggcggcaccacctacaatggcatcggtacgttccggttgcgtcgttccgcatccgctactcagtaaggacacgattagaagtaaaattgcgactttcttcatggatgttttcttgataaaagttttatttgcggtatttagctttaatggccggaagttctttctggatgtcactgatacggcgtgcatcactggggtgtgtgctcatgaattcaggcacctttccaccagaactggccgacatcttttgccagaaagtcacggccttgtcggggttatagcccgccatggtcatcagaatcagtcccatgtaatctgcttccgtttcgtgtttacgcgagaaaggaagggttactccgtattgtgctcccacaccgtataccgtacccgcgatggcctgtaccatctcactcttttgtgagagagtctgtcctaatatttgtgcaccatactgtgtaagcatctgctggctgatacgttcgttgctgtgcttggctactgcatgtgctacttcatgccccagtaccacggccagttcatcgtccgacgataccaatttcatcagtccttcgtacaccacaatctttccgcccggcatacagaacgcgttgatttcgtcactctttaccagattgaattcccaggcgaactccttgatttcgtcagaaagtccgttgctgcgcaagtatcgttctgtagctgcggcaatgttctttcccactcgtaccaccatggccgtctgggtggcattggtcgacttttgggcactttttatgtagtctttatactgagtcaggctggaagaaagcacttcctggtctgaaaccagcaacaattgtttacgtccggtgagcggtaccgaactgcatcctgccagcatcagcaaagaaagggcatacacacttagttcttttttcataacggtttcgttagttgttctacaaacataacaaaaaaatgatgatttttgattatgtttgtggcaataaactataaaaaagagatgaaaaaggaactttttatagcatgttctctatgtggaaccatgctggtgaatgccgagaatatagaggtcactacgtttaaatacgcaggaccgtatgcattagtacaaccttatcaggttgacagtgtggatgttaattccaagtcgtggaaagcggagtcactgctggatacgccggtgtcattttttttgcttgaaggagcagaagtgaagcaggcaagtcagctgtctccgtcggcaggctatgccctgcaccttatgggttttgtattggaaaatacacactatggggaagtatcactgaaggtagaaggggctgaacactatcaggtgtatgtggatggcaagcgcgtggaggatgcctcgttgtcgctgaatccggctacgcatcaggtggtcatcaagtacctctctatgccgggcgaaaaaaacgtgccgaaggtgagcctggatgctaagcaggacggggtgtttaccttgcgtaccgaacaaggacgtctgtttacactggccgatgtactgcatggtacccgctttacgggtactgaactttcagccgatgggaaatatctgattacgtcgtacactgtcacgaaagaaggtggggaaactacttcgcagaccaaggtaaaggaactgaagactggcaaaatattggtaacccgtggagaaaccctgcactggatgccgcgttccgtgaaatattactatgtacgtcagggtgtatccggacgggaattggtgacggttgaccctgtatccggacacgaggaagtgtgggtgaaccatcttccggagggcagcttccagatagcacctacggaggattatctgctgtttaccctcgtacagaaggggccggaagagaagaaggaaatctatgaattcattgatccggacgaccgccagccgggatggcgcaaccgtacgtatctggcccgttttgatgtgaagacaggtgtatgccagcctttgaccttcggttacaagaatgtatgggctacggacatttcttccgacggccgttatattctgatgatgacttccaaccaccgtatgggaaaacgcccgaccaccttgttctccgtgtacaagatggatgtgcagaccttgcaggtggaagaactggtgaaagatgacggtttcctgaccaatgcgcagttctctcccgatggccgtcaggtattgctggccggtacaccggagtgtttggggggcatcggtaagaatgtgaaggaaggacagaccccgagcatgattgataatcagctttacctgatggatttacagagcaagcagattgaaccgctgacccggacgttcaatccgaacgtgatgcagacggtgtggtcggctgtagacaattgtgtgtacttcaccgccgaagaccgtgattgcatcgcgctgttccgcctgaatccggcaaagaaacacattgagaaggtgaatgtgcccgaagaaatggtattgggattctctgtggccgaaaaagcctcttcgttatcgttctacggagaaagtgcgtccaattctcaccgcttgtatgtggttgatctgaagaaggatgcctccaagttggaagaagatttgaacggggaattgaaagatgtgctgctgggtgaatgcaaggcgtgggactttgtcaactctcggggggacaccatttgcggacgctactacctgcctcctcattttgacccgaacaaaaaatatccgatgatagtcaactactacggcggatgcagtcccacaagccgtaattttgctagccgttacccgcatcatgcgtatgccgcattaggttatgtggtgtatgtggtagaaccgagtggagcgaccggtttcggtcaggaattctctgcccgccatgtgaatacgttcggtgattatgtggccgacgacatcatcgaaggaacacgtaagtttgtggaagctcattcctttgtcaatggtaagaaaatcggttgcatcggtgcttcatacggtggcttcatgacgcaatatctccagacaaagaccgacttgtttgcggcagctatttcccatgccggcattagcgaccacaccagctactggggtgaaggctactggggctattcttacagtgaagtatcggcagccaatagttatccgtggaagaatccggaactctttgtcgaccacagtccgctgttcaatgccgacaagatacacactccgctgctcttcctgcatggagcggtagataccaatgtgccggtgggcgaaagtatccagatgtttacggccctgaaactgttaggacgtgaaacggcactggtagtggtagacggacaagaccatcacatcaaggactatcagaaacgcatccagtggcagaacactatctttgcctggtttgccaaatggctacaagatgacccgacctggtggaacaccctttatcctcctaaaaccttgtaaaacggatgaaaatattacatactagtgactggcacttggggcagcaactgtttgaatacgaccgtagcgaggaacagcaagactttctgcggcagttgtgccactgggtagccgcagaacagcccgacgcgttgatcgtgtcgggcgacgtgtttcattattgcagtccttcggcagccgcccagcggttgtacacggatgcgctggtggaatttcatgaaacctgcccttccatgcagattattatcacggcaggtaatcacgacagcagttccaagctggaaatcaaccggaatctgtggaagtatgccggagtcactgtggtgggttctatccgaagggatgaagccggccaggtagacctggaacgtcatatcgtggaagtgaagaacggttgcggcgaattgaaaggctatgtgatagccctgcctcatgtgtatccgcaaaactttccggcgctcgatgaagaagtcccacgtgaagagcggcaacatcattttatccaaactttactgaaccgtgtggaggaacgaaaccaggggaatcttccggtggtgctgatggcccacctggccctgacgggaagtgacattaccggacaggacgacggacgcggcggcatggaatacacggacatccgtctgatgggggagggatacgattacttggccttaggacacatccattttccgcaaaccttgctcggcggacgggcccgttattgcggctccccgcttccggtcagctttgacgagagttacgggcattccgtcagtctggtagaactggctgcacatggtgctatgcccgaagtacgtaccttgccggtgcggaatgcgtggctcttaaaagtactgccttcgcgggccgtgccgctggaagaagcattggaggtgttgcaggccatccccgatgaggaaaagatgtatgtgcagttgcacgtccgtattcaggatgtacctccggcctattgcatggagcgggcctacgaactgacccggggcaagcagtgccgtttctgccgttacaagtgggaacgtgaagtagtggaaacgcagaaggagattacagagctggatgtagaccgtttgcagactttttctccgtcgcaggtagcagccatctattatcaggacaagtttcagcgggacatcgctccggaaatgctcgacatgctggtggaagccgtaaaacgggtacgaagtcaagaggaggaatagcacatgaaattacagaaactgattattgaaaatatagcctccatcgagaaggcgtgcattgattttgagcatgggccgctgggcgaggattccatcttcctgatttgtggaccgacgggagccggaaagtcgacgttgctggatgcggtgtgtctggcactctataacaccactccccgcttgaaacaggcagccaatgaacgttacttggacgagaacgacagcttttccggtacgggtgaagtaagcatcgacgattcacgcatgctgatgcggcgcgacagtgtgtcggcacaagtggagctgtggtttacggatgcggcaggagatgccttgcgggccgtgtggagcgtggcaagggcgcgcaacaaggctggagggaaaattcagaaagtggtctggacactttccatgcaggacggcactccgctcacgaataagtcgaccgaaacacgtacggagatagagcggcgtatcggtctcacctttgagcagttctgccggactacgctactggcacagggagagtttaccaagttcctgaaaagcaaggaggaggaaaaatcaaatatcctggagaaactgacgggcacggaaatctattcgcgcatcagtcgggaaatctacgtgatgaagaccgaaaaggaggcggagttgcaggaactgaaggcgcagacgggtggtattgtgttgttgactgacgaggaattggccgtgcttcaggcggaacagcgccaggtgacagaagagactgccacgctccgcacacagttgaagcaggagcaggaccttcggaaatggttgaccgacgagcagaagttggcacatgatctggaggagaccggaaaggcgcttcagtcactgacggaacgggtagagtcggatgactacaagcgcaacaaatcgttgctggatgactgggaccgtacggctgatgtgcgcttccaatggacagaacaggcggccttgcagcagcgtatccgtacgtcggaagaagaactggaacaactgaaagagaagtaccgttcgttgagtgtcggcttggggcaactggagcgtatgcaggtgcagtgccgggaacagtgggaggcgtgcgagacgtatctttccggtgtacaggaaaaggtgccggtgtacgaatcgttgcaatcgctttcggccttgtctgaccagattcagcacgcacttctgcagtcggaagattaccggaaagaaaaagcgcacaaggtggaaatccatcaaaaaacgctggaagtccgccagggagctacggcatcgtatgaacaggcccgaaaggtagcggaagaaaagcagcaggaggtggcagcgtgccgcatgcagttagaggatttgcaagtggaggaacttcggcagaagaagcaggaagcagacgcccggctggacggatggaagaagttgcgggaggcactttctgtccgtgcagaaaaggaacaagcctggctggatgtgcagaagaatcggaaaaccttgcaggatgattgccggaagcagcaacagacggtagcgcaattgaaagcgcggtctgaggtgtgccgtaaggaaaaggaagaagtgcagcaggtgtacgacaagcagcggatgtcttgtgaagactgggcacgcgaggcccgcgcacgtctgtcaaaaggcgatgtgtgtccggtctgcggcaaggaggtgggtgatgacttgaagagcgaagctcattttgtgtcattgctggaaccggtccgtgcgttgctggaagaaaaggcacgtcgggcggaggaagtcttgaccgcactggcacaggcggaagcggaggttcgctccctgatgcggctggaagaaatggaggcgaagaaggagactattgcaaaagatgcttattctctggcggaaaaggccgtgacagatatgccgctttatgccaccgtgaaagaagcggacgaggtcggatctcaggtagaacaagccttgtcggcgcagcaggaagtatgcgaccggctggaagcgctgtggaaacaggccgaggaaggacagcaacgcctgaaccgtctgacgaaggaacgggaggaactgaccactgcctgcgagcaatggcaccggaaggtagaggaaaccgataaagccgtgtcccgtttggaaaccgaactgcgtatgctggaagaggcgctttcgcgtgaggcactgaccgtctcccagtgtatggagaaaggggagaccttgattgtctttacgccttggcaggaagcttggaagaccgaccgggaaaacttcattaccgccttgaagaaagaaaccaatcggtatgtggaacagcagacgaggagagagcaactctcacacagggtagagtcgctggcttctcaggtggagcaggtgcagtctgtccgtcagtccatcttgtcggaacttccggactgggagcaggagacggcagagacaatacccgacgggccgtgtccggaaggacttccgggacaatggaacgcgctgaacacttccttgctttctgtctgccatgccataaagacatcgcaaaagttgagggaggaaaaaagcgccggagtggaagcttttcttgtcggtcatcccgagatttcccgtgagtatttggggaaactggccggactggaagttgaaaaagtgaatatggcacgccgtactttgcagaagttggacaacgacctgacgagccggcgggcagaaatggaacgggtcggtcgggaactgacacagcatcaggcacagcgtccgtcggaaaccgaagggatgaccctggcagccgtagaggaaaccatttcccgactggaagaacagcagaccgggaagttggctcgtttgggagccatcgcacagatgctggcacatcacgaagagtgtctacagcgtatccggaaagtgaaggaacagatagaagtgaagcaaaaggaagtggacaactgggctggagtggctgccttgttcggcagtgccgacggcaagaagttccgtaacattgcccaaagctacgtgcttcgccagttgctggccggtgccaatcattacctgagccggctgaccgaccgttaccgtatggagtgtccgccgggtggacttaccattctgttgcgcgatgaataccagggcggggtgaaacgtcccacatccaccatttcaggtggagagagcttcctggtgtcactggccttggcattgggattgtcttcactcaaccggaaaagtctttcggtggatgtgctgtttatcgacgaaggtttcggtacgctggacagtgactacctgaatacggtgatggaagcccttgagaagttacaccagataggaggcaagaaagtaggcatcatcagtcacgtggaagccttgcgcgaacgcattgccacccagattcatgtggagcgggtaaaccatacgctaagccgggtggaggtggtcaatacgatgggaaatatgtaaattgtgaaatttgtaaatatttgatttttagtagattaaaatttggcaaaaaacgcctttgcgtttgaactaaaacgcaaggacatttcagatgaaacgcaagtacgtttgaagtaaaacgcacttgcgttttgtcttaaacgaacttacgttttttcaggtaataggggataacttttttttatgacaaaaatccagatagatatcgtacttttgtgtcacgaaactaaaaacattatgattatgtacaaatctattcttcgtccctggttgttccgtatggatgccgagaaaattcacggtcagatagttgctttacttcatgtttatcgtcattttccaccggtgaaatgtcttcttcgtgcattttatcgtccgaaggcaactccgtttcaatggcggaacctgacttttgccaatcgggtgggactgtcggccggattcgacaaagaggcgaattgctttgacgaactgagtgatttgggttttggttttctggaagtgggaaccgttactccggaaaaggtagcaggaaatcctttcccccgaatcttccgtttgccggaggatcatgcgctggtttcacgtacgggcttcaataatcccggaaaagaggttgtcctgaaaaatctgcaacggaaacgggacggaaaatacattttgggagtaaatatcaataccaatgctccgaccgatgcggagcgggccgtgacagatattacagatttgtacgagactttcagtgcctatgcggattattatacgataaactggggcagtatgacgcctgagattctgactgatgtgctgactgcactcgagagctacaaacagcgtttccacagaccggtcttcctgaagttgcctgccgatgtgccggtggagaaactggatgcggtgattgaatttgcaaaggtgcatcatattgacggtttcattgctacgggacctacacaagaccgttcgcttctgattcatttcgcacaggctgaagtggaacgggtaggagccggaggcatcagcggacttccggtcattcacaagtctttggaggtgatgaagtatttgtcggcacatgctcccaaggacatgttgctgattggtgcgggaggtgtgatgacaccgtttgaggcaaaggcaatgcggaatgcgggagctcacctcgtacaggtgtattccgctttcatctatgaaggtcctggtgtggtaaaacgtattgccgagaaaatataagcagtggcgtacatgttgtataaatgatggtggccgacctgtaagatataatcttatgggtcggctttaattttatagggaggtttcagggttgtcttcaagttctttgtgatttttgggtaggaatcgcatgttatatgtctgcaaaattgggctgggtgtcatatttattacacctgaatttgaaataatatcttttttttgcaaaaaagtatattatatgatgctatccaaacgacaaaaaatgataacggctctcattgcaggagtggtggcaggcggtggactgtacttcctttacctcttgagagcacatacgtatctcaccgacgagccttcggcttgtgtgaattgccacatcatgtcaccttattatgccacttggatgcacagctctcattcgcgaaatgcgacgtgtaacgactgccatgtgccacatgagaattttgtgaagaagtggacgttcaaagggatggacggcgtgaagcacgtggctgcttttctaaccagttcggagcctcaggtcattcaggcacatccggccagttcacaggtcatcatgaacaattgtatccgctgtcatgaacagttgaatacggaactggtaaagaccggccgcatagactatatgatgtcggaagtgggaaagggaaaagcctgctgggattgccaccgcgatgtgccccatggaggaaagaacagtctgtcgtccacaccggcggccattgtgccactgccggattcaccagttccggaatggttgagaaagatgaaagaataatttaaaactcgtatagtatgattcataattttaaatcttggcagggatggctgttgtttggtgcatcaatggccgtcgtgttttgtttaggacttgccgtgtctgcgttgtcagagcgcagggccgaagtggcaagcatatttaataaccggaagaatccgatgaaagggattgtggctcagaacgagaaattccagggagatttcccgagagaatatcagacttggactgaaactgcccgtacagattttgaaagtgaattcaacggaaatgtgcaggtggatgtgctggcacagcggccggagatggtgattctttgggcaggctatgccttttcaaaagactatgccactcctcgtggccacatgcatgccattgaagacattcgtgccacgttgcgaacaggagcacctcagggtgaaaaagacggccctcagccctctacttgctggacctgcaagagtcctgatgtaccgcgcatgatgcaggaaataggggtagattcattctacaataacaagtgggctgctttcggcgatgagattgtgaatccgataggctgttcagattgtcatgattcagaaacaatggatttgcatattagccgtccggccctgattgaagcttttgcccgtcagggaaaagacatcacaaaagccactcctcaggcaatgcgctcgctggtgtgtgcacagtgtcatgtggaatattactttaaaggagacggcaagtacctcactttcccatgggacaagggcatgacggtagaggccatcgagcaatattacgatgaagccggcttttctgactatacgcatgctttgagccgtacaccgattctcaaggcacagcatcctgactatgaaatttcgcagatgggcattcacggacagagaggagtatcgtgtgccgattgtcacatgccgtataagagtgagggaggaatgaaattcagtgaccatcacatccagagtccgcttgccatgatagaccgtacgtgtcaggtgtgtcatcgtgaaagtgaagaaacattgcgcaataacgtgtatgaacgtcagcgtaaggccaatgagatcagaacccgtctggaaaaagaactggcttcggcacatatcgaagctaaattcgcctgggataagggagcgacagagaatgaaatgcaaccggtattgaaactgctgcgtgaagctcagtggcgctgggattttggagtagcttctcatggagctgctttccatgcacctcaggaaattcagcgaatcctgtcgcatggactggacagagcactgcaggcccgtctttctcttgtccgtattctggctaagcacggttacacggagagtgtgccgatgccggatatttctaccaaagagaaagcgcaggagttcataggtctggacatcccggctgaaaaagctgctaaagaacgtttcttgaatgaaacggttccgaactggttgaaagaagcaaaactgaaggaacgtatcatttaagtgttatgtggaaaaatacttgggggataaaagaaggaataatgacctgtgcgggattgctcgtcataggtcttattcttcatttgatgacgggtggagtagactggaacagcttttcctggccattgaatttgtgtgtggcagtggcttacctggtggggctggtggcattgtattctttgcggaaaaagctttatttcgtgcgctgggccatgtcgtacaaagcggcgattccttcgctggcagctgtgtcggtccttacattctgtatgggtatgattaagcaggtcccgggacatgtacctgctgagggtatttccatgtttaaccgcatgatttcatggtggcctttcgtgttggagtattttgggatgacgtccatcgtaggactggtatcgctcaagcacctattttcatttcggtttcagaagataccgtttctgctgaatcattttgggttattcgtggcgttggtatctgctacactgggtagtgccgatatgaaacggttgacgatgaatacacgtgtgggtcaggttgaatggcgtgctacggacacgaacgggcagttaaccgagttaccactggccatcgaactcaagaatttcagtatagaagaatatcctcccaagctgatgctgatagacaatgctaccggaagagctttgccagacaacgcacctgctcatctgcttttggaagagggtgtcagtcagggtgtgttgcccggatggaatattgaggtacgtaacaagatagatatggctgcctccgtgtcaggagaagatacggtgaggtacgtggaatggccgagcatgggagctacgtgtgccgtccatgtcagggctacttctgctgatggaaagcagatggcagacggctgggtaagctgcggaagttttctgttcccgtatcaggcgctccggctcgatagtgtctgcagcctggtgatgcccgacagagagccacggcgcttctcgtctgaggtgacaatttatacagagacaggaaaaaagcttgagcagacaattgaagtcaataagccggcgaaagtggaaggctggaaaatctatcagttaagctacgatgagggcaaaggtcgctggagtgatgtcagtgtgtttgaactggtgtcagacccatggcttccggtagtttatgtgggaattgtaatgatgatgttgggggctgtatgcatgttcgtaacggcccagaagaataataagtgttgagaagaatatgctgaattgggactggtttagttattttgccctggtggctgtgctgtgctggatagctggtgcatggagtgcctttaaggggagtcgtctgcgcgcatgtgcgtgtacggtgttagggcttgtggtgtttggtacatttatcagcttgttgtggcattcactggagcgtcctcctctgcgtacgatgggagaaacccgtttgtggtattcgttctttttgccttttgccggactgattacttacataaggtggaaatataaatggatattaggatttggcacattgccgtcggttgtttttatctgtgtgaatattctgaagccggagatacacaataaagcgctcatgcctgccttgcagagtccctggtttgctcctcatgtcattatttatatgttcgcttatgccatgctgggagcttctgccgtgatggccatttacctgctctgggtcagaaagaaccggtgtgacgagaaggaaatggccttgtgtgataaccttgtatatgtcggactgtcgttcatgacactgggaatgcttaccggtgccttatgggcgaaggaagcctggggacattactgggcgtgggaccccaaggaaacttgggcggctgtgacctggttttcgtatcttacttacattcacatgcgaatagggttacagcagaagcgtcggttgtcattgtcggtcctgctgatttcttttgtttttctgcagatgtgctggtggggcattaattacctgccttccgcacaaggaagcagtattcacacctataatatgaactgataaaaacgctgagagtatgagaaaaagaattttgtctgcatgggcggtggctttgcttcttgggcaggtgtccttggtccatgctcaggagaatgaagaaagtcatttttgggcctcagcccagattcgtacaagaggagaataccggaatggcgcgctgtctccccgcggtgagggtgataaacctgcggggtttatcaatgaacgtgcccgactgactttgggatatgaacgcaagaagttgtcgttgaagttctcggcacagcatgtcggtgtgtgggggcaggatgcgctggttgacaaaaacgggcgttttatattgaacgaggcttgggctgcattccatctgaatgactcgtggttcatgcagctgggaaggcagtcgctggtgtatgatgatgagcgcattttgggaggactggactggaacgtggcagggcgctatcatgatgccctgaaaataggctacagacatggagggcatcagctggatggtatctttgctttcaaccagaatgacgagaccctgataggcggaacatattatgacagcagcaagaccaaactttataaaaatatgcagtccttgtggtatcattatgatttcgcatctgcacctgtgaaactttctgtgctggccatgaatctgggtcaggaaggaggtgatgccgaaacccgagagtcggatacacaatatatgcagacggtgggcacgtacgtacaattcaccccggcctcatggaatctgtcaggatctttctattatcagacaggaaagaatgtatccgcacgcaaggtttctgctttcatgggaagtgtgcgggcttcgtattctatcaatgacagctggacggtcaatgtgggaactgattacctgagtggtagtaagaagtccgatgccacttaccgggcttttaatccgctgtatggcactcatcataaattttacggagcaatggattatttttatgcgtccgattttgtgaatggctatgcaccgggactttctgacacgcagataggagtaggttataaggtatcttcttctgtatcgatgggactgaattatcattatttcgccacaggtgtgaagctggagagcctgaaccgtaccttagggtctgaactggattatcagctggactggaaaatcatgaaagatgtcagcctttcggtgggttactcgctgatgagaggaacttcgacaatggatgtcgtgaaaggaggaaatcacaaaagctggcaagactggggatgggtgtctttgaacgtcaatccgactcttttcaaaaaataatagttacgtgcgcaataaaaaaggacaaggactgttccacattgaaggagcggtccttgttctttatataatgccttttatggcttttcggttcagttcgatgtaattgccttctttccttttgaggatgccttctttttccatcttattgaattcggtagacagggccggacgtgtcacgttaatgtattcggccagttgcgtaagggtatgcgtcagtttcacggtagaagtgtctttatccagctgtttcagtaaatagaccaggattctttcgcgaatggtttttcgtgacagcacgtccagtcgcatggtggtacacacgttgcagttgcctgatacgcagagaaaacttttcagcatatccggatatttgctgataagatggaaggtggagtccttggtggcagtcaggaggacagacttttccagtgtacggaatgtggcggggaaacggttgtctttcttgaacaggtgaggggtggcgaaagccctaggcgactcaatgtgttcgattaagacttcattgccgttggcatcgataatgttcacctccaaggttccttcaagcaatacatacagattacagcatatatctccttgctccaggataaccgtattctcgttgatttcctgaagacggaagtcaagtctttttagaatctcacttttcaggtaatccggcagttctttaaagagtggaatagaaaaaagtttttccttgtaataatcgttgaatggtatgcttttcattatctgtctttctgcattttcttttgcaaaaatatgttttttgtttattactttcaatagaaaggcaggattaatctgtttttgtgagagtgttaattaatccccttgtcataaatcttacatgcagattgactggcgagccgtatttttgtgaaacaaatacaaaggaaaaatctgaataaaaggaattacagatgagaaaagcaagtagagaaatggatagtcagtgggctttggaggttatgcgcagggctccttatatcacggtcagctttacccgggtcgacggaagtgcatacggggtgccgctttcactggcttgtacaagtgatgacgtgtggtattttcattgtgctcctgaaggggataagctggatgccattgccgtgcatccggaagtatgtctttcggcggttacgaagtgccagcctactgtggggccgaaggacggcacgtttacacttcaatatcgttcggccatcgcttttggcaaggcggaacgggtgacggatacggaagagaagattgaggcgcttcgggccatcagtcaacgtttcctgcccaagcatatggatgcgtttgatgaggcggtgcagagaagccttcatcgtacggaggtggtacggattactttattaagccctcccaccggcaagcgtaagcaatatgacaagaatggagatgaaatgaaatacggcaggatggaatgatcttgccgcaggctatatcgtaaaatgtaaaagatgatggaactgtttgatgtgtattcggtttttcccgtgaatatcgtaaggggaaaaggttgtgaggtatatgacgagaaggggcaggcctatcttgatttgtatggcggacatgccgtgatttcggtgggacattcgcatccgtatctggtgaagtgcatgagtgagcagctgcaacagctgatgttttattcgaattttgtcataaataagttgcaggaaagactggctaatgagctgggtgagctgtcggggtatcctgattatcgggcgttctttgtcaactcgggagcagaagccaacgaaaatgccctgaaactggcttcgtttcatacgggaaaaaaacgggtagtggcttttagaaactcttttcatgggcgcacgtcggcggctgtggaagtgacggacaatcctgcccttcatgcaccgattaatacgaatcataacgtgtattttgcggccttggatataaaggaagtggaaacggagttggccaagggagatgtgtgtgccgtaattctagaaggaatttcaggagtagggggaatccaggtccccgatgaggactttctgcggcaattgagggaactgacgagacgttatggggtggtattggttcttgatgaaatacagtcgggctatggtcgtacggggaagttctttgctcaccaatgggctggcatcaaaccggaccttatcactgtggctaaggggatagccaacggatttcctttttcgggagtcttgatcagtccgatgtttgccgcccgaaaaggaatgctcggtacgacgttcggtggcaatcatttgggatgcgccgccgctctggctgtgctgaaaattatccgcgaggagaaactgatagagaatgctcttcatacgggagcgtatctgatgcagcggttgcaggaactgcactctccgcttataaaagaaatccggggacgtggactgatggtgggggtggaactgaccgtgccggtgaaagaggtacgcgaacccctgctgtttgaggaacggatttttaccggctattccgggttgtatacattaagaatacttcctccgttgatactttcaacgaaagaagtggatatatttgtagggagtttgaagaaagtgctggatggatattatgaaaatagcagataagctttataaagttttcgttgttgcgggtagcgaacctttaggaacagcggggattcaggccgatatgaaagccatcgtggcttgtggagggtatgcggcaggagcagtgatatgtattgtagatgaggacacaactcatgtaaaaggagtacacttgataccggcagatatgattgcaggacaaatccgttctttccttggagatgtgggggcagattgcataaaaaccggtatgttgtattctaaaaatatcattcggcttgttgcaggcatattagatgaatatagctcgattccagttgtcgttgatccggtcatggttacttcttcgggtgacaaattgttggaagaagatgcggtgcaagcttataaagattacctatttcctcgtgcttctatcctaactccgaataagaaagaggctgagtggttgtgtggaaaggagttgaatgagggtaatatagaggaatgtttgaaggatttgagccgttggggaaatagtgtagttataaagtcggtggagaaccgtgatttctttatcgattattattataatccggtggagaaggtgatgaaggtttacaagaaggaaggaattcgaacccgaaatgtaaatggaacgggagatagttttgcttctgcaatagcgacttttttaagtaaaggttatgggattgagtttgctgttgctgaagcggaaaggtttattcagcagtccattgagttaggagcccgctttaagtttggaagaggattcggtcctgtatatccttattatgaagtacaagaataaatgtgtaacaatacgaaaataatatgaaaacaactgaatttatcggggctgcggaacggcagcttcatgaactggcaggcagaatggtagcctataatgcaggtgacccgaagcgtatacaacatttgataaaagtacattattttgcccgtatgattggtttggcagaacatgtggatgaggctactcaactgattttggaggcggcagctattgtgcatgacattggtatccggatttgtgagcagaaatacggagtctgcgatggaaagcatcaggagctggaaggtccggacgaagcccggaaactgctgacggatatggggacattttctgaagtacaaatagaacggatatgctggctggtagggcatcatcatacgtatgactccattacaggaatagactatcagattctggtggaagccgattttctagttaacatttacgaagataatctgccggccgatgctattcgcaaggtgaaagaaaagattttcaaaacctcggcaggacgggcattgctcgatacgatgtttggagttgaaaacaatacgctctaaaaaaaagccctcatttctgcatgtggcaggaatgggggctttgaagttattgaatcatttttaggggctatagaagaacttgggaaacagaagttttttccgtaattttgaaacagtgtatttttataatagaggtatgaataaatttagcaataaatcgattgaagaactcggtttctatgtatattcgttagtagaccctcgagatggtaaaatcttctatattggaaaaggatgtggaaatcgtgttttccagcattgtgaggcagccctacaaggggatgaagtatccttaaaattaaatttaattcgagagattatttctttgggattacaagtagagcattatatacttcgtcataaactttctgaaaaggaagcttttcaaatagaatctgttcttatagattttcttacatatcccaaatttaatacggaacaaatactaaccaatattgtaagtggacatcatcagtgggatgaaggtattaaaaccgttgatgagattaatgcaatctatgattgtgaacgaattaagataaataacaatgaacatttgttgttggtaagtttgaatagaagttttgatgatgcaaaagctcaaggtgtttatcaacgaataaatatttatgagaaaactcgtcaatattgggcaatagcaaaatctcgtgcagctgaaatagattatgtgttaggggtatatcatggaattgtacggtcggtaattaaggttgatagttatgattggactttttatgatgaagagaaaaaagtccgttttagtaaagaacgctgttgttttcatggtactttaatagcagattcaccttatttgaataaagatgtaagtgattatccttttggaagtggaggggcaattaggtatattccatgaggataatgattagtaatgattgaatatcgtataattatatggaaaaagtttttatacttagatggtatggtccatttttatttgagcaacttagaacgtgggaaatttctcaaaaaaatactttcaatctatatttgataggtggcaaaaagaaatattcaaagaaaaaaattcattattatattggtaaagcggaaagatatttgttatcggatagattaaaggataagaatcatcatataaatgatttttcaagtattaatgaaatatgggtaggaacgattattaataaaaaggcaacgcataaagatgttttacttgtagagaagatgttaacatcatattttgttgctgaaggagaattgttgaatgtcattaataaaaaactgccagaagaaagtttatatttgataaatgaatggattcattataaacgtaactctgaatgtttacggcttcctaaaatttctataggtaatatgatgccagatgttataatttacaagaaagataattattcagatgaatataaattatttgtttcaaataagttgaaaataacagattgattataagtcatttttataaagaataaggacttgataaaaacataatagtatatatgtgattgataatgtttgaagtagtcaaagataactaaatataccatgaaaaaacaatttatcttcattttatgtggcttgtttttatgtgcaggtacgatagctgccacagattacaacgtgcttcagcagggagctgtcggtgacggaaaaacattgaatacaaagtctttgcaatcggctattgatgcacttcatgcaaaagggggcgggcaattgtactttcctgccggacgttatttgaccggcagcctgcaactgaaatcgaatgtgacactttacctggaaaaggaagcggtgctgttaggaagtacgagtccttatgattatccaggtttcagtaccgagaaggaactgaaagtcaacaatgaccattttgaccaggcgctgatttatgcggaaggggcagagaatatcggcattacgggagaaggatgtatagacggacagggcagggaactggcgctgacgattgacagcctgcatcatacgggagaactggtggacaaacactataatacgtatcgtaaacggccgaacacacgaccaaagttgctttttatgcgtaattgccggaaggtggagcttcggaagactgatttccggagcggtgcggcatggggactttctttttctctgtgtaccgacctgacgattgatagtctgcatgtggaaaacagggcgtactggaacaatgacgggattgacatcagcgattgtaaggatgtgcgtatctccaactgctttatcaactcggcagacgatggcatttgcctgaagtcgcataaccggggagcatggaatgaccgggtatccatctccaactgccacatcatcagcagtgccagtgccatcaagtttggtacggaatcgttgggtggattcaagaatgtgaccatcgataatattcgggttaaagatactttccgttcagccatagccattgagtcggttgacggggcggagattgaaaacgtgcaggtgtctaacgtacatgcggtcaatacgggaaatgccatctttatccgtttgggtcaccgttcgggtgagcaaccggggtatttgcggaatgtgacgattaaggatatgtatgtggaagtgcctttcggtcgtccggacatcaactatgacctgcgcggaccggcggtaacgttctttcataatccgttcccgagttctatctcaggcattccggggcatgatattgaaaacgtgaagctggagaatatagagattgtgtatccgggacgtgctacgcgcggaatggcttatatgtcggtgagccgcttgaaagacgtgccggaaaatgaaaaaggatacccggaatttaccatgttcgaggaactgccttcatggggattctatgtgcgtcatgtgaaaggtatccagatgcacaatattaagttgcgtttgcaggaagatgatttccgtccggcttttgtgttcgacagggtaagcgatgtacgtctttcggacatcagtttgccggagaataaaaaggcggggcaggtggtgctgcggcagacaaacttgcaatcggctgataatgcggtgaaagaatatgtcagggaagtagaataggtatcaggagttacttatataaaagcatgatgccttccagggtcacggaatgaatagactcgggaaggcatcattatttttatggctatcggatttattccagacaggcatccaggtctttgataagctgttccttgtcaaggtgctggccgatgaagacaatcttctgcatgcggtcgccatagtgttcatcccagtctctcagcaggccgggttcgcgcttcatcagttccacgatttcttcttccggctgggtagcataccagagtccggcttctgaaatctgtttctgccgtccggcctgttcgaacaggaacgacatgttgcggttgtgggcaaagtaacatactcccttggcacgaatcacgttgtgaggccatttcgttgcgacaaagcggtcgaacttatggatgtcgaaggcagggcggcgatagtacacgaaactgctgatgccgtattcctctgtctcaccttcttcatggtggtggtgatggtggtagccttcgtgtgagtgttcatgagcgtgtgcatgattgtgctcttcctcgtggtgatgttcgtgttcctcatggtgttcatgtgtttcatggtgaggatgcgcttcttcttcggatacggggcgttctatctcacgaatccatccggcagaagtggccacccgtgcatagtcgaaacggcgggtatccacaatcttgtcaaggtctaccttggcatagtcgcattcaatgatttccgcacggggctgtagggtacggatgatgcttttgatgcgttcccgttcttcgggagtgacttccgataccttgttcagcagcacggtggtacagaactcaatctgctggatgagcaggttggcaatgtcttcctcttccaagtcctttcgggtaagttcgttgccaccgtcgaattcgctttgcagacggagagcatcgaccacggtcacgatgttgtcaaggcggcaggttccgtacttggtgtaggcaccgcccaactgggggatggaacagatggtctgggcaatcggttccggttcgcagacaccactggcttcgatgacgatgtagtcgaagcgctgcattttcatcagctcaaatatctgttcgataaggtcggtacggagggtacagcagatacagccgttctgcaaagccaccagactctcttctttctggccaacgatgccgcctttctgtatcagttctgcatcgatattgatttcgccgatgtcgttcacgatgacggcaaacttgatgccttcgcggttgctcagcaggtaattgagcagggttgtttttccgcttcccaggtatccggtaagcagaagtataggtatttcttttgtttccatgtgcaaatgttttttttacgtgcctgcaaagttagtgtttttctgcaaacggtgtgcgcttctttttcgcagaagcaggtttaactttcgttataggtcggtgtcacgtatgtgacaaattttctctgccggagggtctatctttgcacccgtaatcaataaaacgaattaaatatgaagacaatagactggaagcatacgagtgtgggacaaattgtggccgatgattttgcagcggcaagtgtgttcaagaaatatggcattgatttctgctgtcatggcaaagtgacgctggaaaaggcctgtgccgatttgggactggctgtagaagaagtggaacaggcattgctccatcagggtgaggctggtaacggacagattccgtttgcttcgtggccactggatctgctgatggattacattctgaagatacatcatcggggaattcgtgcccgtggaccggaactactggcgttgctggaaaaggtggaacgagtacatggggaagcgcatccggaactgcatgagttgaaagcactggtcagtgaatcattggaggatttggaaatgcatcttcagaaagaagagaacgtgctgttcccatatctatatgaattgtacgcagcaaaggaacagggacagcgtatggccccgatgcactgtggtacgatagcgaatcctatccgggtgatgaagatggaacacgagggagaaggaaaccgctacctgcacattattcagttgacgaatcacttctccgtacctcaggacggctgtgccagctaccgtctgctgatgcaggaattggaagcgtttgtggatgcgttattcgagcatatccacctggaaaacaatctgcttttcccgcgctttgaggagattgaacgagaaatcgtatgttgatagtttgatattggaaagaatggataacaatgtggcgcatgcaggaaggtatgcgccacatttcataaatcagtaatcaattttatccaaaatccctgctaagtaagcaatggtgactccgtagttggtcatgggaacctgctgggcgcgggcctggccgatgcggttcagcacatacttgcggttgaacatgcaggctccgcagtgaataatcaagtcgtacggggccaggtcttccggaaagtccgtgcctgatacgatgtcgatttgcaggccttcaccgatgcgcttgcggagcatgttcgggattttcactcgcccgatgtcttctgccagcggagcatgcgtacatgcttcagcaatcagcacccgtgactccggtgtgagctgggcaatggcattggctcctttcatgtagtagtcgatgtcgcctttgtactgggcaaagaggacggagaaggaggtaagccggctttcggccggtttcttgtcatataccgtgcggaacacttgtgagtcggtaataatcagcttcggcggacgggttaaagtggccagcatggcatcgattttgtcagtggtacagctcatcaccaggcatttgcggtccagtagttcgcggatggtttgtacctgcggcaggatgaggcggcctttaggggcctggatgtcctgtggcatgaccagcatgacggtatcgttttcttctaccagccggcctacgatgccttgtgccatggtttcatccggcagcttgtttcgcagactacgcagaatgtcgtccagtccttttccggtgagggtgctcactaataggggaacctgtccgcattgctgttcgatgcggcgcatggtctgttcggcatcagacaataggtcacatttgttcagtatccagataacaggcacattcttttcctttaacaagcgttgccagtgtaactcttcgtccaggcgttcgtcggtacagaccatcagggcaatgtctgtcttctccagcgcacgctgtgtttgtcggatgcggagttcgcccagctcgccttcgtcgtcgaaaccagctgtgtcgatgaatacgcagggaccgagaccatggatttccatggccttaaagaccgggtcggtggtcgtgccgggaatatccgacacaagggctgtatcctgatgcgtcagggcattgatcagtgatgattttccggcatttcttttgccaaacagaccgatgtgcagccggttggcacggggagtatcgttcatatgtttaatcaggctttaagttcacacattagaaacggaagtcgcgttttccttcggcaatccgttccagattttccaaagctcttttgcggatggcgggattcggaatctcttccatctgcttgcggatcatgtcttcagccagtcggcgtgtttcgggcgaagcgtagtcgcagaggtattcctgaagcgtcatcaaggcattgggggcacagcagttggctatctggcccgtcttgaccagcgacatgaaacggtcgcccgtacgtccttcacggtagcaggccgtacagaaactgggaatatagcccagtttcagcagccaggccacgatttcatccaggctgcggtggtcactcacatcaaactgagcagaattttcttccggcagttcttcggtagcatagcctcccacgctggtgcgggaaccaccgctgatttgtgacacaccgagtgcaagtaccttctcgcgtgaacgctgcgattcacgtgtagaaataatcatacccgtataaggcacactgatacggatgacagctacaatcttctggaatatctcgtcggagatggcgttctcgaaggtcgaggcgtcaatgtcgtcggccgagcagatacggggcacgctgatggtgtgcgggcctacaccgtacgtcgcttccagatgttcggcatgcatcagcagtcccacgaagtcgtagcggtaggtgttcaggccgaacaatacaccgatacctacatcatcgattcctccctgcatggcgcggtccatggcctccgtatggtaggcatagttgctcttcggacctctggggtgaagcttttcgtaattctccttgtggtacgtttcctggaacagaatgtaggtaccgataccggcctcgtgcaggcgacggtaattctctaccgtggtcgcagcaatatttacgtttacccgacggatggctccgttcttgtgcttgatactatagatagtctttatcgactccagaatgtattcgatagggttgtgaatcggatcttctcctgcttccagtgccagacgcttgtgccccatgtcctgcagggcgatgacctcacgacggatgtcttcctgtgtcagtttcttgcgggcaatggtcttgttctttacgtggtaaggacagtaagtacaactgtttacgcaatagtttgacaagtagagtggggcaaacattacgatgcggttgccatagaatttctgcttgatttcacgagccaggcggtagatttcctccaccagttccggatcgttgcattccaatagtacagcagcctcgcggtgagaaagtcccttgcacaggcgagccttttcaatgatggaacgtatcagttccttgtcctggcttttactttgggcatattccagggtatcgagaatttcttcgtggcagataaattcttctgccttttgagaatcaatcttgtacatagctgtaatgtaatttatagtgttttgccgggataatctcctcggcttttatctatttcgtaaccaatggcagccagccgttgtgccagcagacgcagtccttcggcagcttctgagccaatcgaggctttattgtcatacaaggcataattctttcgctgttctaccggagagaggttgggcatcactacattggcacctgccagtatacctttctcgcgcccgtcgggtgtaaggcttgccagggcggtggtagaaggaatcaatgcctgcggatgcatcagccggaagatggaaagtagcgtgagtgtctgcgtgagactgccgggtgggcaggaagcgaaaggagtgtcatgatgaggcaggaaaggaccgataccaatcatctggggacggaactgttctatgaaaagaatgtcctctaccaggtggtcgacggtttgtcccggacttcccaccatgatgccagttcccgtctggaatccgatgcgtttcaaatcgttcagacaacgcaaacggttggacagcgacatgtcttcagggtgcaagcggcggtaatgtgcttcgttgtgcgtttcgtggcgcaacagatagcgattggcacctgcctgaaaaaaacgtttgtaggaaagtgtggggcgttcaccgagtgaaagggtgatggccacatcggggaattcggttcgtatggcagtaaccacttccgttaccctgtcatcgttcatgtagttatcttctcctccttgcaggacgaaggtacggaatcccaactcatatccatgccggcagcaggccagaatagtttctgcatccagtcggtatcgcttcaggtggcggttactttttcggatgccgcaatagaaacagtcgttgtgacaacagttccctatttcaataagtccacggatatagattctgtttccgaaatggctttgtgctacggcacgtgccttttgcatgagaaagtcgaggtcttccccccggcactccagcagaagggtacgcaattcaccgggagccagtgtctgctcccggtaaaggcgttcaataagttccctcatgggtttattcctggttattgttttcgtacttcaaggtacgtttcagtaagtcttggttcaactggcgttttccggctacagggtcgttgtgtgcgctcggaccggttacacatccaccttcgcaagccatcatctcgatgaactgtgcatccacttttccggtcttggcgtaagcgcggagtacaccgatgttcttcttcgtgaagtcagagaactgcataatcttgataccgttggctttcgggcctaaataagctttcactgctccggctacaccgcctgcctgtgcgaatccgtgtgcttcacatacagattcgtatgctaccttgtacgggttggcctgttccagttcgatgcccaagccacggaaaatcgggtgaagttcttcgaatgtcagtacgtaatctacgcactcgtcgcgctgtgcttcttttcttttggcgatacacgggccgatgaagacgaccttcgcattcgggtatttctttttagcaatgcgagccgcgtaatacatcggagagccggtgcttgatacgtaaggcttcatgtcggggatatgcttgttcaccagttcgatgtacgacggacagcaagaagtagtcatgaatttctgtccttcttccagtttttccagcagttcgtgtgcttcgttgctggtagtgtgcatggcaccttcagccacttcaattacatcggcaaagccaatctccttcaatgctccgtacacttgttcgatggtagctttgaactgtcccaatacggacggagccggaatggcaatcacttgttctcccttgcggatagcttccagcacgtcgaacacctgagaaatttcgaagatggctccaaacggacaggcattcagacattttccacaatagatacacttgctttcatcgatatgctcgatgtagtgctcgtccttgctgatggctttcaccggacaagcttcttcacaaggcaccggaatgtagacgatggcgtgatacggacagctcttgtggcagataccacagctgatacacttgtcgtggtcaatctgtgcctgaccagtcttcttgttaaagtgtacagctcctttcggacagttcatgtagcagcttcttgccacacaaccccggcaaaggttacttacttcgtagttcacctgtacacaagaagaacatgcttcgtcgatgacacagagaatattttccttgattctttccttgcgttccaatgctttgcgggcatattcagaaagcggagtcagctcatccgtttcatcggtcatatcccagcccagcagcggaagcaacttatatttagtaacggcacgttccttgtggatacagcagcgtcctaccggctgtgagcggcgagggctgatttccagaggaatgcggtcaattttttctactaattgattttctttccataaagcaaccaggttttccagcaatttatgccggacaatcattacgttgtttgtaaaagccataatcgaaataaaaaggtttgttagttattagttatcctaaaattatagagtccgtgtgcggtttactcttccgtttgtccctcggcagctcttagaatcaaggtcgtagctcccaaggtaataatagctccgtcttcaatgcggatttggtctttcggtcctaaaatttcattcatcaggaaagttcctgtgatactgtcgttatcgcgcagggtataaatgattttcccttgcttgttcttcttgacattgatgtagcaatgccggcggtccagacttgggtcattgctttcgatagggatgtcgatgtcattacctttgcatcggcggccgatgaggttatctccctcatgcagcggaagtacctgcttgtaggcaaatacgttttccacggccagtatgttgccgaaatcctgcatgccttctttctcgtcgattacttcctccttgcggttggcggcattcagtttcgattttccgatacggatgctgaactgcttcttgcagttgtcacagataaaaacgagtgactgtccttctccatacttggtttcatcaaactggatgaagttgtcacatttggggcatcttactcttttcattctgtttaaaagggcgtatttattttgaagtgaatacccaggcactcttgaattcttcctgattacgcagtgcctgcactttttggtaagcttcgcctgaagtggcataactatccagtgcgatgcggaagcgtccgttcgattcaagtacctgacaattcttgtatcctttctgctggaattttttcagttcacgttgggcatcgtccgatgtcggcaggctggctacgatgatgtaggccgttttcttgcttacagcaggctgtgcggaagccggtttcggcttttgtgtcgcttttgcttcagctttggtggcagccgttttggttacggctgtttttgctgcaggtgcggctgcaatcttttctgtcttcacaactaccggtttcagcgtgtttacgttgttgcggacacgcttttcgctcttctgtttctttacagccttttgtgcaactgctgctttcggagtcgtttgtatgctggtggctaccgactggttgcggatggcatcaaacatactgattgagcccagcgaagcataattcgcatcgtccatgtacgtgttttccaccggaacggagagcacgaagaacaggcatacggctgcagctatggccactacgttgcgcgtgaaatggcgcaaggagaaatgtctcttcggtttgcttgccgcttcatgtatttccggaatcaacggcttcggagaagacacaggcaatgtctgcagctgcggaagcgtgaaactttccagcccgtatagacttggagtgaagaaagatgcggctgccggttcaaaggcatagccgccgttcatgttataatagattgtacccacgttgtgcagggtgacctgaccctgctggtacaattggtcttttatttcagccacagtcttttcaatccggcgggttgcatcgggaaagtcggtgttaaaagcttgcatgtacgactgtaccagcagcccatcgttcattatcagttgcggattgaaaccaatggtgcggaggggcggcatgaattctcctttttggatggagtatgcagcctgccgtttatgggcaatgaatcctcccaagccgggaacgatgacacaatcattctccagcaataatacttctatatgtttggatagttcaatcatattgcaaaaataatacatttttctcttatgtggagtatctttcaacgggtattttttataccgataggggtttaaccaactcttctttttctatcatgtagtctgatatattcatgtgtcctgtatcgagacaattgtaaatgcacgaagcccccggcactgccgaaggctcctgttttttattctcttatctcacttttcaataaccgtcgatacaatccattggtggattctccgtgtgttctatcacgtgctcctttcatgtcaatatttatttgatggaatgtatttctctccattccatcagcagttcatcggcaagatattcatcgctaaggcaatgcatatccgcaactccattacttataagtttataagtttcagaatcataaaaaaagcaagcgcatcttcgtatttcatctgcaagactattccaaaagacctgttccaccttccccttttatcgggagaagtgggacgggaaactttcagtgtaccatgagttacagcatggcggcatacttgcgtacctgcttcagacgctccataaaagaggggtctgcagccgcctgctgcatattgcaatcaagctgcatccgcatcagtagcgaagcactgatacccaaagctgcctcgaagagcatcgctgtctgcgtagtaatcggcctgcggcagttgagaatgtcattcaataccttgtaggagatgcccatctgctcggccaatctgcgctgcgagagcttgcgttcttcggtctcttccttcagcagttcgcccggatgtatagggcgttgacagatgtattttcccataattattctatttataatggtttgataattcaagtatattgcagatggtcaccaccgtttccgatgagacctgttctaccgtgaactcaatgcggtactggtcgttcacacggatggaggaaataccagccttgtcacctttcaacacttcataatgaagcgagtggatgacgtaaagctcttccacgcttcttgcttgttccagcactttgatgcgtaactggtagcgtgccacgatattcggctggaaacgatgtttcttgtccgtcgttttcccttcctcgtacaattggcgcaaatagtccttatcaaagtttatctccattgctttccgtgttattattcacgtagcaaagataagagatctctcccatatatccacaaaaaaagtggaagtattttatatcactgccatcagtttcaccaatcatggataaatccactaccttcatatatacctcgtgtacatccttgcggagacttcttattttgtaggtagtagcttccaattcctgttgtctgttctgttcattgagcccaatatagacgatgccgaaaatgacgaatagtatcagcacatatcctgccgctatcttggtgcgcaggtgtctggttgctattgttttctgtttcatgcggtatacctcattttttatattattcttttctccttattaaagtgcagcccactgaccttgcggtagcgggctgcggtgtctgtatgatgttaccgggcacaatactcccgcccggaatgggagttcctttctttattgtggttatacttcggttgtattccgttacgggcggaactttttcccgcccgacggtttactgtttcttcaaggtaggcagctctccggtgagttcgtaacgccactctgagccgttcaaggcggcgttcatggcatcaactgcattctgccaggtgacggttgtaccgtccaccttgatggtgccgttggtgccgctatccattttgccaataccattagcagggttgctgctccagtagcaggcggtggtttggccactattgttgttcatacccacaatgccgccgacattgccttgtccgctgacagttcccgtggcatggtagcaggcggttacggaaccttgggcattaactcccaccacgccgccggcatagccggtagtcaatgtggcggtcacgttgcccgtggagtagcaggctatgagcgagcagttgtttcccaagttgcccaccacgccgccgacggtggagctgccttcgactgcggcggaggagtagcagcccacgatggttgccccgagatagctgcctccggctattccgccgacattgacactacccgtcacagtcccttccgccgagcagccggagatggtgccataattcgttcccacgatgccgccggtatcggtgaaccctctacctgtcaccgtgccattgaccgagcaattctctacagtgccgtcgttctgtcccgcaatgccgccgacgaacgtgccacctgttacgttcacttctgtcagcgttacgtcctgcaccgtgcctccgctgccgagacggccaatcagtcctacatagtccgttcccgattggtcaatcttcagccccgtgatggtatatttgccgccgccgtcgaaggtgccggtgtatggttggctttcagtgcctatcggcgtccactccccggtcagggtgatgttgccggtcagggtgatgtcgatgtcggtcttcccctcttcgttcaccagcttggcgaggttcttcagacccttctcgttgtccgtgttgtagatggtctgtccctggtcgtcggtcgtggtggtatagcccgggtcatagtccagcgtgatgttgtagaacttacccgccacgggggtgatggcagaggagagagtgcgctcctcggtgccgttcgcccgcagcttggttatcgtgtagtcgggcaccacgttcgcctcccagcagttgatggttgcgccgttttcggtatattcgcacggcttcatctctatccagccctcttgcgagccttgcactacctcacctttttcataagtacactgtgtataggtatagagctggaggctctgcacctggtcgagtgcatcgtccgaaggcgtgacgcgcaccttggccagttggtgggcaaaggtcagcgtgacgggtgtctggtagtctcccgtgcccgtggcgtacagcaggtaggcaagactttggctctggttgccgaggtcgatggtgccactctttgcggggtaccaggcggtgacggtatgttcgccggtgtcgctccagtacaggggtgtttcggctttggcggtgtggtcgtcctgcacggtgtagatgccgacctcgtccttgccgtctatctgtacggcgaacaggtcgcccgcgtcgaacacgctacccgtgccgtccgcaatctcgctgacgcgcgtctgcggtgtgccccagggctgtgcctcgccgccctccactccgagggtgatgcgggctatctcaagggggtattgtccttcgggcagacggttgccgtccgccagttcgtccttcgtgcaggcagccatggcaaggagcagggcggctgcggcaagaagcagatggatggaatgtcttttcttcatatcgggttgtctttttatttgtttccgtttagtgctgccgcctgcgaaggcggccgtcgcaccattctgtctatgggcagctccggcttgacgcttgcgccggggcagcggtgtgcggggattacaactctgcacttgcatcgttcgaatctccggattcccacgggttaattgtggggtcgctcacctcgatgtccttattgttgagcgttatgttgtaggtgtaggcatagcctgctgtgtagaaattggctgtgggtgtagcaggcagtttcagttgggcgttgtagctctgtccgttgtaagacactttaaggttaagagaggaggtcacttcctgcgggagaatgatgacttgcgaagtggtggcaccgcccagctgcatggtaatcggcgattcggaggctgcggttacggcagtcgtgccggtagccgtgtcgaatgtgccttcgtgcttcagcccctccaacgtgtagccggcaggttccgtttcgttgaaactgagaccatcgcctgccttgaaggtgaacttgatgagactcatgcagtggtggaacgcatggtcgccggtgaagctcaccgtcgggttgtgggtgtcgcctgtggctcccgaggcaaagaggaagtcgatgtccgcgccctgcttgtcggctgcggtgctgacggtcaccgttccgccgtcagactgatacggatagtaggcatggaaggtatgcgtttcagtgtcattgaaatagatggtcgtaccgtcggtcacgaacttaccgttctctctcttgtagggcacgttggtgaagcctgcgccggtgacgccgatgcggtcgccgtcggtccagtcggttccttccgaattgacgcgggttgcgggcgtaatgtcggcgataaacagggcggctaccgggccgtcattcaggttctcattgtcgttgttgcaggcggcaagtgtcaatgccagcgctgcgaaagcaaaaaatcttgtcttcatcttattcattcttaattattaattcttcattgtcttacatttccgcactggcatcaccaccttctaccgtttcccatccggtaatttcgcccttgccttcttccatgccgacgggggtttccagtgtcccggtcacacggtaggcggtggtcatatcgccgttaaagtccgcaagggcttccgtcaggtcgacctccgtgcgctgtgtgcgtccgccatcggtaaagacgatgtccagcaccagcgcctgcacgtctcccatcgtacccagcaggcgggcgtcggccgtgagcttgctgccgtcacgggtgaaggagaagaccgtggaggtcggttcgccgatggtctgtcccttctccatatcaaaaattccggctatgccgctgagggtggcggtcacgctctgtatcagttcggggcgtccctgcgtcacttccagttccagttgcaggtcacgtacacgctgctgcggaacagggttgacacgcagcgtgtcgtcagctgttacggttatctcctgactgacggtcttcagatagtccggcagggggattacggatgcaccgtccgcacggctcttgccatcaggggcattgacccgtgccattcgtccgtcgaaagtgaaaccttccgcacggttatagattaccatactgtgtgttcccggattgagcaggtcgggattggtgaatggcgagcctgtaatgtcggccaccttcccgtccatgtcgagtacatagttatcgtctgccgacagtcccgtcaggctgatggtgacagctcccttgtcggggtgcggcgtgtcataaagcgtgtccttcacgcaggaagagagcagcacggcggctgccattcccatcatatttatatattgtcttgctttcatattatatttttttagacataagaacaaaagaacaaatattatagggttaaccctgttgaccgtcagttcagtctttcattcttcattcttaattcttcatttaattttccataccaatgtcacaccggcattgatggggccccaccagtcctttgtctcgttgccgcggcgtactcgcacaccgtcaatgacttcatatttctcatagtcggcattcaggtagcccagaccgaggttgaaatcaagatctaatgccttgttcagccgcagccggtagccggcagtgatgccgccacccatcaggtcgccctgcttgcctgtttcggagagcttgtagttgaactgtccggccttgaacatagcacccagataccaggctttcttctcgcctatatagtaacgcatttccggagccacttcccaaagggcatatcggcggtctttgtcgctccagctccatgaagtccacgagccgtttacggcaatgccccacgatgggcagatgcgccattcaagccctaaatcgggtgtcagggtagcccagcgcagcaggttggcacgcagggagagatgataatcagttggtgttttggtttccgacggcgtgtcggcaagagtattgggtcgggcttcttccgccttgcgctgctcttcggcaagccgttcctgttcggcacgcttctcggcttccagtcgttcagcttccgccttgcgtcgtgcttccgcttccgcatccgtcgcggctgtttcctttaccggtaccgtcatgcgcacggtgacgaaatcaccttcagtcgcatggttgcgggtaatgaaattctcctcttttatttccgcacgtataatcagttcggatttcacacggttggcacggatctttgccgtggcaaggttctcggtttcactgcctaatgagttgcagtagccatcgacataaagcggcagcttgccgtcaagaattgtggctttgttgctttcgatacattccaacaggcgggcaagttccgtgtcattgccattccaaggcacgtagaacatgtcttcccttggcacgaagcggaaggtgtaggtcgtgtctgctttctgctgcgcaatgacaggaaaagtgactgccgtcagccacagaaacagggtaagaaaagtgatttttctgctcatgcttttatctattttactaattctaatacaatttaaaattttctggaatgtaaaataataaaaataatctatataaatttcactttttctgataaaaatgttgattcatgtgcaaaataggaagtatttgttattcagaatattttttttgtttttcgagcaatttttccgggagcctgtatcttgtttcgacaggctggtgaacaaccttctttttctctaaacccacttgtgaaatggccggttatctgccaataactttgctgcattttctgtttttgtcactttttattcgtatttttgccggaggaaatgtagaaattcatttacgcatgaaaaaaatgggcttgggaatgctccttgggggattaggaatgctggcaggatgtctgtctccccagcagcacggagcagaaaagcaggatgaaaatcaggaagtcatacaacggctgcaaggcatctggctggatgacaacacggaggcacctttattcaaaattcaaggcgacagcatttattatgccagccagattaatgccccgatgcctttttcggtgcacaatgacacgataacggtgtacagtgcccagcccattcattatttcatagaagaatgcttgtcgtacagcctgcgttaccgcacgtcggtgggcgagacggtgagcctgcataaggccgaatcggatacgttgtcgtttggtacggtggttccggtgaaggtggtagagaacgaggtgtttgaaaaagactcggttattttccatggaggagagcgctacagaggttatgcgtacatcaacccgaccaagaagcgggtgacccttgtcagtatcaatgaagaaggtcttccggtggaaaatatctactatgacaatatcatccatatctgcgtgtacaaggggaaggaacgtttgttctccaaagatataaataaggaaatgtttgcccgcgtggtacctgccgattttctgaacaacgccattctgagcgatatggactttgtgaaggtggatgaaaaaggttatcgttacgtggctacactttgcatccctgacggggcggcttgttataatgtccggctggatgtgagcaaggaaggaagcatcgttttctctcgttgagcgggaaactataatgaaaaaatatcctccagactgcgattttcacccaaacagtctggaggatattttttattctgcctgctctttgagcgaacggtttacttgttctatgtagttgaggatttcctgtcgtccggtcttgttctccgaagacgagatgaaatgcggaggcagctcttcccattgttctttcagtgtgttcaggaaacggtttacgctggccttcgtctttcccacactctgcttgtcggctttggtgaaaatcagggcgaaggggatgccgttttctcctaaccactcgatgaattccaggtcgatgcgctgcggttccaaccggctgtcgatgaggacgaacaggcaggtcatctgtttccgttccagcacgtagtattcaataagcttctggattttctccatcatcttttttccccgctgggcatagccgtagcccggaaggtctaccagataccattctttgttgatgaggaaatggttgataagcaaggtttttcccggtgtggccgaagtcatggccagtttgggattcttggtcagcatgttgatgagactggattttcccacgttggagcgcccgatgaaggcatattccggaagatgagtctgagggcacatgtcggcccgtgagttacttacgacgaactctgcgctggttatatccataggttatatctgtgagttgttttatgcaaaggtaatataaaaacgggattcggtggaagacttccttgaaaataatctccgcgaaatggaggccggttcttgttttatccgtatttttgccattcgtattaaagaaacgataagcatgaatcaacaatatccttcagttttactggaaaaagcggtgggggagtttgccaagcttcccggcattggacggaaaacagccatgcggctggtactgcacttgctgcgtcaggacacggccacggtagaggctttcagcagtgccatttctaccttgaagaaagaggtgaaatattgtaaggtgtgtcacaacatttccgatacggatgtgtgccgcatctgctccaatccgtcgcgcgacgtgagcacagtgtgtgtggtagagaatatacgcgatgtgatggcggtagagaacacccagcagtatcgcgggctgtatcatgtgctgggaggggtgatttcgcccatggatggcatcggaccttccgatttggagattgaaagcctggtaaaccgtgtgaaagaaggcactgtcaaggaggtaatcttggcgctgagttctacgatggaaggagataccaccaacttctacattttccgcaaactggcgagctgcgatgtgaagataaccgtcattgcccgtggaatctccatcggtgatgaattgcaatatacggatgaggtgacgctgggacgttccatcgtgaaccgcgtggcgtttaccggaaccctttaaagatagaaagaaatggaaaaaagaatgactcgtctgctccatgtgctggaagcggaatttgccttgttctggatactggtcgtggcagggtgtgtgttgtatgaaacggatgtgttgcctcaggggagtatggtgggcgatgcgcaggcagaatatatcttgcagactgtcggcatcttgctgacggtgtgtctgatacccttgtcgctgcgcatgttcagcctttcgctgacacgctatgtccgtcagttgtctttgcccgaagcattggtgagctaccgccgctggtgtgaaatccgtctggctatgctgctggctccggcgctgttcaatctgacggtgtactataccacgctcgatgttaccagtctgttgtgcatgggcatgctgttggtagcttcattgttttgtgtgccgggacgtggccgcctgatgcgggaacttgatttacagaaagacgaaccggaaaaatgaacatgtcatgaaacagggaaatatcagtctccgcgcacccgagccggaagatttggaggtgatgctctcttttgagaacgatgcggcactttgggaactgggtacggctacgggcccttattcccgctatcagatgaaacgctacatcgccgagagtcagaatgacttgtatgccgacgggcaacttcggttgatgatagtgtgcgagggccagggagtggccggtattgtggatgtgttttcctttgatgcacgtcacaaccgggcggaggtaggaattgtagtgcggaaagacttgcgggggcagggggtggcgcagacggcactttctctcctggaatcgcattgtttttccttgttgggtctccggcaattgtatgcctatgtgccggtggggaatgtagccagccggaagctgttcacttcggcaggctataccgaatgtggtatcctgaaggactggatacgggtaggcacttcttatcaggatgtgtgtttctttcagaaaatcaacggaatataggtcgttgtaaaaaactgtagtgtactaaataagttgacacaatttatttagtaacatgcgtaaaaatcgaaagtattcaaaggcagaatgtc

SEQ ID NO: 3861 - DNA, 18882 bp, Unknown
  gut microbiota DNA sequence
tgtcggggtagcgggattcgaacccacgaccccctgctcccaaagcaggtgcgctaaccggactgcgctacaccccgaagtgtctttctcaaaagcgatgcaaaggtatggctttttattttaatatgcaaatccggacgctctttttttgtaagaatttttcgaagatttttaaaatcgtttgaaattcaatggaatagaaaaatctttttttaaggcgtccggatgtgcgtgacttatttctgtggcttcagccagcggtcaagccagttgaagaaagtgcgttgccacaaaataccgttctgaggtttcaatacccagtggttttcgtccgggaaaatcagcagttcggcaggaatgcctctcagtttggcagcgttgaatgcggccataccttgtgaggccaagatgcggtagtctttctcgccgtggatgcagaggataggagtatcccatttgtcgacaaacaggtgaggagagttggcatagctacgctttacagctggattgttcttgtcccagtacgggccacccaaatcccagttggtgaaccagagttcttcggtttcgagatactgctgctccatgttgaagaatccgtcgtgtgcgatgaaggccttgaaacgcttgttgtggtgtccggccagccagtacactgaatatcctccgaagctggcacctacgcagcccaggcggtctttgtctacgtacggttctttggcaatgtcgtcgatggcagtcaggtagtcgtccatgcagtgtccgccgtagttggtgctgatttcttccagccattccatgccgaatcccggcagaccgcggcggttgggagcgatgatgatgtaatcgttggcagccataatctggaagttccagcggtagctccagaactggctcacggggctttgcggaccaccttcgcagaacagcagggtggggtatttcttgttcgggtcgaagtctaccgggtagattacccacgagagcatgtctttaccgtcgacggtctttgtccagcgggcttctactttacctaacttcagctgcttgaagatgtggtcgttttcctgcgtgatgcgggttacctcgttatccttgtccaggttgacggtgaacagctcgtcagcttcgctgatagagtggcgcttggtgagaagctgcccgtcgcccagcatttctacagaagcatagtcgtacatgccttctgtaagctgttccacttcacccttcaggtttgtacggtgaatcatgctggtggcatgccatacaccggtgaaatagagtgtctggttgtccggagcccagcagtagctgtctacgcccgactggaaggcttctgtaacgtaagtctttttgccgtttttcaaatccattacgcaaaggcggttgcggtcgctttcgtatccgtcgcgttccatactttgccaggcaatgaatccgccgtcgggggagaactgcgggttcgtgtcgtaacccatgttcttgtcggtagagtcttccttgcagagattgcgggtctgcttggtttccagattatacaggtaaatgtccgaatcggtagaaatagcatattccagtccggttttcttgcggcaggtatatgcgatggatttggagtcaggactccaggtaagctgttcgatgccaccgaaaggcttcatcggcgattcgtagggttcgccggccaggatgtcggttgtttcgcccactttatttccggcaaatggagccacgaacggatgcggtacggtctgtacccattcatcccagtgcttgtacatcaggtcgtctatcaccattccactggccttgtccaggtcaggatacttgtcgacggtgcgttcgccgtatttcacctgtgagatgaagagcaccttgctctcgtcgggtgagaacttgaatccgtcgattcccccggcaaatgaagaaagctgtacgcgttcgctgccgtcgggattcatttcccaaatctggctgttaccgtcggcatcgggtgccaggaaagcaagcttgctgccgttcttaatccatgcaggttctccttcgctggcagctgtagtggtgagcaactggttgtctgaaccgtcggcattcattacgtagattaccaggtggctcttgttttctttcacactgtagtaagacaccgtgtaggcaatgcgtttgccatcgggcgatacacaggaacttccgatgcgtcccatggcccagagtgtttcaggggtcatacggccgtcttttaccgtaacctcctgtttgccgatgatggggccatctgtctgtgcggctttttcaggacctacacaggccgatgtggcgagcatcatggctgctgtcatagtcataaaatctgtttttttcatgtgtttatttgatggtttaatgattaaaattcttcgttgtggatttttctttttgagtcactctcgagttcctttccgcggtatttgcaatagacggtttctgcgtcgtgccctgtctggtggcagtgcggacactggcgttctgcctgctttttctgctggcttaccatggctgctgatacgattcccgtaggtacggcaataatggtgtaaccggtgagcatgatgatggccgacagaaatcgtcctaccggggtaacaggggtgatgtcgccatagcctacggtggtcatagtgacaatggcccagtagatactattgggaatgttgttgaattcagacccgggtacgtcgccctcaatcatgtacatgactgttcccatggaggtaaccaagatgaggacaaaaaagaaaaatacggatattttcggtgcgctgatgcgcagggagcgcagcagcagattgccttcactgatgaaagagaatagtttgaagatgcggaatatccggatgagccggaaggcccggatgaccagcaggtagtgtgcacccttcaggaagaagctcaggtaaaccggcagggtggccagcaggtccaccagcccgaaaaagctgaatatgtatttccggggatttttcaggcagtaaatacgggccaggtattctatggtaaagaagagagtcagcaggtattccaatagtcgcaatatccagtaggctgtaggagaaaacaagtgcatgctttccagtatgaccatcagtacgctgacaatgatgctgctgattaatatgatgttgaacagccttcctttcggtgtgtctgattcgaaaacgatggaatatactttctgctttaatgtttcattgtgcaggaaatgctgccatcgggtatagagttttgaaaagtagttcatggttttacctttgtttctgcaaaggtaagacaataaatggaaaaagaggaatgtagcagaaaaaagagcgcccctcgatggcttgtctgtatgccattgaggggcgctctgcggtatgaagataatctttttattttttcttacctcccatgcgttcctgacgctctttctgtagacgttcctgctctttctgcagggcttccagtttagccatcagtccgcttgccttttgctgtgaaggttctttcttgttggcttccagctgggcgagcagtttcttttcatcggtcatgcggcgcataatccacatggtaatgataccaatcagaccggagatgaaatagtagtagctcaatccggatgcatagtcgttgaagatgaagaagaacatcacaggcatgatgtacatcatccatttcatggcagccagctgtggattgttgcccatatcctgctgtttcatcatgataatctggttgagcaccgtagtgatgctgaacagcagacagaacaagctcaggtggttgcctaacaacggaatgtggtagctccagctgatcaggtcgtcgtaagccgaaaggtcatcagcccacaagaatccctgctgacgtaactcgatagcgttcggcacgaagaagaagagggccatgaacaccggagtttgcaacaacatcggcagacagccgcccatcggactgacattgtactggcgatagagggccatggtttcctgctgtttcttcagggcatcttcctgcttcggatatttggcgttaatcttatctacatacggcttcagggcacgcattttggcagatgagatgaaagacttccaggtggtaggaagtaccagtaccttgacgatgatggtcataagcaggataaccatacccatgctcagtccccagcctgacagccagtcgaacaagttgatggtaaaccagcggttaatcaggcggataatcggccatcccagataaaccaggtcttccagttcctgatctttatctttaaagctcaagtcgttgctggccagcagtgtcttgaagtggttcggaccaaagtagaactgcatgtgtgaagctttggcacctgtcgggtcgaaagctgtcttcatgtcggctgcatagttcttcatgtaaccgcttccttgctgttccattttcgattcgagtgtggcgttgtcaaagttctgctctgccatgaacacgcaggagaaatactgattcttgaaagctacccagtcgagtgattcaggaatggtttctttttcatcctttgtttcgctcaagtaatcgaaactgtcgtccaccggcttgtaggtcaatgaagtgtaacgctgttcgaagttgtaacctttctccatctggcgggcacgctgtttccattcgatgttcatgctcttggtagaaggagagaagaaattctgcatgccgctggcttgaacggtaaggtctaccatatacgagttgggcagcagtcggtagttgaagtccaggtgtccgccgttggctgcgttcagtcgcatggtcacggtagaatcggtcacattagtcgcctcgaaatacatctgctggctgagaatgttctcgttctttccttcaaaaccgaaattcatggaagcatcttcgccgtcgaacagaacgagaggctgcttcttctggtctttatactctttcagcagggccttgctcactcgtccgcctttgttggagaaagtcagctgaaccagctcgttctccagtacggtaaattgttccgtaccctgtgcggcctggaagaagagggaagtactgtcagggcgtgcagcttcaatggctgcagcagcctgcttttcctgggcttcctgttgttgcttgataacctgttggatagagtcctgatagtgctgtgcgcgtgctctttcttcctggctggggcggttgtagataccgaatcccacgataaccgctccaatcaggataaagcccactaacgtgtttttgtccatttctatttctttacaatgttatgtttggtttatttgctgatagctgccttgatgaaggacaggaacaacggatgtggtttcaataccgtactgctgtattccggatggaactgtgtaccgataaaccatttcaaggtcgggatttccacgatttccaccaggtcggattccggattgatacctacgcacttcatacccgccttttcgaattcttccttgtagctgttgttgaattcgtaacggtgacggtgacgttcctggatgtgttcactctggtaagcttcataagtcttggagttcgggtcgataacgcattcgtaagctcccagacgcatggtaccacccatgttcgtgatggatttctgttcctccatgatgtcgattacattgtgcggagtcttttcatccatttcacggctgttggcatcggcatatcccagtacgtttcgtgcgaattcgatgacaatacactgcatacccagacagataccgaatgtcggtacgttgtgtgtacggcagtacttgatagctacgaacttaccttcgataccacgctgtccgaatcccgggcagatgatgacaccgtccatgtctttcaggtgctcttctatgttgtcgtcggtcaggttctcgctattgataaagtgaatgtcggccttgcggtcattataagttgcagcttgtgaaagggcttccagaattgatttgtaggcatcctgtaagtcgtattttcctaccagtccgattcttaccttctcagtagcattgtgacgacggttcaggaagtctctccacgggccgagagtaggagtttcacctaccggaagtcccattttttcaaggatagttacatccagtttctgttcctgcatacgcaaaggtacttcgtagatggtcggcatgtccattgactggataacggcgttgtcgtctacgttacagaacaaggcaactttctttctcagtcccatgctgagttcgtgttctgtacgaagtaccaggatatccggctgaatacctacagactgcagttcttttacagagtgctgggtcggtttagtcttcaattcaccggcagcagccaagtaaggtacataagtcaagtgtacgcacaaagcgttcttgcctaattcccatttcagctgacggatactttccaggtaaggaagtgattcgatgtcgcctacagttcctccgatttctgtaatgacgaaatcgaatttatatttgttgcccagcaatttgacattgcgtttaatttcgtcagtgatgtgagggataatctggatggtcttgccaagatagtcgccacggcgttccttgtcgattacactcttgtagatgcgtccggtagtgatgttgttggctttggtagtttggatgcctaagaagcgttcgtagtgtcccaagtcgaggtcggcttcatgtccgtctacggttacgtagcactctccgtgttcatagggattcagagttcccgggtcgatgttgatatacgggtcgaacttctggatggttacgctgtagcctctggcctgcagcaacttaccgatagatgatgagatgataccttttcctaatgaagaggctacaccacctgttacgaaaatatactttgtttctgccacaatatgaatatttaaaaattaaattcaacagtttaatgctgcctgctttcttttctcttaagaaagtgacagtcaaaatgccggtgagcaatatttctaccgacatggaagaactacttcttcaagtttgcaaaattataaaaaaaagctgaacccgcaaaagtaagtagagcaaaaccacgtttaactttaaatatccttacgttttccgatggatgtacaaatgaaattttaaacaaaggtgggtagaaaattgtttttaagtacaattagtaggtgtgaaagctaacttcttttagaaataaatcgtacttttgcacaagattttaagaatgacaaaaatgaaaaagacgagtcttttcttggtattgcttatggtgtgcggtgggttggccgcacaagaaatggaagtgtcttcggatgcgataaaatcggatacactaaaaaatgcggtagattctttgaatgtaacagctcctgtagacagcctgcagaatgcaacacagaagaaagtagttccggctgtaaagaaaaaggtggaacttcctacactggaggtgcggaatttctggcggttgatgcagaatttccgtcgggagtataacgcccagctggagcgttgggatgatatttatctgctgataacgggtatccgtccgaatccagattactataaattgtcgatgccggctacttattatgaggcaccgatagagcaggccttcagtatctctgactggaaaccgcagataccttttataaaagaaaatgtgctggatgcgcaattgcctcaggtggccgatttgcgtcattctgtgcaggtggataaggcggtaaatcggcagttgctttctttttatctgtcttaccccagtttggtgaagcaaaatgaggagaatttgaaaggcttgaaaccgatatacggtgaggtgcttgtaaaccagccgcggaaagagaatctgctggacatgatgcagaatgatgagcttccgaaccgggtgacagaaaaagacctgctggttatcaagccgaatttctggacctttggtggaaatggttatttgcaattctcacagaactacatttcgaagaactggtataagggtggtgaaagtaccaaatcattgctttccggcttcacctggcaggcgaattatgatgacagacagcgtatccagtttgaaaacaagattgagtggaaattgggctttatcacggcaccttcggataccgtacacagctataaggctaacaatgacctgcttcgcttgagttctaaattgggttacaaggccttcagtacatggtactatactttgtcggctgagttcaagacgcagttcttctcaaactacgagaccaactccgataacttggtttctgctttcttctcaccggccgaattgaacgtcggtctcggtatggactacaagtttatcaaggatggcgtgtgcaatttgtctgtgctggtaaatccgataaactacaccttgtacagcgtggccagtgacagggtagaccctacaaagtttaacatcgaagccggtcataaacgggaaagtgtatggggttctcgtctggaatctacattgaaatggaaaatgttctccatcctgatgtgggagtcccgcttgtcttatacgaccaattacgagaaagtgctgggtgaatgggaaaatacctttacctttaccattaatcagtatctttctacgaagctgttcgttcatggtcgatttgacgatggggtgactcgtgaagaaggtcgaagttattttcagttgcaggaattgcttagttttggtttgagttatacttggtaaaatatttgctatggatgttttttttcagatgccttcgtttgtaacgatactggattttgtggggacttttgcatttgccataagtggtatacgtcttgcttggcgaaacggtttgactggtttggcgcttatgtggtgggactggctacggctatcggtggtggaaccattcgtgatgttttgctggatgtgactccagcctggatgaccgacccgatgtatctcatttgtacggctttcgctatgttctttgtcatcttgttcggaaagtatgtcattcgcctgaataataccttctttatttttgacaccataggtctggccctgtttacggttgtaggattcagtaaggcgtatgcgctgggttatccgttttggattgccattatcatgggtagtattaccggtgcagctggaggagtgctgcgtgatatatttatcaacgagattccgctgatattccgtaaagagatttacgccatggcttgtgtgattggcggactggtttactggatttgtctaatgctggacatggaatccgtacttgcacagattattggtggagtaaccgtgtttgtagcccgtattttagcagtgaaatataagattacacttccgattttgaaaggagatccggagccttagccccgagaagtctccttacttttcggctttttccgggaatgtaggaacacatttcattagatacatgattttccgctgacgcttgtacatgtaagggctgggttttccggaattgtattttcttggattcggcagactggctgcaataagtgcacattgtttgcgagtgagttgagaggccgtggtgtgaaagtgagctttcgccacggcttctgctccatatataccatctcccatttcgatggagttcaggtaaacttccatgattctttctttatcccatatcagttcaatcagtaccgtgaaatagacttcgaatccttttcttacccaggaagaggagggccataggaatacattcttagctgtctgctggctgatggtacttgctcctctggctttcttacgctttttgttttcttcaatagccttgctgatttccttgaagtcgaacccgttgtggctggcaaaacggttgtcttcagaggcaatgaccgccatcggaaggtgacgtgatattttttctttaggtacccatttgtgcttcatggccactttctcaccttttaccagttgttctacacttcgtatcaccatcaggggagtgatgtagaccggaataaatcttaaggcaacgacggaaagaatggtagatgcaaagaaaaagataatcagattacgtatgtatcttagaattcgttttctgttcattagtgtttgatgtggggatgaaaattatgccgagtctgaaagacccggcataaggatgtttgttactatgaaaattcgatttattgcaaagttccagcttcagcctgttgaatcatctgctggctggcatacatatacacttctacacggcggttttcctgacggcctgcagcagttgagttgtcggctacgggattttcttcacccatacctgtaacagacttaatctggctggaagaagcgccacaggctaacagatagcttgatacactctgggcacgttcttgtgaaaggtccagattcttctggcggctctgctctgcggtactgtttttccaaccggtattatcagtatatccgtagatggcaacgtccatgtccttgttttggttaagcacgttgttggcaaatttgctcaatgcagatttggcagaagtacttaatgtagcactgctggtattaaacaagataccggagtcgaaagtcacttttacggcttgtaatccgttgttgtcagttacttgctctacctgtgcaccttcaatctgttctgcctgtgcggcagccttgtccatcttcttaccaatcagtacaccggcacctgtacctacggcagcacctacagctgctccaatggcagctccttttccgtgaccggcgatacctccgatcaatgctcccagggcagctccacttcctgcaccaatcattccacctttggctgtatttgtcataccacacccgctaaataccaagcatgcactcagtaagatagccatagaattcattttcttcattttgtttcgtttttagtcgtttagttaatatgcaaatataggatagtttttcatcgtttcatttacgcggtgacgtacggaagcgataacctcttcgttgtctacatttgacagtacggtttcaatcatttctgcaatttcgtacatcaagtcttctttggcgccacgggtcgtaatggccggagttcccagacggatacctgatgtctggaatgcagagcgagtgtcaaacggtaccatattcttgttgacagtgatgtcggctgctaccaacgctttttcagctacctttcctgtcaaatctggatatttgctgcgcaggtctaccagcatagagtgattatctgttcctcccgatacgatggtgaaaccacgatccatcaaagcctgagccaatacacgggcgttcttctgtacctgaatttggtattctttgtattccggttgcatacattcgtagaatgctacggctttagctgcaatgacgtgttccagcgggccaccctgaatgccggggaatacagctgaatccagtaactgtgacatcatcttgatttcgcctttcggagttttctttccccatggattagggaagtctttacccatcaggatgataccaccacgcggaccacgaagcgttttgtgggtagttgaagttacgatatgtgcgtatttcaccggattgtcaagcaaaccggcagcaatcagtccggccggatgtgccatatcaatcatcaggatagcgcctaccttgtcagcaatctcgcgcatgcgtttgtagtcccattcacgtgaataagcagaaccaccgcctacaatcaatttcggatgctctctcaaggcgatttcttccatctggtcataatctacgcgacccgtctctttgttcaggttatattcgcatggagtgtacagaatacctgaagtatttactgcagagccatgagacagatgtccgccgtgtgccaggttcaaacccatgaacttgtcgcccggattcaatactgccagaaatacggcagcattggcctgtgcacctgagtgaggctgtacgtttgcccattcagctccgaaaatctgtttgatacggtcgatagccagctgttcgctctggtctactacttcgcatcctccgtagtatcttttcccaggatacccttctgcatatttgttggtcaggcaagaacccatagcctgcatgacttgttcacttacaaagttttctgaggcaatcagttcaataccttttaattgtctctgatgttctttctcaatgatgctaaaaatagaatcgtctcgtttcatgatatagttgttttaaagtgaaaaatcctgttagaaaataactccgaccgaaaaactcagaatgtttttccgttgttccagcttaatttctccttcattatgcggagcctcggtcaggtcggtattataagtgatagaacggatggtgttatgaagccccacctcgtagcggaaatcaaagaagatgttggatacgttgacggccagtcccacgactccgctgtactggaacggatattgtttttcctttatttcctgttggtggaagcctgtaaattcggttgaacaatgtttctcccatacccatgtcaccttgggacctacgaaaaaggccattccatacggatgtacgtcaatgaacttatagccgtaaagaatgggcaggtcaagcgttgtcatttttttcttgataagggcattctccttcagaatttccgagttggctaatgtgctggggatagaaacacttccttgagtgatattgcaggaaaattccggttgtatgaagtggtgtttcttcatgttgaagcggcagaacaccgcagcgaaatatcccaccttatagttgttctgtgcgagttccagttccttcccgttgatagaaatctcatccgtaaagaacatggaagagttgaagccggctttcactcccaggttgaagcgcggctgtttcagcgtaaccatgggcgtagttacggcctgtgcttgcagctcacatactgccagcacaccgcttccaataagggtgaatagggcttcttttatcataaatcagttatttctttttctctaccgaccatccgaacttgccgattttctctcctaattcgtaatatcccccatgggcataaaccagtaggttagattgagccagttcaaatttgccggtttccgagttcaggtatttatcgtctgctttcacgttgactacgtccgcaataaacatgtgatgtgaacctaaagcgacgatttcctttacccggcattcaatgcagaggggcgactcttcaatgagaggagcctgcaccatggctgcctttcctggagttaatttcatctcctggaacttgttgtagtctttgcctgaacgaactccgcaccagtctgtggcaaaagccatatctttggtggtcaggttaatgacaaattccatattctttttcagaatagggtaggagtgccgttccggtctgacagaaatgtaacacataggtgggttggtacagattgtacctacccacgctacggtgataatgttatattcttcttcgcagctgccgcatgtaaccaaggccgccggaagaggataaatcattgtacctggtttccagtcctgcttcatggtttacagaagtttgatgttatccttctgctgctctttttcgcagtaatggcacttcaacaagcctttttccttgtcgacgacgtggaaccatgtttgcatcggctcgttgttggtgatacatttcgggttgttgcatttcacgatacctttcagctcgtcaggcatttccacttctttcttttctacgacttcatagtcgcggatgatattcagcttgattttggaagcaactaccgacaagcggctgatttcttcttccgtaaagaagcggtcggcaattttgatgattcccttcttgcctaatttcttgctttcaaagttgttgcctattgtgatgttggcatcttcatcctgcagtcccagcaaggatacgactgtaaataacttattggaaggtatatggtcaatgactgttccgtttttcagcgcagccacctgtaattctttcttttcactcatagttacttgaattgaatagtttccggattatttttcagtatcagcttttacctcgtcgagtgtaattcctaacacatcgcaaaggatggcctggcgggcataaagaccgttcttggcctgttggaaatagtaagctttcggattatcgtccacgtcgtaagtaatctcgttcacacgaggaagcgggtggaggattttcaggttcggacgtgtatgttccagcatcttgttgttcaggatatacacatctttcactctttcatattccatcaggtcagtgaaacgttcccgctgaacacgagtcatatacagaatgtcggcatctgcaatggtttcttccgtgaaatcagtgtgttctacgtatttgatgtgatgttcctggcaatacagcttgtattcgtccggcattttcagttcgtccggagcaatgaaatggaaagtaggattgaagtgtcgcatagccatcagcagcgagtgaactgttcttccgtatttcaagtcacctaccagataaatgttcaggttttccagtgtaccttgagtcttatagatggagtataaatccagcattgtttgtgaaggatgctggtttgcaccatctccggcatttacgatgggcaccggagccacttcactggcgtaacgtgcagcaccttccagataatgtctcattacgatgatgtctgcatagttgctcaccatcatgatggtatccttcagcgtttctcctttagaagaactggtcacctttggatcggtaaatccgatgactcttgctcccaggcgattggctgccgtttcaaagcttagacgggtacgagtagatggttcaaagaacagagtggcaactactttttctgccagcaggcggcggttaggtttcttttcaaactctcttgccatttccagaagatacatgattttctctttggaatgttcggcgatagtaactaaacttctattttccatgttagctgtttttgattacttttataataccggagttcaaaggtaggtaaaaaaaatagaaatcccaccgtttttaggatatttcggactacgttttcgcatttaagaggatattgcggaaaataagtctttgttacaaagattttccgtaaatttgcggcttaaaagtctaattaatgaatataataaaagtatgagaaagatatttatatatgcaatgtggggttttgtgttcatctgcattgccgcagttgccatcgtttttacggccattgcaaaaggtaaaataggttatgttcccccggtagaagagctggaaaacccgaatctgaagtttgctactcaggtcatttctgaagacggaaagctgttgggaacctggtcgcttagtaaggaaaaccgagtgtatgtgggctatgaagacctctctccccatctggtacatgccttggtggccactgaagatgtgcgttttgaagaccattccggtatcgacgcccgtgctttcatgcgtgcggttatcaagcgtggaatcttcatgcagaaacatgccggtggaggtagtaccattacccagcagttggctaagcagttctattcaccgacagccgacaatgtaatggagcgtctgttgcagaagcctatcgagtgggtgattgcggtaaaactggaacgctattatacaaaggaagaaattcttaccatgtatcttaataagttcgacttcctgaacaatgccgtaggtatcaagacagcggctaagacgtattttgccaaagacccgaagaacttgaaaatagaagaagccgctaccttgataggtatgtgtaagaacccttctctctataacccccgtcgttttaatgaacgttctcgcggacgtcgtaataccgtgcttgaccagatgcgtaaggcaggcttccttactcaggaagaatgtgattctttgcaggcacttcctttggtgctgaaatttcagcctgtcgaccataaagacggattggctacctatttccgtgaatacttgcgtggcgtaatgaccgcccgtaaaccggaccggagcgattatcgtggctggcagatgcagaaatattatgaagattctttagcctgggaaaccaacccgttgtatggctggtgtgcgaagaataaaaagaaagacggtaccaactacaatctgtatgtagatggattgaagatttataccactatcaattcccgtatgcagcagtatgccgaagaagctgtctatgaacatgtagccaaatacctgcagcctcgcttcttcaaggaaaagagagggcgtaagacagctccttataccaatcagctgacaccggaggaagtggaacagattctgaaccgctccattcgtcagagcgaccgttaccgtaccatgaaggctgacggatgttcggaagctgaaatcatgaaagcattcaacactaaatatgaaatgtccgtattctcatgggatggagaaaaagatacaatcatgactccgcttgactccatcaagtattacaaacatttcttgcgtgcaggctttatgtccatggacccgattacgggccatgtgaaagcatacgtgggaggacctaattacaactacttccagtatgatatggctatggtaggtcgtcgtcaggtaggttcaaccatcaaaccttatttgtatgcgcttgccatggagaatggcttctcgccatgtgatgaagttcgtaatgtagagcagaccctcttcgatgagaacggaaaagcctggtcaccccgtaacagctccaagtcgcattatggagaaattgtgaccttgaaatggggattggccaactccaataactggatttcagcctacctgatgagcaaactcagcccgtacgacctggttcgcctgatacactcattcggtgtattaaataaggatgtacagcctaccgtttccctctgtcttggaccatgtgaaatttcggtaggagagatggtcagtgcgtacacggcctttgtcaataaaggtatccgtaccgctccgctatttgtcacccgtattgaagacaatgatggtaacgtcatagccaacttcacgccgcaagtgaatgaagtcattagtgaatctacttcttataagatgctcgttatgctgcgtgccgtaattaatgaaggtacgggtggacgtgttcgtcgcttgtatggcatcaaggctgatatgggaggtaagacaggaactaccaaccgtaactccgacggatggtttatgggcttcactccttcgttggtatccggttgctgggtaggtggtgaagaacgcgacatccatttcgatacgatgcgcgacggccagggggcttctatggcattgcctatctggggcatctatatgcagaaagtctatgccgacaagacattaggctactctcaagacgagactttcgatattccaggtgatttcgatccttgtaaagaccgtctgacagagatagaagaagaaaataccacacgtcttgatgacgtattcttccaataacaaagaacggcgggaagttgcttttccaacatgcaacttcccgccgttttctttatattcccgctttctcttttgagaaatcagtcttatactttctttacgtatcctactggcatttccacgatggcatagcccagatggtcaatgcgtatcatcacctgcgagtgtcctcctatttctaccagctcaccttgaagacctttcagagagcctttgattacttctacctgttcccctggggccagcggctcattctggaaccgtacagtctcctcggagtaatccagcatgaacttaaactgttccatctctttgtctcggataatggccggtcgtcgggttgccgggtctatcaagcagcccgttagcgacggaaaattctgaagcagctcaattcgtcctttttcatccgtgcagataaaaatcaacatcgggattacgacctgcttgattttctttttccggtcactccattgacgcaccacttcctgtatgggtaagaaatgctccacgtggagcatttctaatttttctgccgtttttttctcgtgatgcattcttacgtagaaagcataccagtgtctctctattttttcttccattcggattatactgtctgatgattgatgcagatacccttcaggtaccattcatacaagcggtgaataccttcgtctatttctactttatggtgccatcccaggctgtgcagtttgcttacgtccgtcagtttgcgcagtgtgccgtccggtttcgatgcatcccagcgcagttcacccttgaagccgatttccttcatgattttctctgccacttcgcggatagacacttccttgcccgtacccacgttgatgtggcagttacggatttcagtaataccgtctgcattcttttttgacgcatcatacgtctgtttgaagtccacattcagcaacacatgtacgctggcatccgccatttcctcgctccacaggaactcacgcatcggctttcccgtaccccaaagcgtaaccgcttccggtgtgatgccgaacttcgccagcttttccagaatctcctcgtccgtattacttccgtttacaccttccaccgggcgcaggttgatgtccttgcgtaccgcatcccagtcgccctcgttcaggcatttcgccaggtgaatcttgcggatcatggctggcagtacgtgactgttttccaagtggaagttatcattcggaccgtacaggttggttggcattacggcgatgtaattcgtgccatactgcaggttgaagctttcacacatcttcagtcccgcaatctttgcgatggcatacggttcgttcgtatattccagcggggaggtgagaagcacctcttccttcatcggttgcggagcctcacgcggataaatgcaggtactgcccaggaac

SEQ ID NO: 3862 - DNA, 1408 bp, Unknown
  gut microbiota DNA sequence
caggttggccatgatgcctcccacgtgtgccgcagccagaatcaccgcatccggctgttcctcgtcaaagaacttctttaccgctatcgggtccagcaaatccagttccttgtgcgaacgtcctaccaggttattataacctctttccttcaggttattccagatagcggaacccaccagtccgtggtgtcccgctacatatatcttcgctgatttgtccatattcgacaaattaattgtttattgtttcagagacagaagaacaaaagaacatataatcttcattattaattcttcattcctcattcttcattacttcacgattcccttctccaggtactctgccaggtttgtgcgaatctgttctcccgccttttctacggccactttcgccatatccgcatccaccatgatttttaccagctcttcgaaggttgtcttcgacgggttccagcctaacttagccttcgcctttgtcgggtcaccccagagattcactacgtctgtcgggcggtagaaatcctcgcttacctctaccaggcacttgccggtagccttgtcataacccttttcgttgataccttcacccttgaattccagttcgatgcccgcatacttgaatgccaggtaacagaattcacgtacactgtgctgcacacccgtagcgatgacgaaatcttccggcgtttcatgctgcagaatcagccacatacattccacgtaatccttggcataaccccagtcgcgcagtgagtccaggttacccagatacagcttctcctgttttccctgtgcaatgcgggctgcagccagcgtaattttacgtgttacgaaagtttctccacggcgttccgattcatggttgaacaagatacccgagcagcaatacatattgtaagcctcacgatattcttttacaatccagaaaccgtatagtttggccactgcatacgggctgtaaggatggaacggtgtgttttcattctgcggcacttcttccacctttccgtaaagttccgaagtagatgcctgatagatgcggcaagtatctttcagtccgcacagacggacagcctctaacacgcggagtacacctgttgcatccacgttggctgtaaattccggagaatcaaaacttacctgtacgtggctttgtgcagccaggttgtaaatttccgtggggcgtaccttgcttaccacttgcagaatactcatcgagtcactcaaatctgcatagtgcaagtgaaaattcggtttgccttccagatgtgcgatacgttcgcggaagtccactgacgagcggcgaatagtaccgtgtacgtcattgcatattccggcggatacccgttcagcatttccggtgatatccgttcagtccccagttagtattcagtgttgttggcaaagt

SEQ ID NO: 3863 - DNA, 169 bp, Unknown
  gut microbiota DNA sequence
ccagttctttcagttttccgcttccgaaaagagaagcaactccgcttgttatggctgtcgctgctgtggtggctgtcttctttaatttgtcagtgcgtatttctgattttacctgtttcagttcctgctcggcaagatttatctgttcttctttgtgccgtttggcagc

SEQ ID NO: 3864 - DNA, 62902 bp, Unknown
  gut microbiota DNA sequence
gcattaataacaagctatatacgataatcatagaagatgttcatttgtatttttacagtgatttatttgcagattaaaaataaagcactacctttgcatccgcaattcggggtgtagctcagcccggttagagtacgcgtctggggggcgtgtggtcgctggttcgaatccagtcaccccgacaagctgagcatgaaggagtttagtgaaaactaactccttctttttataatactacccaacattgatcttaccttaccgaaaccaatattcggggcccagcggaaatttcgggtcatcagataaataaagggggcagttcttatgtgtctctctcgtattcgttatacagaaataacattaatgaaaatataacaaataaagctgttaaagaactcatcaaccaaaaacctttttcatacctttgctctacaaatttcatgaagatgtccgaacgcaaaataatacatatcgatatggatgcattctacgcatcggtagaacagcgtgacaaccccgaattatgtggaaaaccgcttgctgtgggacacgctgaagaacgaggtgtggtagctgctgccagttacgaagcccgtcgttacggaatacattccgccatgtcatcacaaaaagccaaaagactttgcccagaactgatttttgttccagggcggatgaatgtatataaagctgtatcccggcagatacacgatatctttcatacctatacagatatcatagagcctctgtcactagacgaagcctttctggatgtaactgaaaataaagcaggcttttcacttgctatagatatagccaaagatataaaaaagcgtatccgcaaagaattgggattgatagcttcagccggggtctcttataacaagtttctagccaaaatagcatcggattaccgcaaacccgacggattatgtacaatacatcccgaccaagcattggatttcatcgcccatcttcccatcgaatctttttggggagtaggtccggtcacagccaaaaaaatgcacgcattaggtattcataatggtacccaattacaagcctgcactttagaaatgcttacccgacagtttggcaaagcaggtaatctatattacgattttgcacgaggcatagacctccgtcctgtagaacccataagaatccgtaaatccgtaggatgcgaacatacattggaaaaagacatttctcttcattcttccgccatcattgaactatatcatgtagtcaccgaattgctagaaagactgaaacgcactaatttcagcggtaatacacttactttaaaaataaaattccatgactttaaccaaataacccgcagcatcactcaagacagtgaactgacaagcatggataaaattcttcctttagcaaaaaaattactgaaagaaattgattatgaaagccaccccatccgccttatcggactatccgtatctaatccaaaagaagaaaaagaagaaataaaaaaacaatgggaacaactttcattggaatttaaagagtgggatgattaaggtactggataaatgaatcaatataagattccattgtttcaaaccctttcactccattctttaattctaatccataatatattcccgccagcaaacctgtcaatgctcctaccgcatcacttgacttacctgagtttatagccgaaaatacgcactccttataactatttcctgccataaaccaattgaccactgactccaccgtatctacaacaaagtttccattacaaagattttgcctgttaacctccacatcacatctctgctcagcctgctgtaatgcctgtcctttatcttcatattccaacaggcaacgaataaactcaataaaaaaccaagtatacttaaagctataacgactattatgagtaatcttaataaaaggaaaaatctcctctttagataaaggcgaaaaagccaaaacacaacatcccatcaaactacggttgccgctattagaatccgaagacactcccctgaaatttttcatgattgctttttgggtcacctgatcaatatcaaactcaatgttttctcctgtatactttctattaaaataccaatctcttaaattctgctgataaagttccaaattacaacgactgtccaaagcacataataacatcgaagtatttcctgaacatttgtctccccgaagataagattttgtccacataggtttaaatgtcccttttccttttcccctgtaaggcattcccaaccaatctcctaatataaatcccgttagtcccgttttaattcttttcatggcatgtgtttaattacaaagtacaaaaataataaaaagagaaacaaaaccttgccttccgctgttaaattcataattaatgggtattgataagtatgtatgctacaactaattttgccaccaacagaaaatgtattaccgggtaataaagaaaggagaacaaatgaaaagaatcgtattactccgccatggagaaagtacttggaacaaagacaaccgttttacaggatggacagatgtagatttaaccgaaaaaggtatcgctgatgccaaccaagcaggtatactcttaaaagaaaaaggatttcattttgataaagcttacacttcttttttaaagcgtgcggtcaaaacattaaactgtgtcctagataaaatggatcaagactggatacctgtagagaaaagttggcgcctaaatgagaaacattatggcgcattgcaaggattaaacaaaagcgaaacagcttctaaatacggagaagaacaagtcttgatatggcgccgtagttttaacgtagctcccaatgccctaccggaagatgatccgcgcaatccgaaaacagatacccgttataaagaagttcctgacaaagatcttccacgtaccgaatctctgaaagaaacagtagaacgtatattaccttattggaaatgcatcatcttccccaatctagctacagcaaacgaactgctggtagtagctcacggaaacagcctcagaggaattattaaatatttgaaacatataccggatgaggaaattgtaggtcttaatctacctactgctgttccgtatgtattcgagtttgataatgacctgaatttgaagaaagactactttttgggagatccggaaaaaataaaaaaactaatggaagctgtagccgatcaaggaaaaaccaaccccggtggcaggaaataattttcctgcgctgtccgaaacctccatcacagaatggagaatacatcaaaatagtgttttcaatagtgcattcaagcgcaatcatacgcttttatactagaaagaaaacattatggataaaagattattaatcaattaaagaaaaaagagtatgagtaaaataacaaatttattgggtaaccaagcagcattttatttagagcacacctgtagaactatagataaatcattaatccatatcccttcttcaagcaccattgatgatacttggatatcatcagaccgcaatattcgtaccctgagcagtattcaaaccctgttaggacacgggcgacttgcaaatacagggtatgtatctattcttcctgtagatcaaggcatagaacatacagcaggagcctcatttgctcccaatccactttactttgatccggaaaatattgtaaaactcgctattgaggggggctgtaatgccgtagcctctactttcggagtattaggttccgttgcccgcaaatacgcccacaagattccttttattgccaaactaaatcacaatgaattattgacttatcccaattcttacgaccaagtgatgtttggtactgtaaaagaagcctggaatatgggggctgtagcagtaggtgccactatctatttcggttctgaacagagccgcagacaactggttgaaatagcggaagcttttgaatatgcccacgaactaggcatggctactattttatggtgttacttacgtaacaatgcttttaaaaaagacggtgtagattatcatgcagcagccgatttgaccggacaagccaatcatttgggagttactatcaaggcagatattgtaaaacagaaattaccggtcaataacggtggttttacagccattaaattcggaaagacaaatgataaagtttataccgaactgacttcagaacatcctatcgacctctgtcgctatcaagtagccaatggatacatgggacgtgtaggattaatcaactctggaggtgaatctcatggcagttctgatctaaaagacgcagtaataacagcaatcgtcaataaacgtgccggaggtatgggtctcataagcggacgtaaagcctttcaaaaaccaatgaaagacggaattgaactgttaaataccattcaagatgtttatttggattcaagcatcactatagcttaactttcactatatgtccgggccgggaacaaaacaaccacctttccatgttcccggcttttttatactctccggcctccttttttaagtagcaaccttcaagtattaagataatattcctacctttgcaatccgatacacattattatattatataaggtatgatgcaaataaaagtaacggcacccgctcaaatacatacaactatccagctcccctcttccaagagtatcagcaaccgtgcattgataatcaatgcactgggaaatagaacattccaacttgagaacctatctgactgcgatgatacccaagtaatgattcacgccttaaatgacggcaaaaataccatagacattatggcagccggaacagccatgcgctttcttactgcttatttgtccgtcactccgggaacacggaccatcactggtacacaacgtatgcaacaacgtcctatccaggtgttggtcaatgctttacgtgagttgggagcagaaattgaatacataatcaatgacggatatcctcctctgcgtatcaccgggcacaaactgcagaaagataccatcagcctgccgggtaatgtcagttctcaatatatctcagccttattgatgattgcccctatactaagtaacggactgacccttacactgacaggagaaatcatatcccgcccttatatcaaccttaccctgcagctgatgaacgattttggtgctagagccaaatggctcaatgaatatcaactaaaagttgagccgcaaccctaccaatccatacctttctatgtggaaagtgattggagcgcagcttcatattggtatcagatagccgctctttccaacaaagcggaaatcatcttaccgggattattcgaaacaagctatcaaggggatagtaaagtggctgaaattttccagttactaggaatcgaaagtatttatggaaataaaacggtaacattgaaaaagaccgataaaataaccgaacggctggattatgatttcatcaaccaaccggatttggcacaaacgtttgtcgtcacttgtgcgttaatgaatattcccttccgcttctcaggcttacaaagtttgaagattaaagaaacagaccgtatggcagccttgatacaagaaatgggaaagctaggatatatacttcatgaaacagatgatcgtattctgtcttgggaaggtgaacgatgtgaaatgaccgctgatgttgccattgatacttatgaggaccaccgtatggctatggcattcgctccggcttgtgtagtaatgcccgaaatccggattaacaatccacaggtcgtttcaaaatcctatccttactattgggaagatttaaagaaagctggttttataatagaggaggtataaagttatgctcatacttattattggtctgattattttggcaggtatcgccatgacagtgggagttttacacaaccgccagatacaaaaaaagatagaaagcggagaattgaaggctgctcccgaaatagtggaagcagacgctgaatgttgtgggcaacatgaaatttgtgaaaaagaaagcctgcttgccgctgtcagcaaaaaaatagaatattatgatgacgaggaactggaccgctttcgcggccgtccctcaaatggttataatgaagaagaagtggaagaatttcgggaaatcatgtacacttgtaaagaagatgaagtagccggatggagccgtagcctgcaattgcgtggaatagaactgccggacgagttgaaagacgagcttttcctgattgtaggtgaacgaagattcaaataatccgcctacaccaagcaaagtctccatttgaataaaaaccactgaaaaaatatggatatattagaacttttgcattatactttcttccaacatgccttgctaggaagcttatttgccagcattgcctgtggcattatcggcacatacattgtgacgcgccgtttggtattcatcagtggaggaattacccacgcctcttttggaggtatcggcctaggattatacgcaggaatctctcctctattatctgctgcaatcttctccgtactctcttcttttggggtagaatggttaagcaaacggaaagatatgcgcgaagattccgctatcgccgtgttttggactttcggtatggcagtaggtattatctttagctttctagctccaggattcactcccgatttatccgcctttctgttcggcaacattctgaccattacgcccacagatattctgttacttgccattctttccgtgctgctgatactattcttcactttatttctgaatcctatcatttgcatcgctttcgaccgggaatttgcccgttcccaacgtataccggtagctttatttgaatatattctgatgatgttcatcgcactgaccatcgtatcatgtctccgcatggtaggtatagtacttgccatttccctgctgactttaccgcaaatgaccgccaatttatttacccatagtttcaagaaaattatctggtggtccgtcatcaccggttatgcaggttgtttaggcggactgttcatttcttataaattacaagttccttcaggtgcagcaataatctttttttcaatcctcatctatactttttgcaaaatggggaaaagcatgtacctttgcaaacaaaagaaactcaatcaaaccaatggatatggaaattaaaatcaattctttagactctatccacgaagctgccaaacaattcatcgcagctatgggtgataataccgtttttgctttctacggaaagatgggagccggtaaaacaacatttatcaaagctgtatgcgaagagctgggggtaacagatgtcatcaactcgccaacttttgccattgtcaacgaataccgttcggatgaaaccggtgaacttatttaccattttgatttctatcgtatcaagaaactggacgaagtatatgacatgggatatgaggattatttctatagcggtgccctctgcttcatcgaatggccggaactggtagaagaacttttgcctggcaatgctgtaaaagtcgagattgaagaatctgaagatggaagccgcatcatgcactttgaagctgaataaaagaaaaagattcactgtagggacgaacaaaatctgcccctacagccaaattcattaaattatgggaatgcattatctgatccaagccatattcgtattggtaggactattgtccgttctggcagctttatttaattgggagtggttctttaccgcacacaacacacagttcattgtcagtaatgcagggcgtcagcgtgcacgacttttctatgctatattaggactattaatgatagctacaggcatttatttctttttgaatgtacaaggcatcgtataaacacatagtgaacaaaatctgtggatattacattcccctatccacagacataaaacaagttttttaggaaagagcaggatttccacccgccccctgttataacaaaaatccaaatcaatctacaatttcagccaacagccccctagtttcatcaagatcaaattcagtaggatcaaaattataccccaaccattctttatattcacgcgcagctttagagcgaggcttttctaaagctttcagcattttcctatacccccatatgccattacaatcttctggcggacaagcattttcaccatccaacaaggctataaccggaatttcctctttcttataggactggcaggattctaatataatttcatgtatccaactatcaccgaaatcatattcatacttaatttttgatcccttacgacttaataattcacctaaagaaagcataccggaatcaaactgtttgggtacaccctcaaaaaaacaatcatctgcccgatctttgggaggaagataataagtgttccccttaataaaacgatgcaaatgataaccatcccatcccattgccacttctaccacctcagaaaatctttccaaacaaatattcgaagggacctccaatatgcgccagactaatggttcagagtctttcaactctatttttattctaaattttttagcaggctgctcctccatataaagcggatcatcataaatctcctcatcttcttcttcgtcagtagcaacctcgaaaacttcaactaaataatcctctacccgttccatttccaacccatgcatttccgcataaggcatttttttctttagttcattaatacttggaatgccataaggtttaatatgataagtccgataaatcttttgcaaaataggtaaagtttctaccccgcgaatatccatcatgcaagctgtaacatgatcaagcagcaaagtagaacaaatatcattcttctgctccttcagtacatcaaaataataactcaacaaattaccaaaccaatccatcacttcctctcttctgtcaggatgagctatcacaatatgagcaacagcttcaatcactctatatttagacataggaagcagtccgggctctttcataaagtccatcaaaacatctaattgattctgtcccaattgataggtaatggcagacaacattgtttcatacaagtaaccgaaataaaaatcataaaaatccaaatcttgccgcagcacttccaaaacaatatccaaacaatgttccatacgaaaatgctccattattcctaatgcataccacattctatatgaataacatttttcgggcattttccgatatacgacaaagatattaaagataaaattgcggagatctcgttccaatgtttcttgtggaataacagcacaagaagagtagatttcagccggtgacagactactcatatcatccatcgtccacaaaggcatcagataagatgcgatcggctgcgcaatcaatctataatcgggacactgatgatgataataaatatgagacagttcttcatctacctgattcgctccatcattaaacaattcaaatgcaatttcttgttcttccggggtcaataaagacatgatatcctccaaaagaccaggcaggaattgggaatttttctttttagccattaagcaatgtttttatagttaaaatgagcatgagtgtttttacaaaggtattctattattttcttttacaaaagaaataagagagctaatagtagatactaccttgttttcaagtataaaaaaaatgcgcatcccctacatagagatacgcatcttttattttattatgagactttcttcttaatccacttgtcccaatgaattcccatattccatttccccttggactacaaagaatacatcatcggggtcataaggccccattccgtctttcttggcttccttgactatgtaattcacaatttcatcttgatcaatgttaatgtatccctcttcatcaggttgtacatcaaggcatccgctggaggtatagtaatccacaatcacatcaaggatataatataaatcatcctccgtgaatttatctttcaaatcctgaggcagataatttttgataaactctatcgttttttgatcatcctcgtcttccaataagaaatcgtcttccattcccatagtcgtatatattaaaggggtgaatattctttttattacagtaaagcttttattttttcttccagctgagctttggtcactgcacctacagtcttatctttcacttcaccgtccttgataaaaagaacagtaggaatgttacgtacaccaaatttaccggtcagttcgtcgttatcatccacgtcgcactttccaattattacctgatccttatattcttctgccaaagcttcaacatccggagctatttttttacaaggaccacaccatgttgcccaaaagtccactactacaggcttgcctgatgccagcaattcttcaaaattgctatctttaatttctagtgccataattattatacttagttatttaaaatgttagcgcaaatatactaattaattttgtaagagagctgtggttggctctttaaataagtcatgatctctttttgaactgaaattttcatagtacgtgacatcagattgacatacatttgcccatcctcatccatcacatgaaaataaagctctgcattaccgggatgtgccttgattaaggctgaaaactccgttatcagctcttcatccaatgcagacaaaggagctgaaactgtaagtttctcaataatcttttcctttacttccggtaacaactcaatagtacttatcttcacctcccattcttcctgtcgccattgttttggctgacatttccctcgcataaataaaaacataccggtcataaaaaagttcttcttctctacccattcattaccgaagaaagcaaattctgctgagcccgaataatcttccactttagcaataccgtatggttttcccgtcttggtatacccctcacgcactgcagtcacaatccctcccatggttaagtctctgttctgcaaaggggttaaatcggcaagttccgccatgtggacattgcatacattctctaatataacagcatactcatccaacggatgggcagaaagatagatacctaccaaatcacgttccttattcaaacgttccaaatccccccatgcaggagacggaatgatttcgggagtagcaatatccacctgattctcacctccaaacaaagaatttgcagctgcggctttatccatctgatacttattcccataacgtaccaaaacttcggtaaaggtttcatctttagcgttctttacaaagaaatcttcacgctttattcctgtgaaactatcaaaagcacctgccaaagccaagttttctatattcttacgattgcaagccgaaagatttacacgctgtacaaaatcgaaaatatctttatattctccatttctctcacgttcttcaaggatagactgcacagcactttcccccactcccttaatggctcccagtccaaaacggatatcccctttacgattcacagaaaacttcagataactttcattcacatcaggtcccttggtcatgataccagtcgccttactctcgtccatcaatttagtaatttccgtgatattcgaaatattccggctcatcgtagccgccatatattccgccggatagtttgctttcagaaaagctgtctgataagccacccacgaataacaagtagcatgagatttattgaatgcataagaagcgaacttttcccagtccgtccaaatcttctcaagtactttgggatcatgaccgttcttccgtccgccttcaataaacttaggcttcatatggtctagtttgtccctcagttttttacccattgctttacgcaaggcatcggattcgccacgagtaaaatccgccagcaaacgtgacaaaagcatgacctgctcctgatataccgtaataccatatgtatctttcaaatatttctccataataggaatatcatactcaataggcttacggccatgcttacggtcgataaagtccggaatgtaatccataggtcccggacgataaagagcattcatcgcaatcaaatcctcaaaagtgctaggttccaattcccgcaaatatttctgcataccggcagattcgaactggaatgtaccaatcgtccgtccttcactataaagagcataagtaggaggatccgaaatgtcaacctcgtcaatatccaagataatccccttactatgcttgatattttcaatcgcctctttgataatagaaagggtcttcagacccaaaaagtccatcttgatcaatccagtatcttcaataactgaaccttcatactgggtcaccagcattttttcaccggtttccttatcatctgccgtacttacaggcacccagtccgttatatcatctcgacatataatagtaccgcacgcatgcacaccggtattacggacattcccctccaacatctttgcatactttatcgtatcacgcaaaataggatcgggtgagacttccgctgcctgtagttcgggaacataagctatggcattaggcaaattcatttttttatcaggaatcttatccggaaccaacttacacaaacggtcggactccgataaaggtaatttctgtacacgggctacatccttgattgccagcttggttgccatcgtaccgtatgtaatgatatgcgccaccttttcctgaccatatttttcagttacccaattcaatactcgtccacgaccatcatcatcaaaatccacatcaatatcaggcaaagaaatacggtcgggattcaggaaacgttcgaacagcaaatcgtatgcaatagggtctattttagtgatacccaaacaatatgctacggcagaacctgccgccgatccacgtcccggtcccacagacacatccaattcttcacgcgcggcacgaataaaatcctgcacaatcaagaagtaaccgggaaaacccatcgtcttcataatatgaagttcgaatttgatccgttcctgcacttcctcactcaatacttctccataacgcttatgcgcaccttccaacgctaatttcttcagataatcagcttccagtttaatacgatagagtttgtcatagccacccagtttctctattttggctttagcggcctcctcactcattaccacgttaccgttttcatcttgagtgaactcatcaaacaagtccttttctgtatatttcttccgatatccctcttctgttccaaaatcttcaggaatagcaaaagtaggcataatcggtgcatgatctatactataaaattccacctgatcacaaatatccaccgtatttgaaagagcctcgggaacatcagcgaaaacttcattcatctcggcacgtgtcttcatccactcttgctttgaatagagcatacggttaggatcatccaaatccttacccgtactcagacagatcagcctgtcgtgtgcttcagcattctcttcatctacaaagtgaacgtcattggtacaaaccagcttgacattgaattttttagaatactctatcagcttttcgttagcaatttgctgcaatttataagcttcatggttcgcacgaggaaccgtcgctttatgacgttgcaattccaaatagaaatcatctccgaatacacgtttataccattggatagcttcctcagcctcttcatattttccagctatgatatttctaggaacctctccggcaatacacgcagtacagacaatcaacccttcatggtatttttccaattccacacggtcagtacgcggacgcatatagaacccttccgtccatgcctttgatactaattttatgaggttgtggtatcctttttcatttttagcaagcacaaccaagtgataaccactttgatcgggttttccttctttgttgaataaacgacggcgcgccacatacatctcacaaccgaaaatcggtttaaacagtttcttctttgccgtttccaatttttccttgcatgccacaagttccgtctcgggattatcacattccaccgtacctttttccagtccggctattcttttcttcaaatcctttatctcactgttagtactgctattcttcttatttacatagttgaagaattccttgataccgaacatatcaccatggtctgttacggctatacctttcattccatcagccatagccttgtctaccaaacgtggaatagacgcctggccatcaaggatggaatactgggtatggacatgtaaatggacaaaatcctgcataatcgttactctactaaaaaattgtctaaagatactctgctttcataaaacctgcaaaaagataaagaagaagttatcaacattcgctttttttatcttaaatgaagtcgaaataggcatttctaacaacttttatttgcaaggttttcaaaataagtttatttttgcacgataattggttttatacaatcatgaaccgactgaagaaattaaagaaaataagactacatagagagggaacaagcatcttaattgtcagtgccatcctgttaattggtatcaatgccctattgttttggggaattgagtgcaaaattccattttatatatttgccaccgcaagtatcgttgtttacctgttaatggttaactttttccgttgtcccattcgattattcgagcacgacactgaaaaaatcgtagtagccccggcagacggaagaatagtagttatagaagaagtagatgaacatgaatattttcatgaccgtcggttaatgatttctatttttatgagcattgtcaatgtacatgccaattggtatcctgtagacggagtagtgaaacatgtagaccatcataacggtaaatttatgaaagcatggctgcctaaagccagtacggaaaatgaacgttctatggtcgttattgaaactcctgaaggacatactgtcatggcgcgccagatagcaggagcaatagcccgtcgaatcgtgacctatgccgaagtaggagaagattgctatattgatgaacacatggggtttattaaattcggttcgcgtgtagatgtttatctcccactaggaaccgaagtctgtgtcaagatgggacaagcgactgtaggtaacgaaaccgtcattgctaaactaaaataagaaaatcaccaatggcaaactgtatcacacgccacattcctaacgcggtaacttgctgtaatttattctccggctgtattgccagtgtcatggcttttaacgaaaactataccttggccatctctttcattatactaggcgctgtatttgatttctttgatggcatgttggcacgtttgttcaaagtatcagggcctttaggaaaagaattagactcgttggccgatgacatcacttttgggttcgctccttccgccattgtcttttctttatttaaagaggtacactatcctgattttctattgcctgttgccgattatatgccttataccgcattccttatttccgtattttcagctttgcgtttaggcaagttcaatattgacccacgccagagcagtagtttcatcggtatgcccactccggctaatgctttattttgggggtcattgactgtaggagcacattcttttcttatatccgattcttttaatgcggcatatcttttcatcttggtagttattatgtcattattgctggtggcagaaattccaatgttctcattaaaattcaagagtcttgcctggaaacagaacaaagtcagctatattttcctcattgtatgtattcccctgttggctttcttcaaaatcagcagttttgcagctatcatcctgtggtatatcattctatctcttttaactaaaaaaagagcgtaaacaataaacgtggcacgcttgttgtacgtggtatataaaaaaagaaattactatgtttggatttttaggctttctacttattatttttctgctgattatttttatcggcttcactatattaggcaacattctgcgtgtattgttcgggatcggcaaacatcccccctaccagaatcgaacatctacccaccaaaaacaaaatacatatacccagactcaaacgaatgacgagaatgaaaactttgcagaattctcttcatcttcttcaaatagacattctcattcatcgggaaacagaaaaaaaatctttgatgacgatgagggagagtatgtagattatgaagaggtgaaataagaattatcgttttttcttaaagaaatctttcatcaatcgggcacattcatcagcgagtattcctttcaccacgatcgtctttggatgcaaggcatcgggggcatatttttgatatccccttttgggatcttcagcaccaaagacaagttttcctgtctgtgcccaggctatggcaccggcacacatcacacacggttccacagtgacatacaaagtacattcattcaggtatttcccgcccaaggtattagccgcagctgtgacagcctgcatttcggcatgagctgtaacatcattcaatgtttctgtcaaattatgcccacgaccaatgatgcggtcacgacagactaccaccgcccccaccggaacttctccttgttcagccgcttttacagcctccatcaaggcttgtttcatataataggtatcatctgccatcttatcttctcatatcatgttcattaaacaatgtaggataatcctcttccatcttctgatggataaaagtcaatactgtttcgcgtaaccaacgcgccttattggttatcttatactttttaagataacaatccacaatccgtacctcctcttcactcatcaaacataccatacgctgcttgcgtttaggggttgatgccggtacttttactctcttttttacgttgtttgccatattctctgcaaaattagctttacttctgtaaatacaaagcataaaaaagagtatttttgtacaaaaagaaacagaatggcagaacacaacgaatttggcaaagagggagaagaagaggccgctgcatatctcatagataaaggatattctatccgccaccggaactggcattgcggaaaaaaagaactggatattgttgccgaatatcggaacgaactaattgttatagaggtaaagacccgcaagaatactagattcggtaatccggaagatgcagtaacagataagaagattcgcagaattatagcttcaactgatgcatacttgcgcaagttctctgtagatttacctgtacgttttgatatcatcaccttagtgggcgaaaagactcctttcactatagagcatattgaagaagccttttatcctccgatttggtaaaaatatatatattatatatggacatagaaacaatacgcgattactgtatcagaaagaaaggaacaacagaagaattcccttttgacaatgtcaccttagtattcaaagtcatggggaaaatgtatgcctgtatcggattggacaacccggaatggctatctttaaaatgtgcacccgaatatgccttggaattaagagaacatcattccggcattgaaggagcctatcacttcaataagaaatattggaaccaagtatccttacaaggtgacattgacgacaaacttattttatcactgatagaccactcatacgaagaggttatcaaaaaattcacccgtaaacttaaaaaagaatatgatgagatcccctaactggtcaagcaaaatcttaaaagaagaaaccgtaacctcaacaaatgaccgacttgcagaactttgtcaggaaaaagaaatcaaggaattcaccacgcttatggcagaatatcaaacctccggaaaagggcagcgtggaaattcatgggaatcagaatatggcaagaatctgacattcagcactgtattttacccccaaacaatcgctcccgccagtcagttcattttatctatggcggtagcttctgccatttgtaccgcattggcccattatgtccatgcagattgcctgcaaataaaatggcccaatgatatctattggaaagacaaaaaaatagccggcatattgattgaaaatgatttaacaggaagccaaatttcacagagcattattgggatagggatcaatattaaccaggaagaatttcattcatctgctcccaaccctgtttcattaagacaaattactaaaaaggaaacagacagaatggaagttctgaacagcgtattagaacatatcatagatctctattcccggatagaaaacagagaaaccgatatcattaccaaaattcaggaatactacctgaaagcacaataccgcaaggaaggttatcacccctattgcgatgcaaaaggagagtttactgccaaactgatccgtgtggagcccgacggacatttgattctgaaagataaaaacggttctcttagaaaatatgctttcaaagaagttaaatacctcctttagttgttcttctcttcaggaaccatcaacattcctccagtggcatgacgttctgtcgattgatacacagattcccccctcataatcggttgggataacgtattcatgcttctggctgaccggtttattcctgtgatcaaggagatggctttacccagcatgaattcatccggatcacccaatggtaataaagcgtctgtcggattctgagtcaaatcatactcattccattctatatccggtttaaaaccagcactgtagtcatcattcaccgcattagtcactctcaatgtgataggccaatatatccattcatatttatcattcttttgcatctccattcctacatttttcccttctgtcaattcgccaataagggtaacatccataaatgggttgaggctgttaataacgacttccgaagaagaagccgtactttggcttgtcaatatataaattcgattggaattaagtttcaagtaacctgccgttcctttcgtttccacacaaaaatcattggaataggattgtcccttattgtcagagaaaacagcaaacaccttttttcgagaagcttctggaatgaggagtcctgcgagcatattagcagaattctcatatccacctccattatagcgcaagtccagcacaaattcattcacaccttgcgcctgaaatccggcgaatatcttcttcatttcctcatcataggtacgatccgaatatccattcggtccggaagtaaaatgattataaaccaaatacccaatcttcttatctccccgagtatatacattgtgatagaacaagggattgtcctccacggcccgggaagcttctatatcaatagttctgacctctgtatcgccacgtttgacgagccattgagtcctatctccatttaataagattccataattatcggaattaatattattttttcctttaacacccacgatccaatcccctctttccaaacctgcacttgatgccggactattaggaagaacatacagaatacgggcataataatatcctaaaggttgattactatcgtttacaacattaaataaagtaaactccataccataagtatcatccgcatcaatgctggtacgtgctttataatctttattcttctccatataagaataataataaagatgctttccgtttctcgtctttccatctttcaaactgagcatagatctaaagaatgtttggggatcagcagagaaatccaacttattttgagcaggaatgtcgttattccacaaataatcactgcgcatgacactctctatccactcattgacttccaactccgtgttaccatttcccgggtcatctcctttagccggagtatcatccgaacatgacatgcctaacagacataacaataagcccaaccaaatatggatttgaaaattctctttcataattctcctgttttgatcattttaataaccgcaaatatatctatattccaatgatatatcatcttaaacaacaactattttcaattcaaatttaaattttcattggttatttatgagaaagagagtacctttgtatccatctctatcaatctacactcatgattcaacttaataacggaaacaaaaaaatacttcaaatagccatcccttctatcgtttcaaacattacagttcctctgttgggcttgattgatgttactattgtaggtcatttgggctctgccgcctacatcggagcgatagctgtaggcggaatgcttttcaacatcatctactggattttcggttttctgcgtatgggaaccagcggcatgacttcacaagcatacggcaggcacgacctgaatgaagtcacccggttactactccgttccgtcggagtaggattattcattgcatttactttgctagccttgcaatatcctatagaaagaaccgccttcacctttatccaaacgactgaagaagtagaacatctggcgtccctctatttctatatctgtatttggggagcaccggctgtattagggctttacagttttgccggctggtatatcggtatgcaaaattcccgtttccccatgtatatagccatcacacaaaatatagtgaacattgcggtcagtcttcttcttgtatatggattaggaatgaaaatagaaggtgtcgccatcggaacgttaactgcacaatatgccgggctagtcatggcatatttgttatggttacgctactacagcaccctgcggaaacgcatagaatggcattccttctttgacaaacaggccatgtaccgtttcttccaagtaaacagggatatctttttccgtaccatctgcctggtggcggttactgtctttttcacctcggctggtgcggcacaaggagaagtggtgttggcggtcaatacattacttatgcaattattcactttattctcctacattatggacggcttcgcatacgccggagaagcattggcaggaagatatatcggagccaataatcagaaagcactccacacgacggttcgccaactattcggctggggagtaggattatcgcttgctttcaccttattatatagtatagggggacaatcctttctcggattactgactgacgaaacaactgtcattcatgcttccgaaagttatttttattgggtacttgccattcctttggcaggcttctctgcttttttgttcgatggaatattcatcggtgcgacagccacccatctgatgctgaaagccatgatagtagcctctgtcagtttctttcttatttactatggtttccggggggcaatgggcaatcacgctttatggatggcattcattacctatcttctacttcgcggagtaatgcaaggagtcatgggaagaaatattttaggatataaaacaagtaaaaaagattaatatttttatctttgcaaaaaactaaaagacaaaccaatatggcaagatttaaaagaattctactgaagctgagcggcgaaagcctgatgggcgaaaagcaatatggtatagacgaaaaacgtctgggtgaatatgcgcaacaaatcaaggaaatacacgaccttggcgtacaaataggtattgtaatcggtggtggaaacatcttccgggggctgagcggagcttccaaaggttttgaccgtgtaaaaggtgaccaaatggggatgttggcaaccgttatcaacagcttgggattgagttccgcattgggagcggccggagtcaaggcacgtgtattgacagctatccgcatggaacccatcggtgagttttacaacaaatggaaagcgattgaagcgatggaaaacggagaagttgtgattatgtctgccggaacaggcaatccgttttttactaccgataccgggtcttccctacgtggtatcgagatagaagccgatgtgatgttgaaaggaacacgcgtggacggcatttatacagctgatccggaaaaagaccccactgctacgaaatttgacgatatcacttacgatgaggtattgaagcgcggtttgaaagtaatggatcttacagcaacctgcatgtgcaaggaaaacaacctgcccattatcgttttcgacatggacacagtaggtaacctgaaaaaagtaatgaccggtgaaaatataggaacactggtacacaactgattttctcatcaagttcatccatttgtcattccttatttccttctaaatgacagatgggtgaacagtttttctctgtcttaccattttttccacaaattcgttctttattgacacatattccttaaaaaagagactcaaccgatagattttccatctaaatgaacaattattcatggacttatagcgttaattagcctatttttacatcagcaaaaaatgtaaatcattcaaagactataaaaacgacaggaaataccatgaaaaattactgttacatctgtttattgactgcctgcatggctcccatgtctctccaagcccaaaaagcaattccgtacagtggagaagtatgtgtagcccctctccctacagtccccacaacccttcccggcatatcttccgactcgtatgcccggcgctttgccgactctgagatgctccgctttcccaaagcttatcagctggatcatggcaaacggctctttttcgggtattcacaaggagtaggctgttgcgccatgctggatatgtggaaaaataccggtgacaaacgttactttacgtatgttgaggaatgggcggatagtttgattaacgaaaaaggagaaatccacctttatgatatgtcaacttacaacctggattacatcaattcaggaaaagtactgttcgacctctataaagaaacaggcaaagaaaaatacaaagcagccatggacttactggtagaacaactcaaaagacaaccacgtacgctggaaggtggcttctggcataaattgatctatcaacatcagatgtggctggacggactttatatggcttctcctttcctagcccgctatggagcggaattcaaccgtcctgatctgattgatgaagcggtaaaacaattcacactttgccacaaacatacctattcaccggaaaccggattatatcatcatgcctgggacgagagcaaatcccaacgttgggcaaatccgcaagacggtacttcacctaacttctggggacgcagtataggctggtggttcatggccatggtagatgtactggactatattcccgacaaccaccccggccgtacctcgcttatcagttggattcaaggtttggcagaaagcctgcccaactatcaaagaaacgggctatggtatcaggtaatagaccagcccgaacgtgaaggtaattttcccgaagcatccgtaaccacccaatgtatgtatgcttatgccaaagcggtgaacaaaggatatatagacgcccgataccggagcatcgcggaaaaagccttcaacggattaaagaaaacattgcttcgcgaaaaccccgacggaactctgacgctgacccgttgctgtcaagtaggcggactgggcggcactccttaccgcgacggaagctttgaatattacattggcgaaaaaatgcgcgacaacgatgccaaagctaccggtcctttcatcatgggttgcctgcaacttggcaaatagaatcatatcgcataaacaacagaattatccatctttttaaattagctatatacaatgaaacacaccatttatgctctgacaatgtttgcattggccgcttgcacctctccccaagaggaagccatagaccgccatgcactggtaacgcgcaataatccggaagtaactgccatggattcattatcctccctgtcggtaggaaacggagaatttgcctacacggtagatgctacaggattgcagacttttcccgaagtctataaaaacggagttccactgggtacacaaagccaatggggatggcacagcttcggaaatcccgaaaactataaaccggaggaagccttggtggagtatgacttcagccacgggcacaaagagctatatgccacccaacccaaagaacccggcagagcaaaggaagcatccgactggtatcgtgtaaacccacaccgcctgcatctgggtatcatcggactcgaattagaaaatgaagtacgtccctcggatgtgcaaaacatacagcaatcactggatatgtggaacggtatcatcaacagccggttcactctcaaaaaaactccctaccacattcagacagtctgccatccggagcgtgacatgattgccgcacgcctgtcggcccgacaacctgccggcatcaagtttcacttcccctatcccacgggcggtcactgtgacgatgcttgtaattgggaggcgaatgataagcatagcacgaccctggtcagtgaagatgcacaatcggccgtgttaaaaagaacactcgacgcaaccacctattatgtaacaatcagttgggaaggcgctgcgaagctgagggaaaaaagtacaaactatttcgtactcacgccaacggacagtgtatttacattcacctgccaattcacaccgcaagcgtccgcttctcccatcctgacttttgcggaagtacaacaagcctcttccggacactggcaaaattactggacacagggagctgttgccgacttctcacaatgtacggatgtccgtgccaaagaattggaacgccgggtcgtattaagccaatatctgctcgccatccaatgcgccggatcaaccccgccacaggaaaccggactgacttacaactcctggttcgggaaattccatttggaaatgatctggtggcatcaggcacaattcgccttatggggacatcccgaattactggaccgcactttatcctggtatgaaaccgtggaacccatagcccgccagatagcggaaagacaaggtttcaaaggcatacgctggatgaaaatgactgatcccagcggtacggaagccccctctaaagtaggcagcttcctgatctggcaacagcctcatctcatctacctggcagaattgctctatcgggctaatccatcggaagaactgctgaaaaaatacaatagcctgatacaggaaaccgccgaattcatgtattcatttgccacatacgaggaagagcacgaccgttatgtcttgaaaggcgctatccccgcacaggaaacgttgcgcgccgccgaaactgtcaatccgccttttgaactttcatactggcatttcgccatgcaagtcgcccaaacatggcgtgaacgtacagggatggaacgtgtacccgaatgggatgtgctgatagagaaattatctccgctggcatacaacgacgaacagctgtatctggcagccgagaccgcggtggatacctataaagatatccgttttacctcagaccacatggcagtgctgggcgctgtcggcatcctgcccatgaatcagctgattcatgccggatatatgaaaaataccctgcactggatttgggataactggaactgggacaagacctggggctgggattatccgatgacagccatgaatgccgcccgaatgggtgagcccgaaaaggcagtcagcgcattattgatggacaagcgtaccaacacctatctggtaaacggtcacaattaccaggacgggcgtctgcgtatttacctgcccggcaacggtggattactgaccacagtcgccatgatgtgcgccggatgggacggatcggaagggaacaatcccggatttccgaaagatggcaaatggaatgtacgctgggaagggttacagccgttaccgtaagaacaggagttagcagttattatcatgaaaacgacatatttacttctatgcctgttgggcatcggtagcgttcccggcgcaggacaaaccaaacagccacaaaagataggcgatttcatagaatccacttcgtacaatgaacatcgccggaatgccacccgaagcctgcaatatacccctgacggagacgattttgtctgcatcaacggtaagaatcgctttacccgtgccttatacggcagccacacagcattccggctggaaacaagcgaccggcccgtattcgctgcttataccaaggagaatccgaagcacatctgctttaaactgcaaacctccggaggcacggtagcccttgactctaccgaacactgcgagtcccgttatacagcgggacgccgcagctacagtttatctgatccggctttcggaggcggaagcttatccattaccacatgggcacttcccgataaagaaggggccatctggcaattcaacgcccggaatttcaaggaattccatcccgttctactggcatccatttcagagatacgtaattccaaactaaaccgtaacggagacatgggagccgaccctgccgacagtttcgaagctcctctccagcctctacagttacaatccttcccggtgcagatagacggaacactttatattctattggaaaaccaggaactacgcacactgacgactgccgaaggcgaaaacctgtttaaaaaggcagaagccgcccgctccgaaacagcctcacgcatccgcattgaaacacccgacccttatttcaacaccttaggaggcacgctggctatggctgccgatggaatctgggacggcgaagtgtggctacacggtgccataggctggcgaatgcccctcagtggctggcgagccgcctataccggcgatgttttgggatggcatgaccgtgcccggacccatttcaacgcatacgcggcaagtcaggtcaccgaagtgcccaacaccttcccccatccggcacaagattccgccctgcatctggcacgttccgtcaagaaatggggtaccccccaatacagtaacggatacatctgccgtaatccgcaccgcaataatcagatgcaccactacgacatgaacctttgctacatagacgaattgttatggcatttcaagtggacgggggacttggattatgcccgccaaatgtggcctgtcatcacccgtcacctcgcatgggaaaagctgaactacgacccggataacgacgggctgtatgacgcatacgcctgcatttgggccagtgacgccctttattacaatagcggagcagtcacccattcatcggcttataactaccgtgccaacaagacagcggcccaattggcagaaaagataggcgaagatcccactccttaccgcaacgaagccgaaaagattctgaaagccatgaacgagaggctatggcttcccggcaaaggacattgggcggaatatcaagattttatgggccacaagcgagtacacgaaagtgccgctgtatggaccatttatcatgctatagacagcgagacagccaatccgttccaagcctatcaggctacccgttatgtagacacagccattcctcatattcccgtcacggcccatggattaaaagagaatggctatgccactatcgccaccaccaactggctgccctactcatggagtatcaataatgtcgcctttgccgaagtgatgcataccgcattgtcatacttccaggccggacgtgccgacgccggatacaaacttttgaaaagctctgttctggacggcatgtatctaggagacagtccgggtaacttcggccagatcagcttctatgatgccgcacgcggagaatgctaccgcgatttcggtgatcccatcggagtcgcttcacgagtactgatccaaggtctgttcggtatcctgccggatgccctgaaccagcaaatcatcctccggccgggcttcccggccgactgggacaaggcttccgtcagcactcccgatataaactatcgctttacccggaaagaagatacggatacctatcatatcacacaacggttccagactcctctccatccggtattgcacgtcaatgccagaaaagagaagatccgttcagtaaaagtgaacggtgtccctgccacatggcaatccatcgaatcggcccatggctatcctcttctttcaatccaggcggaaggaacatcttcaaccaccattaccatcgaatgggaaggagcaccacttcacacgttggcagtccaggaaccagtcatcacttcaaacgggaagttggctttgcaaataccttcgggagcatccatctcccaagtatatgatcctcagagcgttttagcaaatcacactgtggaagccaccgctttcaacgcacagataaaaggtgaaccgggacaccacactttctttgtttacacccatcagggagaaatggattggtggcaacctgttaatatctatatagagaacgtccgggaatccccctcctatacagactttgcagatatccgtcccgaaaaatgccggatggttgattttgaccggcaactgaatgcttccgtcaccgatatatatcaaaatgaatacttgtctccccggtctccatacactacgttacaacttcccacacagggaataggagaatggtgtcatccgctgctgagtgctaccatagacgactcgggattacgcagtcttgtacatcatgatactttccaaacgtctttaggcatccccttccgtctgaaagaaaaaggaaacaacattcttttcacctccctatgggataattacccggacagttccaccatctcactatccggcacggcctcacatgcttatctgctgatggcgggaagtaccaaccacatgcagtgccacattgccaatggaataatccgcatacactatgcagacggaacttcccaagcaacggagttgaccaatccggacaactggtgtcctatagaacaagatttctatgtggacggcaaagcattccaagcaactgctccccggccgtaccgtctgcacttgaaaagcggtaaagtaagccgtgatctgggtaaggaactcaacatcaccggcgtatatggacgtgagatagaaggtggtgcaggcatattgctcgatattcctttggatcattccaaggaactaaaagggctgaccctggaaaccctgtccaatgatgtggtgataggaatcatgggggtcactttgcaataaccacgtgttattcaatgcggaattacgttaacttgaaccggcgtagttccgcattattcatctttggcacactacgtaaatgttccaaagtcactccttgaatgtgtgcctgtaccgccctgtttatcagtccatgcccgactgccaacacctgttttccatcatatcgctctttcaagtagtccacaaaacgccccgcacgctcatacagcattgcctccgtttccacatctgccggaaaatgttgcaaatcaacttctttaatggcaagacctgtccaactcccccaatcgatttcacgcaacaagaccgttttctcccaaggcaggttccgaccttccaccgcgatacgggccgtatccacacaccgtttcaaatcactactgaccactgcatccaaagagatattccgcaaagtatcacgcagcgcttcagcctgtgctattccttcaacagtcagcgtgcccggcatatgtccttggaaaatacgggcgatattctcttctgtctgcccgtgacgggctaaatataaagttatcatcttttttaatgcaaagataatgcttaccggccagatttacttcaaaagggcaaccttcttattctcctttccaaagaaaagcaatcttcagacagatgataaaaaaataacaatcttgcctataaaagtattctccccgtagattaagggggttcttccgtacagttaaggcctttcatgcggtaacctactacagactccgtcagtagactgtacagtctgttacatcagaccgtacggtccactacaatagtttatacagtccattatcggagtctgtagtaggttaccgtatgaaaaagcttaatcatgcagtagaaaagacttagtatacagggaaaaaggcttaagtattcatcaaaagcagacagccaccttcgaaatgtcactccgcctgcaagctacaaattatccaccgtatcttccacttctatcacccagtccccgatagtacgggtggcactgtcgaaattaatccccaccttcacgatgcgcctgccatccttgcgataaggaacagcatacagcctgctgtttatctgcgccaatgcctcccgggccgtaccgtcatatttaaattccagcacataaatggcatcctgcatctttatgaccacatccgcacgccccaccgcacttttcacctcgctgtccacatacatccccatcagacggaacaacaaataaaagatggtctggtaatgcttctccgtcttgttctccaaatcattgagaatggaagcaaagaaagaacgcgtacgttccaagcagctctctatatctcccttacgaagatcgcgaatgaaggaaacgacataaaaagtactgctctgacccggcaactcaaggtaagcgggcaacagggactcgatgaaacctttacgcacctccccgttgggataggccagccggtacacctggaactcgggatcatatcccttgatcgtcaggtaaccactttgatataaaacggggataggactagttacacgttccgtcggggcatcaaactgctcgtctgtagcctccaccccctccagctggcgcacgtcaaaatccgtttcctgcaacaaatcaatcaagaaagtaggagtgccggtagagaaccagaaattcttgtactcctttgcatcaaaggcattgaacagactgaaaggattgtaaatatcctcacaatgcttgctgaaatgatacccgtcatactgccgcttcagatgcgcacaggcagcttcatacgtctcgccgttcgccaaagccatccgctcaatgtccggacgaagctcgtccagcaactcccgctcggtgatgccgcatatcgcgctgaagtcatcccgcatactgatgttcttcaaattattcagctcactgaagatgctcatctggctgaacttgctgattcccgtgataaagaggaaacgaaggtattgccccaatcccttgagaggactgaaaaacttacgcagttcattccgaagctcctgctgcaaggggatgttggaattactgtccaaaagaggagcgtcgtattcgtcaatcaggacaacgaccggcagaccggtctgttcatacgcacggcggatcataccttgcagacgagcagcaggagtcttttcctccttttccgccccataaaccttttcacaacgaagtaaaaacagattcaactgttcctgcaaatcgaacagggtagtatatttagtcagactgaaatcaatatggaataccggatacacgttccagtccttttccagacgctccatggccagccccttaaacaaatcttttttcccttgaaagtaagcctcaagggtggacaccaacaagcttttcccaaacctccgcggacggctcagaaaatacacactgtccgtgttagccaatcggtaaaccagttcggtcttgtctacatatacacaattccggttacgcaactgctcaaaattctgtatgcctatggggtatcgtctgtaattttcttccatattctcattgttttctaattctgcttatgggatagaaacaaagatagctgttatccgataaaacacaaaaacttttcatttgtttttaataaagccccaacaacttaaactggtgatgataaggtaaagagccgttagaaatataaaatcatctctcttttattgcagataatcaaaaaataaattacttttgtttcacttaaaacgaatcaataaacaacttaaataacagaacagtatgatagacgcaaaaacttgcatcaacgacgcacaagagaaaatggacatggccgttatgtatttggaagaagccttagcgcacattcgtgcaggaaaagccagtacccggttgctggacggcattcgtgttgactcttatggaagcatggttcccatcagtaatgtagctgccgtgactactcccgatgcacgcagtatcgccatcaagccatgggacaaaagtatgttccgtatcatcgaaaaagctatcatggactctgatctgggcatcactcccgaaaacaacggtgaaattatccgtttgggtattccgccattgacagaggaacgccgcaagcaactggccaaacaatgtaaaggcgaaggcgaaaccgcaaaagtaagtatacgcaacgcacgccgtgacgctatagacacactgaaaaaggccgttaaagagggtatgcccgaagacgagcaaaagaatgcggaagccaaacttcagaaagtacacgataaatatatcgcgaagattgaagaacttctggcagagaaagataaagaaattatgacggtttaatgaagaacttaaaataatgaagcaataataatgaagaaggaagaattgtcctgcacagccttgcttttgtccgtgcggtccaattcctctttcttcatttttcattcttcattttaatttatgaaaggactagtaataaaaaacacaggcagctggtatcttgtcaaaacagaagacggacgtaccatcgaatgcaagatcaaaggaaatttccgtttaaagggtattcggagtaccaatcccattgctgtaggagattatgtacaaatcattatcaacaatgaaggaaccgccttcatcagtgagatagaagaccgcaagaactatatcatccggcgcgcctccaacctttccaaacaatcgcacatactggcagccaatctggatcaatgtatgctgattgttacaattaattatcccgaaacctcaactatattcattgaccgttttctagccaccgcggaagcataccgtgtacccgtcaaactgatattcaataagacagacaggtataatgaggatgatacacgctatatggatgctctgataaacctgtacacatacatcggttacccttgcttcaaagtttccgcactgaacaacataggtacagatgaagtgaaaaaagacctggaagggaaggtcactttgctttccggcaactcaggagtagggaaatcaacattaatcaacgccattttacctgaacaaactttgaaaacaggtgaaatatccgattaccataacaagggaatgcataccacaaccttttccgaaatgttcccggtagacggcggcggatacatcatcgacactccgggtatcaaaggtttcggaacattcgatatggaagaagaggaagtaggacattactttaaagaaatatttgaatattccgctcattgcaagtatggaaactgcacccacaggcacgagcccggatgcgccgtacgcgatgcagtggagaaacatctaatcagcgagtcacgctatacttcttacctgaatatgttggaagacaaggaagaaggcaagtatcgcgccgcttactaaaaaccacaactttatgaaaaaacacctcttagctattgcactgtttgcattatgtaccaccgggctgaatgccgcttctcctaaaaaagtagctcctgaaaaaaaaggagtagaaaccattaaccgtgccacagccgaagcacatatcggctttttggcctgtgacgaactggaaggacgcgaagccggatggaaaggtggacgcattgcaggcaattatatcatttcctgcctgaaacagatgggaataaagccactggacggagactatatacagccctttgacgtgtatcatgctgaacggcaagtgaaagggaaacgctggcaagtacatcccgattctattgcggaactgaaaaaagtggtacatcaaaaattggcattacgtaatatcttaggtaaaatagaaggaaagaatccaaatgaaattgtcattatcggtgcacattacgaccacataggctacgatccgatgctggaaggagatcagatttataacggtgcagatgataatgcatcaggcgttcaagccgtattacaggtagcccgtgcttttcttgctaccggcgagcagccggaacgtaccgttatcttcgctttttgggatggtgaggaaaagggattgctgggctcccgttatttcgccatgaactatccggatattaaaaaggtaaaaggctatttgaactatgacatgataggacgtaacaaccgggaggaccagcccgattatttcgtttacttctataccgcagcccatcaggccttcggtgactggctgaaaaaagatattgaggattaccgcttgcagttatcccctgactaccgggcttgggacaatccggtgggaggcagcgacaacggcacgttcgccaaactgggaatacctattatatggtatcacactgatgcccatcccgattatcaccttccgggagatgaaacacagaaaatcaattggctgaagatagtcgatataaccaaagcctctttccttgcgatgtggaaactggcaaacgaaaaaaaatattaaaaaagaacgtggcgtttaaactgaacgccacgtttttttatctaatcttacattaacgtatttattaaacccatatagaaaggcacatgaacaaacgaatcaaatggggcatcattatattaatcggagccggcttggccggactaggcatctatcaatttacccctcacgaaaatgaagaactgacagccgccgacgcgttgcctaaagaaaacaagcaacgcacattgaaagtcaatgcacaagtcataaaaccacacttgctgacagatgaaatattggtgaccggacgtctggttcctgacgaagaagtgagtttgtcttttgaaacctccggaaagatcaccgatatttttttcacagaaggcacattggtaaaacggggagaattacttgccaaagtaaacgaccggcagctacaagcccagttaaagcgcctggaagcacaaataccattggctgaagaccgtgtattccgtcaaaatgccttattgaaacgggatgccgtcagtaaagaagcatacgaacaggtaaaaaccgaacttgccacccttaacgctgatatcgaaaatatcaaagccaacattgacatgaccgaactccgcgcaccattcgacggtatcatcggattgaggcaggtcagtacgggagcatacgcctcccccaccactgtagtagccaaactgaccaaagtgactccattgaaagtagagttcgctgtaccggaacgttatgcccgggaaattaaaaaagggactaatctggagttcaaagtagaaggaaaactggatacctatcatgcacaggtttatgcaaccgaatccagtatagatatggaaacccattcattgaacatccgtgccatctaccccaaccgcaacggcgaactgctggcaggcagatatgcagatattcaattaaaacaaaaagaaatagaagatgcgatagcgattccatccgaagcgattgtccccgaaatgggtaaaaataaagtatttgtttatcgtagcggagttgcagaccctgtagatgttattataggactccgtaccgaagccgaagtacagattgtacgaggattgtctgtgggtgataccatcctgacatcgggtacactgcaattacgtaagggaatgcctgtggaacttcaggccattaactaacaactaaaaaaatacttttatgaatatttccgaacttagtatccgtagacctgtgcttgccaccgtgcttaccatcatcatattacttttcggactgatcggttacaatacattgggagtccgcgaatatccttcggtagataatccaatcatctctgttacctgtagttactcgggtgccaatgccgatgtaatcgagaatcagataaccgagcctttggaacaaaacatcaacggtattccgggaatccgttctttgtccagtgtcagccaacaagggcaatgccgtatcacagtggaatttgaattatccgtcgatttggaaactgccgccaatgacgtacgcgacaaagtgtcccgcgcacaacgttacctgccacgcgactgtgaccctcctactgtatccaaggctgatgccgatgcaacgcctatcctgatggtagctatccaaagtgacagccgctctctgttggaactgagtgaaatagcagacttgaccgtaaaagaacaactgcaaaccatttcggatgtaagcagcgtatctatttggggagaaaaacgttattccatgcgcctatggctcgaccccaccaagatggcaggatatggtattactccggtagatgtaaagaacgcgataaccaatgaaaatatagaactcccctcgggcagcattgaaggtaataccgtagaattgaccttacgcaccatgggacaaatgcacaccgctaaagaattcaataacatcatattaaaagaagtaggcggaagagtggtccgtttcagcgatatcggttacgccgaactaggtccggcagatatcaagagttacatgaaaatgaacggagtgccgatggtaggtgtcgttgtcattccacaacccggtgccaaccatatcgaaatcgccgatgccgtataccagcgtatggagcagatgaagaaggacttgcccgacgatgtgaaatacagctatggctttgacaacactaagtttatccgcgcttccattgatgaagtaaaaagtacggtgtatgaagcgttcgtactggttatcatcatcattttcctgttcttgcgcgactggcgcgtgacactgattccctgcattgtgattccggtttcattgatcggagctttctttgtgatgtacatagcaggtttctccatcaatgtgctgaccatgctggcggtggtattgtccgtaggtttggtagtggatgacgccatcgttatgacagaaaatatctatatccgcatagaacgaggtatgcgtccgttcgaagcaggaatagaaggggcaaaagaaattttcttcgctgttatctccaccactatcaccttggtggcagtgttcctgcccatcgtatttatggaaggaaccagcggacgtctgttccgtgagttcagtttcgttgtggcaggttcggtcatcatttcttcctttgccgcattaacgttcacccctatgctggcaaccaagctattgataaaacgggaaaaacagggatggttctaccaaaagacagagcctttctttgaaggtatgaaccgcatatatgcccgttcactgaacgcttttcttaaaagacgcatatgggcaatacctgttacagtgattatgttgatagccatcggagtactttgggtccagatacccgctgaaatggctccgatggaagaccggtcgcaaataagtatcaatacccgtgcagccgaaggggccagctatgaatacatccgtgattatacggaagatatcaacaatctggtagattctattatacctgatgccgaatctgtaaccgcacgtgtttccagtggcagtggaaatatacgtatcacattgaaagatatcaaagatcgtgattacacccagatggaagttgccgaacgtatctcacaggccatccgcaacaagacgaaagcacgtgcctttgtgcaacaacagtcttctttcggcggacggagaggaagtatgcccgtacaatatgtactacaagctgtcagtatagaaaaactggagaaagtattaccggcttttttaagcaaagtatatgataaccctactttccagatggcggacgtggacctgaagttcagcagcccggaaatgagagtgaatattaaccgtgataaggcaggtacaatgggagccaccgtgcgtgatatagccgaaacactgcaatacggtctcagcggacaacgtatgggctatttttatatgaatggaaaacaatatgagattttgggtcagataaaccgccaacaacgtaatacaccggccaatatcaaatctatttacatacgaagcgacaaaggggaaatgattcaattggacaatctggtagaatttgtagaatccgtagctcctcctaaattgtaccactacaaccgttttatttccgctaccgtatctgccggactggcagacggaaagaccatcggacaaggcttggaagaaatggataaaatcgccgcccagactttggacgaaactttccgtaccgccttgtcgggagactccaaagactatcgggaaagttcatccagcctgatgtttgctttcattctggcattgatacttatctatcttattctggcggcacagttcgaaagtttcaaggaccctttcatcatcatgcttaccgttcctctggccattgcaggagcactgattttcatgtatgccggtggcattaccatgaacatattcagccagatcggtattattatgctgattggtctggtagcaaagaatggtatcttgattgtggaatttgccaatcagaaacaagaatccggtgaaaacaagatgcaggccatacgggatgccgctttgcaacgcttgcgccctattctcatgacaagtgcctctaccgtattaggcttgatcccgctggcattcgcaacaggagaaggcgccaaccaacgtatcgccatgggtacggctgttgtgggaggaatgttagtatctactttcctgaccatgtatatcgtaccggctatttatagttatatatctaccaaccgaaacgttaaaacagaaattgtatgaaacgaatcattataactttatgtatctgtactgcatgggtggcttccacctatgcgcaatatccttatacgctgaaaaaatgtctggaggaaggacttgcaaacaattattccatacgtatcacccgtaatgaagaacagatcagccataacaatgccacattagcaaatgccggttatctgccgactgttgatttgtctgccggatatacaggaacgttggacaatacggataccaagagtagaagtacaggcactacagccagtgaacgaaacatctacgaccaaaccttaaaggccggactggatgtaaactggactctgttcgacggattcaatatcagcaccacccacaaaaaactgaaggaactggaacgccagggagaaaccaacacgcgtattacccttgaagacttcatagcgggactcactgccgaatactataattatgtacaacaggaaatacgtctgaagaacttcctttacgctgtgtctttatccaaagaacgcctgcgcattgtagaagaacgataccatatcggtaatttttcccggctggattatcaacaagccaaagtggacttcaatgcagacagtgcacaatatatgaaacaacaggaactggtggttacctcacgtatcaacctgaacgagttaatggccgtacaggaagtcaaccgaccgctacgtgtcaatgactccattataacagtgaatgatgcgctgaattacgatgaattatgggaatccaccctcaagacgaatgccaacctgctgaaagctgatcaaaatacaacaattgcccaattggattaccgtcaggttctatcccgtaattatccctatgtgaaattgaacgccggttatggctatacattcaacaaatatgaaacaaacgccaccagccggagaagcaattggggactaaacggaggaattaccgtaggcattaacctatgggatggtaaccgtcgccgtgaaaagcgcaatgccagcctgcaaatacgtaactcgcaactggaaagagaacagctggaattgggcttgaaagcggatttaagcaatctgtggcaggcctatcgcaataatttacgtttattaaatttggaacgccagaatctggttgccgcccgtgaaaaccatgaaatagccaaagaacgttatctgttgggagatctctccggtatcgagatgcgtgaagcccaaaagagcctgcttgatgcggaagaacgtattttgtctgctgaatataacaccaaagtctgtgaaatttccctgctccaactaagtggaagaataacgaaatatctcgaataatcgttatagcctttacttatagcttgtaattcagggcagttatccgtacctttgcacacaattatcactaaatatgttgtaaaaagatatgggattatttatcaagaagccttttgctgcattacaagccgaagccaatgaatctggaaacaagaccctgaaaagagtcttgggaccatggagcttgatcgcattaggagtaggtgttatcatcggtgccggattattctccatcaccggaacagtagccgcaggatacacagggcctgccattactttatctttcgccatagcggcaataggttgttgctttgccggtttatgttatgccgagtttgcttccatgatacctgtagcaggtagtgcttatacatactcatatgctacaatgggcgaacttatagcatggattatcggctgggatctagtattggaatatactgttgccgctactaccgtcagtatcagctggagcagatatctcgttgtttttctggaaggagtggggataaatatcccccatgcacttgctgcttgtccctgggacggaggtattgtgaatataccggccgcactgattgtagtgctgatgagtatttttctgattcgtggaacagaaggaagttctatctttaacggcttcattgtgttcctgaaagtggcagtgattcttattttcgttgtattaggatggaaatacattaatgcagagaattatgttccttatatccctgccaatactggtactttaggcgagttcggattctcgggtgtattgcgtggagcagcgattgtatttttcgcctttcttggttttgatgccgtaagtacagccgctcaggaaacaaaaaatccgaaacgggatatgcccgtcggcattctaggttccctgctgatttgcaccattctttatatggtgtttgcttacgtaatgacgggagttgcccattattctgactttgcaggacaacaaggtatcgcacctgttgccgtagcgattgaccacatgggacatgcagatgccacaggagtaattcatccggattatccgtggttgaaccgggccatcgtactggctatcctgtttggttactgctcggttattatggtaactttgctaggacaaagccgtgtatttctaagtatgagccgcgacggactgttgcctcctttcttttcaaagattcacgagaaataccggacaccggcacacagtaatttgttattcatggtcattgtaggagggctggcagcatttgttccggcacgtgtagccggagaaatgaccagtataggtaccttattcgccttcacattggtttgcgcggcagtattgatcgtgcgtaaaagtatgcctgacgtacatcgtgcctttaaaactccttttgttcccacggtaccgattctgggcatccttacctgcctttgtatgatgttgtttcttccggctgacacttggatccgattggtattatggatgctgataggtctggatgtttatgcctgctatggagtaaaacacagcaagctggagcataacgtaaaacgacgcaaaggactcaccatattgaatatgacaggaatcgccctgtctgtactttcagttattacaggattgtggcatcaacagacagtaggctgggaagaagacaagacattgctcgctatttcgttcgcctttgcgttcacacattgcgcattctatatggtacgtatctggaaacagacatccgagaagaagaaataagcattttccacacgctatctgtttccataactttcattcaccgtaaggggtaaattcaatccaccccctaccgtgaataaagttatcatagtttcatacccatcggttctgaacccataatcaagccttataacctatgaaagtcttaagttatccatagtagaaagaacatttaaaaaacttcttcaaaaatgtttttagctactaccacagtatttccttcaggaattgaggaatagaatcctgtttctttagtccatgcttcttccaaggtataaaaatcaagttcctccggttgctttccatccaggacacaagctaaataatcaaaataagccttccatctcataaaatagaaatctttcaaaatgccattccattctttatgagcataatcacgaagtccgccttgatctgccgctacacgatttccccatgtagtaatctgaacacgtgcattccattcgtataatgctttttcttcctgggtctgtcctgctgaacgtgccgcttcaatccaagttccaaccttgaattctttccgggtacccagcaactggtcttgcaatagaataagatgcagaaaatgctgtgaagccaactcaaatacttgcttgtctcctgcccggaacgcagccgttaccactttttgcatcaaacgccccttttctgccaatgcctgccggagcacatccaccaaatcgaattcaaaattattattaccctgatatttatcagccacagaaaccatcagtcgggcagcctctatcacatcctgcggattatagtattctttcatctccgaccaactggatacctgatatacatccaaccccggacgagcgcagaataccgactcatgcgttccctgttgtattttctccttgggactattataaataccgttacctaataaatcccaaacttgttgcaaagcctcatcctctaccccataacgagcatatacgtatcctttcaaccactcatcacgagtaaaccgatgttcacgccatggcaattccatcaccagctcatacataaccggattgttctcaataccttccggagtcatccctactccacgcaatgtccttccggcatgaacatctgctttcgcgtcataaaagccatcaatcagcgcatccattttaccatgaagcccaatgttaccaccaaaattcaacaacatgcagtacacccactcatgctgcccgtatcctcctttacgacaccactctgacgccgggtccccccattgcggacggcattcgctatgcaagtccaagactaacaggtctcctgcttccagatgctctatcatcggagtacgaggattgtcctgccatgcctgagccacccacacagcatccggatttgtttttttcatggctttcatgatggctttaccggctgcatccaaatttactccttgagtacttcccccttcatgaaacggatcaatagcgtaaaaacctgtttttccatacagttttgtcagttctctataatacaaagcagagatttcttcaaagcgttcatcctccggctgtaaaaaggcaggacgatgatagctgcaccaaaatccgggatcagcaacattcaatcctaatttctcctttgcattatgaggaaccatgccacaatatcccggcaacacaggttcgatgccatattcacgcattctttttacaatcttcttctgaagtttttcctgacgggtataccaactttcaggattaggtcctccccacccttccagattattcatcaaccaccaagctgtaaaacccggtccggctacaaattcattaatttcatccttagtatatcccagttttagaagtacatttctccaaaccgactcagtccctgtcaatgccagggaaagattgataccgtgaagcgccatccaatctatctccttttcccaacgctcccagtcccaaaaagccatggaataagagaaagtacaataattcagatcataacgatagggcagatccgtttcatgccgttcctttttagtcacagggggcaaaacagcaggcagttttgcagtcattccattccaagaaagatgtatgcctgcataatatttcaaataccaattcaatccggtagcaatatttacatagtcattaccccggataattactttatcacctttctgatcgagttcaaaaaaatcagtttccgatttctgacgttcaataataaatttggaggaagctcctttgtcgatgcgctctaataatcctgtaacaggagaagaaaataagttgcttgtcatccataacagcacaaacaacaatcgtagttttttcatcatattattaaggtaacggataacaccaattaaataaaaaacagaacagccccctcgcctttaaagggaggaaggctgtattagtattattacggaataatttaattatttacaatttccaaggcaacgcggcttcaactgcttgaagaagtcattacctttatcgtccaccaaaatgaatgccggaaaatcttccacttcaattttccagatagcttccatacccaattccggatattccacacactcaatgctcttgatattattctgagcaaggatagcagccggaccaccaatagagcccagatagaaaccgccatacttcttacaagcatccgttacctgctggctacgattaccttttgccaacattatcatgctaccgccatgtgactggaacaaatccacatacgggtccatacgtcctgctgtagtggggcccatagaaccacaagccataccttccggagtctttgccggaccggcataatagataggatgatctttgatatactgcggcaaatcttcgccacgatccaaacgctctttcaatttagcatgagcgatatcgcgacctacaataatggttccgttcaatgacagacgggtagctaccggatacttggtcaattctttcaggatatccgccatcggttggttcaaatcaatcttaaccacatcgccttcaccggcttcacggagttctgccggaatcagctcacccggtttatcatccatcttttcaatccagataccatctttattgatcttacattttatattacggtcagcagaacaggaaacgcccagaccgataggacaagaagcaccgtgacgaggcaagcggatgatgcggacatcgtgagccatatacttaccaccaaactgtgcacccaagccaatcttataagcttcttccaatacttgtttttccagttccacatcgcggaaagcacgcccgtattcattaccggtagtaggcaactcgtcataatagtgagtagaagctagcttaacagtcagcaagttcttctctgccgatgtaccaccgattacaaatgcaatatgataaggaggacaagcagccgtacccaaagtcttcattttttcaacaaggaaaggaaccaatgtagccggattcaatacagctttcgtttcctgatataaataggtcttgttcgccgaaccaccacctttagtcacacaaaggaacttgtattccataccttcagtagcttccaaatcaatttgtgcaggcaggttacatttggtgttcacctcatcgtacatagtcaaaggagcattctgagaataacgaagattttcttccgtataagtcttataaactcccaaggaaagggcttcttcatcacaatagccggtccatacctgctgacctttctcaccatggataatagcagtacccgtatcttgacaaagaggtaatttgcctttagctgaaacttccgcattacgcaagaaagtcaatgctacatacttatcgttatcactggcttcgggatcactcagaatcttagcaacctgttcattgtgtgaacggcgaagcaagaaagaaacatcacggaaagcagcgttagccatagcagtcagaccttctttttcaatcttcaagataggttttccttcaaactcacttactgacacataatctttagtcagcaaataatactcggttttatcaggtcccaacgggaacatgtgctgataatggaacggaggtgttgccatattgatacttattttagttaaaagttattagtgtgacaaaggtagtaactattatcgaaatttttccttaattagcgtgaaaactttcaaggaatgtccttacctttgccaactcattaaaataacatcacattatacatgaaaagattaggcaaattcttatttattacttcattactgttatgctttctcatccctcgaggatggacacaaacccaagcaaaaaaccaaccggacagtatcgaactcaaactgaaggaaatctacacaaaacgggaagtcatgattcccatgcgtgacggaatcaagctttacaccgctgtctacgaaccgaaagacaacagcaggcagcatcctatcctgatgcaccgcagcccttactcttgttccccatacggagaaggatttgaccgtcatttcagaactaatctgaaaaactatatagagcaccgatatattatcgtcttccaagatgtacgtggacgacataagagtgaaggaatatttatccaagtacgccctctcaacaaaaacaaaaagggtaagaaagataaaaagaatatagacgaagctacggacacatacgataccatagaatggttgattcacaacacatataataacggaaatgtaggaacatggggaatcagttatgatggtttttatgccactatgacagcctcctccaatcatccggctttgaaagctgtttctccgcaagctcccgtcaccgactggttccgtggagatgaccgtcatcacaacggagccttcaccttgctgcaaaccactaatttccttcccagactggaaggacgccacatgggaaaaggagtgatgaaccaaattgtaaagaatgatgtttacacagattttctggcactcggtacctttaagaatgtagacgacctggtacgtgataccacacagacattgtggaatgatatcaaaaaccatcctgatttcgatgatttctggaaagagcgcgatgcacgcacctcctgttataacttgaagccagccatattggtggtaggtggactgtatgactccgaagactgttacggagcctggaatctttataaagccatcaaagagcaatcaccggacacagatttatatctgacattcggtccttggtggcatggagcatggacagtacgcgggttccaaggtttcggtaatctgtatttcggtaaaagcacttcggcttattacatggacaaaatagaatatccttttttccgatatttcctggaaggaaagggagaaaagcccaagcataaagtaaatatattccatacaggtgaaaacgaatggaaaacatacgacgaatggcctgtacaaaagactgccggtacaccttattatatacataaaaacggatcagtatccacacaagcaccggcagaacaaaagtcttattcagaatatatttcagatatgtcacgtccggtaccctatacggcaaaccctaccacttaccggacaaaagaattcatggtagatgaccaacgctttgctacttcacgtcccgatgtcattactttcatgacggagccgctatgtgatacattaacattggccggtcctatagaagtggaattaatgactgccatcagtagtactgacgctgattttatggtgaaagtaattgatgtatatcctgaaaaatttgaatattccaaaactgcacgcagttatttaaagagtgactacccaatgagtgggtaccagctgatgattcgtggcgaattattcagaggacgcttccgtaagggattcgacaatcccctgcctttcaaaccggaagaaataactccggttaattacacactgtatgatgtggcacacacattcctgccgggacacagactgatgattcaaattcaaagttcctggttccccattattgaccgcaatccacaaaggtttattgatacctatcattgtacggtagaagattttgtgatgaaacaaaagatcaaaatttatcatcagcaaggagctgcaagcagagttatactacctgtggtaaaaaaataaaaaggaagtatccaaacaagctcaaatgtcatccaatagcaagagccgtatgactactccagcattcatacggctctttttatatgtaactaccatctgtaacttttccgaaggttcatcttagtctggatactctcatcaaaaatatcatatagaagcaatccgttctatcaactcgttacccaacgctgttttcgcttcaatatgctgcaataccgctgtcacaaacggattactttcaaataccccacgcacctgttcaaaatcctgctccatttcttcacgtgatccatctgcaccgaaccccgtcatagcagacaaagaaaattcctttttcgcatcggcatagaccattttatccaatccgacaacagcctcctgccacttcttcacgatagcaataacatcctttgccgttatttcatcggaacgcagattataaaactcaagcatcttcccatacgcccatgtccactcgtatgtataataattacgatgcatctcaacaaaacggtcatgaatctgatccacattagtcaggattccagattctatatctgccatcaacttctctatttcacttttaggagcgatcaatccggaaatatccacccattctcctgtccctatctctgtatcaggaatcaaccgggtacggatttcctcatcactgctaaaacgaacctcttccaaacgcttgattaatgaattacccaaaaatttatgaatagccgtttcataaaaacgaatgccattatttaaagaagaattcttaattttcgcactttggtaagagtaagtttctgaagtttctccggatactttacgtaattctttcagaatactacgccctttcatcattttctgaatagtatagggactcaacaggttataattaatctgatccaaacggttcggatctttacgtttgtcacgtttaggccacttttgagcatcccgaatcgtacctacactccgcaaattcacccctggcaccagataagtggtattttgctgctctatcagataagaaaaaggcagattagaagtatcggcatgattcacatgacgccccataaccaaagaaaatgcacctacacgtgcgggccataaaatataagaatcggaagtagtcttcgccccacgctccatagccccctgatgaatcggacctaatttatacatatggttgctttgattagagccggaacccgcattcataaaagagaacattccggcaatcagcaaagtagacttatgatgagtcaccgtaaagggtccggcaaaaatggcacatgcctcaccgttctcttcttgacaattactgaaaaacaaagaatcagatgcagaatagttatgtcccaaatgacatgcctggctgataaagcaacgggtcaacatagttccatcttccacattggatccgcttgatataataaaatcatcgcataccactccatagccgatatgaataggcgcttgctcattactgttcaagctaccgtttttcaatcgtcccgccccttctatcttacaataatcacctattcgtacattctttatatatcccgcatcaacaatggtaacatggtggccaatagtacctgtatccgaagcattctcttcagcataccggtcaataatggctttcatccggcaaatcaattcaggacgatgacggtacaatgccagaatataggcctgatgcgctgacaaacgatcatgaataggcacttcacgtccacccgtttcattcaatacagctacttcaacgccattcccaaacttgctccggccatctaccagaatgatatctacattctctataaatgcataatccccaatgatatagttggctatatagttctttatattctcaatacaacaattatcgcccaccgttacattatgcaaggtcgcatgatacaatccggaatgtttacgcataccacctgccaacgtaaactcatcttcaaagacccccaatctgacctttccggaaaaacgggtatgataaatatagtccgtcttaaagttctctactacttcaatttcatcccaatcaaccgcagtgcatgatctctcttttaattgttgtatttcttcttgtgtaagtgaacgataagttttcatcttctatatgtatttattcttcatcataggtttgataaagaaaatcgttataaggatacttctgtacgtgtagctcgcgcaccttattatatataatagtcttcaattcatccatatttattttctctctggcagaaatgaagatacaattatcattcaattttgccatccatgtcttcatcagttcttccaatgtaatattctccctggttttaggagtcaaatcatcctctgctttctctatataggtataagcatctatcttgttaaaaacaatcatggtaggctttccacctgcccccaagtcagcaatcgttttatcaaccacagaaatttgttcctcaaaatccggatgagaaatatccaccacatgaatcagcagatctgcttcacgcacttcgtccaaagttgatttaaaggaatcaaccaaatccgttggtaatttacggataaatcctacggtatctgtaagcagaaatggcagattctcaataatcactttgcgtactgtggtgtccaatgttgcaaaaagtttattttcagcaaagacctcgctttttgaaagcaaattcattaaagtagattttcccacattggtataccctaccaaagctacacgtatcatacgcccacggtttttacgttgagtggacttctgtttatcaatttcagccaaccgttctttcaacaatgacatacgattcaaaatgatacgacggtccatttccaactgagtttcacccggcccacgtaatcccacagagcctttacctccaccggcaccggatccacctccctgacgctccaagtgagtccacaaacgttgcagacgaggcagcatatacttatattgggccagctccacttgtgttttagcatttgcagtttgagcccgcatggcaaaaatatccagaatcagcgaagtacggtccaaaatcttcactttcagttcagcttctatattacgtatctgcttggcagaaagttcatcatcaaaaatcaccattccgacttcacgctcattttcctcttcctgatgaatatattccttgatttcttccagctttcctttaccgacataagtcacggaattggcagcaggcagtttctgagtaaaccttttcaccactgttgctccggccgtttcggccaagaactccaactcatccaaatactccttggtcttacgctcatcttgtgtctgagtaatcaaaccaactaagatggcagtttcaacctgtgcttcagaaattacaaattctttcatttatctatcaatctaaataagttcgcgacaaatataacaaaaaaagaggatgaacgttgaacgtcatcctcttttttattacagttattccctatagttgtggttgtggagcagccggattgttatcagtgtcactgattccggaattggtttccatttcacattgcggaatccgatagatcaggatctgcgcttctgctgctgaattatattgtacagacgggtcataattcgtattcttacgaaccaccggctttttcaagcgtaggatatcgaacagtgagaaaccttctccccaaagttccatacgacgctgcaaccaaacctcatcctgaaaatcctgtgccgaattagctttacttgtaaaggaaggatcccgatatgtccgtacaaaattttccaatgtactctttccgccactcagattaccacccatggcttctgcctcagcctttatcagatacatttcttcaacacgcatcaaaggccagtctgacgcattggttgtgttaccaaatatactttgataagctccgaactttgtatttacatacggagtcaaaccaaaatattcaacgatggaagtaccctcaatctgctcattatcaatcaatgaagatttattatccggagacaagaaccattgtttacggatatctgtttcgggtattaaatcatataatgcagaattcacctttctatatccatcaggcactcctgaagtataaccgttcccggtaaaagagcacaagtgcgaaggccagttgataatacctgtctggacaacatcattatcaggcgtaatcatcactccccataaccatgaacttgccgatgctgaattaaaggtaggagtagatacctgggctaaagtctgaggtgtaccgccagcaatggcacgttctgcatctttagctgcatccgcccatttttgcattaacagattagcacgagcacgcaatccgtaaactactgcctcatcaatctgatctttgtttgagccattatcatacccggtcaataaatcagcagccgtattcaggtcactcataatctggtcatacacctgctgtacagttgcacgcggattattctgcatatcttcatcagtcattgtttctgtaacaataggtactgccaggctattttcatgacctgcataagtaaactgataaatttgaaccaagttcagatagtcataagcacgagcagctaaagcttggccacgataaaccttcaaagaagaattttccgtatctgccgctatcaatttcaatacattgtttgcagctttcaagtgattatagaacgttttccaaatcaattcatcgcttgaactatcgtatactctgtcactataattctgagatgtattaaaccagttatatccattaaccaatgcaaccaagtcctgccctcctgattccaatatcatagataccgcaggaataccatagtcattatgataagtagtggcatcatctgaaatcgtaccaaaagtatttaatttggctgccatagcgttcacttcagcagttatcaaattaggtctgccattgattatatcttctttctgttcttcagatatgtaatctccttcaggaaatttatccaaatcgcaagatgccattaataaagcgacacttgcaaatgctatatatttatttgacaatttcatattcttaaaaatgggttgctaaattagaaatttaaagatatacctccggaaattgtgcggataggtgaatatacattgtcagcagccacataaccttgacgtgggtccaaccctttgcgaactgtcagcaaagccacattatctgcaacaaagaatacacggacaccgtcaatctgcattttacgtgtcagactcttcggcaaagtataacccaatgtaatattctgcaagcttaaatagtccgaactagtcaagaaacgatctgttaatctgttcgtatattggtcattaatattcatacgaggaacatccgtatttttattttcaggagtccatgcttttaacatatctttatgcaaagcactacctgtggctgccacatccatcaatccttgataagtatagtccagaatacgtccaccaagctggtatgcaaacgaaacagagagatcaaagccataggctgtaacacttgttccaaaaccaccataaactttaggtagaatatcacctgatgcgaatctgttttcagaagcgacagaataagatttcgtaactgtattaccattctcatccggagtcaccagcgcccacagactctctcctgtttcagaatccacacctacatatttaggtaaataaagctggtacatagactcgtcttcacgataaatccgggcaccgtcaatcaattgtccattcagttctggagataattccaagactttattcttaaaatgtgtaagattaaagtttacattccaggaaaaattcttgttttcaattatattggaatacaagtccaattcaaccccacggtttaccattgaccccacattctcaggaaaacgggaataacccattgaagctgctaccggtttgaaataaagcatatcggttgttttacgtgagaagtactcaacagaaccacctaacttaccaccccaaaaagcgaaatcaaatccagtattaaagctgtgtgaagtttcccaagtaatttccttattacctttataatatagagaagttgaaaaatcgccattactgtttgccaatgtatactggtcttgatacggatagtagttacggtacaaaccaccttggaacatcaagttatcattaccttgcaaaccatagctgattttaaatttcaacatatcaatccaagactggttttccaagaatttctctttgcttaataaccatccagctcctacagaccagaagttaccccaacgattatccgggtgaaaacaagaagaagcatcacgacggaaagaagctgaaacaaaataccgtccatcatagtcatattgtgcacggaacagccatccttctgttgcataattacgagaatatgaattattgctctggttcataataccattgcctaattcaggaacattcggatcatacaatttctcacgttgtccgtacaaatattgatatttatagtcataactttcatgtccggccaaaatatccacattatgaacatcattaaatgttttgttgtatgtcaacaaatactgctgatttacactaaatgtacgctcactagctacactgatcaaacctccgactccgctagtttcagaatactgtccgtagaaggggttaaccatctctgtagcacgcacattatttacatcaacacctatattcacttttgccttgattccattccaaatatcaatatcagcagaccattttccactaaccacatcacccgaatatttcattttatccagcatataacttgccaacggatttgcattaggaatcgtattacggctaccatttgaatcttgtcctggctttccataatcataacgaaggaaacctcgattatctaccataatattgccctgtgcatcacgaacatacataggataaatggctcccattatatttgatgcataaaagatgtttgcatttgatgtaccaccctcagtatcctgttcacggctatcataatgagtaaatgatacatttcctcccatcttcagccaaggcttcacttgatagtcagctttcaaacgtgcagaataacgttggaaaccagagttaggaacaattcccttatcatccaaatagccggccgacatataataattcattttttcagtcgcaccgctgatacttaaattatactcttgacgcaggttattttcaaaaatttcatccgaccaattatccggagtataataatatgtaccatcagaataacctaatgtcgcattaggattcaatttgccatccataccgatcagttgctgtccttgaggaatggaatacacctgatatcccaaatatgtagaagaaagcattgcttgattagcgtacgcattagctttagccaaatctccggctgccgcatatcctttcaaatcggcattataaatagaagaatagtttaattcatagaatgtagccggatccgtaattgtttcataattaggtactccacgtttattcacaccccatttagcgtcaaaagtaacacgggcttccccacttttaccacgcttggtagtaatcaagattacaccattagcaccacgtgcaccatacagagcattagaagcagcatctttcaacactgtcattgattctatatcagaagtactgatagcagaaatttcaccatcatacggaactccatctaccacatacaaaggcttgttactagccgatatagatccaataccacgaatacgcacttcagcatctttgcccggctgaccattattactcgtagtttgtactccggctacttgacccgccaaagcatttgtcacatttgaagtttgtctcgtcgctattttttcattttttatagtagcagccgaacctgtaaatgcagattttttcgctgtaccataagccaccaccattacctcttcaagctgttctgtatcagactttaatacaatattcaagtttgctttaactggcacttcttgtgtagccattccgataaaggaaactaccaaagtctttgcggaactaaaatatacaaaaaaacatctagtaatcaaatgtttagcattctgctctcttgtagatatacaatattacatctattataacaaactataaatcaactatatattataacataaaaaaaataatttgattttatgtctacttttattctaccttaaacataaaaaagatgcctagtaatctaagcatcttttttattatagacctattattagctattcgtttttatcagtaatctcactattggcatttaactccttatcagggatttgataaatgaataatttactacctgcagggacttcctttggagcaatcgcactatgattaattgcatgtgttctatccaaactttcattacgacgtttcatgtcaaataaacgacgaccttcaccccacatttcaatacgcttttgaagttcaatttcttgtaaaagtgcatcacttgttgcggatgtttcatattttggattacgagttttcataatcgtagtcagcattgttttggcttcattttctttccctgccctatataatgcttctgcagctacaaaatacatttcaccagtacgcaaataaatatagtcagagcaaaaagtatcacctgtaggagtaaaaccaggcgcggtagaacctatatcaataaatttgcgctgcacatattgtcttactttataatgagtatttgtttctcccaaatcaactccaaaccattttttacgaatgtcatcatctgaaattttttcatacaaatcactggaaatcattttgtaatttcctaaattaccaccatatcccgggccgtaaggatcaacttgactcatgaatgaagcgtagaatgtatttgtttcaccattaatatcagccccccataacacttcactcaaagaaaggtcattaaaaccggaaagtaattctttttcactcatcagtgagccaccttcaatagccaattttgcgtatttagcaacttcattccattgatcgggataatcattaacaaatgaaagaatgtttgcataaatagcagctgctgcatattcatttaattcatctttcttggctattccttttcctttcaaataattatatcctttatctatatcacttaatatctgttcatagacctcacttacaggaacacgattcaatttggtttcagattcagtataaataggaatacctaatttatctttattccattcataaggttgctggtacatgtttattaaccaaaaatagcagtaagcacgtatggtgtaactttgtcccaacatcttctcaacactctcatcaccgctatccgcttgttctttcagaccgctgattacttcatttgcaccactgattacagcatataattcttgccaataagtggtcgtacgacgataacttgaagcacggttgtcaagcagataatcatatacgaagaagtgtgaagtcatatatgccatatcatctcccatcaagtctgtagccaattcaaatgcctttaatccgaaatcatcatgactttgctgtgcttccggagaaaacatatttttgtaatatcctgtaatatatgcttgaatagctgtaggatctttatcaagcaaatctttaatttggtcttctgatgcattttctgaaggttccttgtccaaaaagtcatcgctacaagatcccatcataaacgctgcagccaatattgctaaatattttgtatatttcataattctattcttttaaaagttcaaattaatgccgaatgataaagtacgaatcgcagaataattagcagccgaatatccataagcatattggcgtgggtccatacctttacgtttagagaataaagctacattatcggcagatacgtaaatacgtgcactgcttgctgatattgctttcatccattctttcggaaaagtatatcctaatgaaatgttacggatgttaaagaatgatgcatttatcaagaaacgtgaagattggctattactattttgtgcaccatccattataggcacatttgtatttttattttccggagtccaagcattcaagatatccttgtgccagttactgccaatattgcttcccgcatgcatgaaagaagaatacatgctgtcatatatctttccaccaatttgaaagtttgtagctatagaaagatcgattcctttgtatgcaaaatcagttgaaaaacctccttggaaatcgggcaaagtagaacctaattcatatttgcttgcctgagtatagtcttcggttacggtccttccagtcactttgccattagcatctttctcatccatataccattgtgctgctcctgtttctggattaacacctgcgtattcataggtataaagatcataaatagaccctccttccattaagcggaacaaagaagcagtaccatgaataattccattctctcttttgtcttctggaagattcaaaatcttattgctataatgtgtaccgttaaaagataaattccatataaaatcttttgtttgaattggggtggcagaaatagtaaattcaatccccttattctgcatatccaacaggttcattggaacgtaagaaattccagaagaaataggataaggcatattgtacaacatatccgaagtcttcttcaagaaatattcagtttctagtttcaaacggttattaagaaaagcagcttccaaaccgatatttaaatttttgcttttttcccaagtcaaatctttatttccacgataagtttcgactacagagaaatctccgttattattggttacagaatattgcttcagatatggttgatagactacataaccatttatatcaagaattccatcattaccttgtgttccataacttgcttttagtttaagattagacaaccattccacatctttcaaaaactcttcctgtgttaatctccaagaacctccgacagaccaaaaagtaccacggcggtgatcaggatggaatttggacgattcatctgaacgaatacttgcagatagataatatttgttatcaaaatcatagtttacacgaccaaagaaactttccatactatgttcttgtgtatatgaattcatatcactcatagttatggcattgttgaactcaggatttccaatagtataaaaattgtatttatgagtatactgatatttcagtgtatatgaataagattcgtgaccagccattatgtcaatattatgatgaccaaatgctttactataggttaaaagttgatttgctgtaaacgattcaatacgttgattatatttataagtacgaccattcacattagcagcatccccatataactgattcatgtgatctgtacggatttgattcattaaatcataaccaatgttagcagtcgcttttaaaccatcaataatattaatgttaatagtaccacggccattaaaattgtcattcaaagtctgatgcacatccaacccagaattagctgcaacattttgattactgaaaccgcccatacgtgtactgtatgtaccatcaccaaaatcataaacagtgttgccttcttcgtcatatatgcgatttccgttttcgtcatacgcatatacaggataaataggagcgatttgctgagtgaacataaaagcattagagtaattagacaaactagcattttgtgactggcctgcatttttttccgctcttgcgtaagccaaattaccattgatatcaataaacttatttacagtatgattaatattggcacgtgctgaaatacgttcaaagtcagtatgtcttaagattccttcatctttcaaatatcccaatgataaaaaatgagttgtcttagcgttaccaccttgcagactcaaattatattcctgacgcataccattatgtaatgcggcatcagcccaatcgtcattatggcgtagagccgcagaactaactacgccatctgctgaaaccatggcattattagctacaccgatgaatggattgtatccaatgctacctattaattcttcggaagcttctgcacctgtagattgattttttaaagtattccaggctgttagtacgtattctctttgatctttcatgatatcatattctggaacaccacgagtatttactccccagcgtgcatcaagagtaactttggatttatctaccataccttttttagtagtaatcatcacaacaccatttgctgcacgtgagccataaagggctgcagatgcagcatcttttaatatagacatactttcaatatcggcaggatttaatgcattaaccgactcttcgtcataaggcataccatcaactacgtataaaggagccgatgatgcgctaaaagagccaataccacggattcttattttagcattttctccaggctgcccactggtattgattacttgtacacctgctgctgcaccttccaaggctttagatactgaagaaacctgcatttttgctattttttctccactaacagcagtcgctgatcctgtaaaagatgactttttcgcagtaccataagctacaaccactacatcgtcaagcatctctgtatcagattttaaaatgatgctaacattctgtttaatagaaacctcttgactagccattccgataaaggaaactaccaaagtctttgcggaacttggaacatttgataatgtaaatttaccatccatgtcagtaactgtacctacagtagtaccttttactaaaatagaggcgccaactacgggtaatccgtcctcctccgaaataacagtacctgttaccttcgtgatctgagcggttaccaaacctatacctacaaaaaggcaggtcaataacagcattaattttcttttcataaaattctctcttaaagtttaactttacattaatataaattcattcactctaacaaatgacaaaggtatgaataaaattgtaatatcaaacaaattattgtaaaaaacatactaaactgctatatttttatgcttttaggcatttaaaactcacaaaagacgaaaataaacctcatatttattcttttttttaagtcgttaaaaagagaaactttcaatttataactgatcaggtaaacatacattaacctataaatgttaacgaatcgtctaataaatataaagatgagaacaaaatagtaggataatgcttttctacttttctttattgcgtcttattatagaatttcaattaaagaattaaattatgaggaaaatcagttatcgtttcgtttacaatcgaaaaaaaagtttaaatgacagagggaccgctttggtccaagttgaagcctacttgaataaaaagaaagtgtatttttccacacatgtttatttacggccagaacaatgggatgtaaaaaggaaaatcatcaaagatcatcctaaccaagatgcgctgaatggcatgcttaatgaatttattattgaattagagaaaaaagaattaagtttgtggaggcaaggaaagacaataaccttaagcctcataaaagaagagttcaaatcgaatacagatgcttcattcttagggtttgcgcgtaaagaaataatgtcttctcagctaaaagatagcactaagcgcaaccatttaacaacaatatcccttttacaatcgttcaaaccgacaattgagtttgaagacttaacctataatttcgttacggattttgaaaaatttctttatgaatctggatatcaaacaaatacagtagccaagcatatgaagcatttgaaatcttttgttaatgctgcaattaataaaggatacattgatcccaataactatgccttcagaagatataaaattaaaatgaaggaaggaaaacatgtttttttattaccggaagaaatgaaaaaattggaagaagtgtctttgacaggaagaaatagttgtctggaacatactcttgatgcatttttattttgctgctatacgggattgcggtattctgattttgtgaatttgaatgagaaaaatatcgtaaaaatggatggaaaattatggctaatctttgactctgtcaaaacaggtacagaagtgaaattgcctttaaacttgctgtttgaaggcaaggctttaactttattacaaaaataccagggaaaatggagctcattttttttaattaaaaataactcaagtgtaaataaagagctgatacgaattggcaaattggcaaaaataagcaaacacttttcattccattctgcaaggcatactaatgctactttattgatatataaaggtgctaatataacaaccgtgcaaaaattattagggcataaaaaccttgctacaacacaaatttatggagaagttatgggaagtacaattatacgagacttgaaaaaatgtcaaaaaagataattaactctattgtctatacattatctcttataaagatgaagaagaatcattttcaaaagtgaatatagccttatcttcttaataaagtttatcgttttgtgaacatgataattttttgttgtgattgcaatacgataaactaaaagaaataaaatgtgacaatatttccatctcagcctaaccgggtagaaaataagtatcaaggttattgaatttctgcaaaattcatatatgtatatcatataatatgcgcatataaaattctatatcagaaaatgataataatagtttgctaatttacttcatgtcctactatcttcttttgtaatctaaagtgcaaacaatctttggaagttttgaaatatttaaaaagttgagaaatatcaatcttagtatttcaggtattttatgaacagagtaacaacgaacaggaatgctgcaagtcaattcttttttcagtagaagaaaggtagaaaattattattatcatactctttaaacggcttaaatcaaggaaaacgaataagagattcagtaatacatatactggttatcaattatttacataaataattagttccgcaaagactttggt

SEQ ID NO: 3865 - DNA, 39468 bp, Unknown
  gut microbiota DNA sequence
taaccagcaaacatacgaaggaaaaattatccggatttcctgaaacttttttgtaatactctgaataacagatgtgttacaaagcatgtttttataacggaggacacgggaggaaaaagacagacacattataatattcgcacgcgcgtatagggacggaaaaaaggaagggccccatacgaatacagcagacgaaaaacaagaaaagacggaaaaacggaaggcaaacttgcaaacttgcaaaacttgcagcatctccacacccacacacgtgcgcgtacattataatgcaacaaaataatatgttccagaattccactctatttctttattgtgatctgtgaatgatctgatctcctcctgttttcttgttcacgctttttctcttttgcgaaatatatgcgtcttgatgaggagatttctttaaaagaccattactacagccagtgccggctgaagaacagcagctggcaggtcttctggcaggacagtgcctcggaacaggatgccatgccgtgcgtcttcatacagttcatatgttccgaaaggttagtaacatgtgttccgtaaagttagtaacgtgtggccctatacgttactaacatacaggcctgcacgttagtaacgtgttccatttagattgataacgcgttattcctcatgccgacagcttgttctccccaggattgtacaagctgtaccagcatgattggcggaaggtccggcctatacaagtacctgctgaagattcgggcagtcatccctttgccacctgtgtctgtccgattccggtttctgtcttccgctttccttttttcttcttatacggtccctcctctttccaccaaagatcctgtcacatctctcccttttccccgctccactttctgtgctccgtcatgctttcctccatttcagctctcccctgcatcgtccgtttgtcctcctccacctttgcttgtcacattctccttatgttctctcatttttccacattataatgtacgcgcacgtgtgtgggtgtggaagtgctgcaagttttgcaagtttgcaagtttcatccccactttatatcataaagggaactgaaaataaataatattctggcatttagtcaatgcccccataaactatataattttttattgctatatttgtcctcatcaaatcatcaaaatgaatataacttctactatcataacagcttcggacggaacacccctctccttatatgatgtatgccggttcctatccaagcagcaatggaaacacatattaaaacaattgaaacaagaaggaatacatatagaaagaatagaagcttatgaatatccggaagttcgagacatcaaacatctatttatacgctttgaaaaagaaaaagaagacactcctttttatttactgtctccggaaatattctctaaactaaccaacgcgataatacaagaatactcttcaaatataaaataaaaaaagttgtacaatccattaaattaggatgagatgaaaaacatcaacggtcaaggcaatgaaattacaattattttaccacataagaaaatagattgtatatcctcccatcatgaacaattcaatcaaatcatccatcaatcctatatcataattacaggaaacaacaatcatgtttccatgcatttcgattcagaagagaatgttgaaagcctacttcttaacgaaggttttctattgattatcaatggaaacgataacacggttaatttaggaacaatcattttacgctattccaacatactagggatgagtggactaaaactcatcatcggccagttgcccggtttgggagctggtgtttcaagagttgccaataattgtagagttgatataggtaatcgtgtagttatcaatggagttactttatatttacaagaagataaatcaaatgttagcataggagaagacagtcaattaagctggggcattgatatttggtgtaccgacgcacatactataacaaatttaaagggagaaccgattaattttgctcaaagtatagaaataggcaagcatgtatgggtagggaaagatgtaaagatcggtaaaaatacaaaaatacccgataacagtattgtgggttggggaagtattgtaaccaaagtattcaacgaaccgaatataatattagcaggcatccctgcaaaaattgtaaagagaggtataaattgggatcgtagatgcattaataaatacttactagaatagtatttagggtgtctgaaaagatagctagtcagacccccgatttgataactattccgttagaactggaaataaataaacggctgaatatcactgctctttatctggataaccaaataaatcagtactaccaacaataatgcctttcccaataaaggtaattttaccactccacgacaacacgcattctgccaactatcaggagcaaaatgcagcaaataccctattcccatcaaaacaaacactttccaataaccttctatcagctgcatgaatacctcgggatggaaagctgtacatatctgcttcaacataacaaccgaagcttcaaaagtcgtattacggaaaaatatccagcagaaacaaacaaaattgaaagtaataagaactgcaaaaaatttacgaatgcccttactggtagccgtcttaggcttatgcagcaagttacgccagaatttctgtgcagccagtgctattccatgaaatcctccccatatcacaaaattccaagatgcaccatgccacaaaccacctaacaacatagtaaggcacaaattaatataagtacgtaccttccccttgcggtttccccccaatgagatataaagataatcccgcaaccatgtagaaagagagatatgccaacgatgccagaaatcggttatactatcggctttataaggcgaattaaaattcatagggaaacggaaacccaacagcaaagcaaacccgatagccatatcactatatccggaaaagtcacaataaatctgtaaagcatacccatatacaccaaacaaattctcaaccccggaataaagagccggattatcaaaaatacgttccacaaaatttacactgatataatcggagattacagctttcttgaataatccgctgatgataaagaaaacaccagtgccaaacatctccgaggaaacaaacagcggttgcctgatttgaggaataaaatcgcgggcacgtacaataggccccgctaccagctgcggaaaaaaagacacataaaatgtataatccagcaacctgttcaaaggaaccagctcacgacggtaaacatctatggtataacttaaagactggaaagtgaagaacgatattcccaccggcaagaaaatatccaacggctggaatttcccattccacaaaggagccagtatctgataaaagaaattggtgtacttgaaataacagagcaatcctaaatttattcccagacttgccagcagcaaaaccctccgtttccattgagtttcggtattcgccatacgccctgccagcaagaaatccgtcactgtcaccacccccagcaagaaaaaataaaaaccgctactcttataataaaaataataagaaaacagcgttacaaacaggatgcgtgccgtatccttcttctgcaataacatataaatcaggctaaagcctaaaaacagaaacaaaaacaagccgctgctaaaaatcatcggttgcttggcattataagtcaatacctcagccagtttactccaatctagttgccacatattcattatacgctttaatcagtgcctgatgtaataaattaccttgtaaacgatatccatcgggagtgaaatgaatgccatccgcacgaagcatgtggtgcttcgtccagttacgacaagcatctgtctttcctcctactatattatacatatcccaaactgccattttattctcttgtgcatactcctttataatacgcgccgccgttacggttctcggattaatggtacgtgcacgacgacgtcccacgtatgctccgggaggtgtagtcagtaaaaaagccgcttcaggacaggctgctttcaacatacccaacagtctgcctatctgcattttgtgagcctgagccagataacggcggctatgtgcctcattggttccaaaagaaacaataatcagatcgggatgcaaagaagctatttcttttattttttcatcatcagaaaaagtaacagaagtagctccattaatgccaatcatatgataaacaatacccggttcgcccgtttcatgtgccaacccaccggtacgatatgaaataacatcaggataaacagcctcagcaccaaaatcatgttccagacgatgacgggttattaatggataaagatgcccccgcacatgagaatcacctatatggactatccgtaccggtcctgtcatatcattcaacttttgaaagaaaggagaaagcgaacggttctcatcttctatcacattatccaaagaatgagtaaaactcgccggaagtgaatcatgtactgttatcagccgcataccccgatgcatttcctttgtttcaccgggtatgcgaagcggctccaacggccgggacaatgccggaatagcatcctgagcataaagacatggaaacagcaagaacaggaacaataccattgctataccggacagaccaggaaatctgttattcctcctcataggctttccgtctttcatattgctctttgccatacatcaatgtttcaaataagatacctgccaaatgcttgcctcccttaaaattgatatgggtataatcaagattcgccattttttgcccgatcatatcgacaatgcttccttgacctcccattgcctcatacatattccaaaaagcgatatggctatcagccgcaatggactgttgataacggataagattcttgactccgggcatggtgcggagatctccattctcgtttttatattcacggtcacccacactgaccagtaaaatgctggtttcaggaaaagctgtcttcaaatgttctatcaccgaaagcatccctttcttatagccatcgtattttactccccgttccgtagccacattcaaaccatattggaccacaatcaaatcgtatggacgaagacgttggaaatcgcaaagcgtatgtaaaggaatactacgtaaatgaagcccactgctaccacgtacgctaaaattatccaaagatattccctgcctgccgtccatagccactccatagaaagtaacagaatcagcttgttccacactccaccgtacttgtcctatccttcctctcaccgaaacagcctgcacacctcctgttcctacttcctcatgtaactctccttccgcagcattattcactttagaacggacagcggcaaaacctttattcaggaaataaaaagtagaaacctcacaggtatccagtcgggaagcgtatttactctgtcctttcaactgtacataagcaccttcacgaggaaaaaaataatgtccggaaatatcttgctgcattttatcaaaaccaacggagtcattggatgaatgactgctccatcccccaaaagtatggcgtaccgtaggacggtaaccgctgatggaagaggttacaggaacatatcccactccgcaaccaccaaattcttgttgaagcatttcgcgcaaatcggcagtaaaaatatcagcttctataaaagaatcaccgaagtaagcgatacgcacagggcgtttcatggttttcactttggaaagtgcctcataaaaatgtttcattccccgcatggtggaatccgaataatcctcaatacaggtaatacccgttttacatgtatccacaaaaataggttttacaggaggaggaaggacaatggtgtcggaatcacatacttcttcttccacatccggacggatatcagccagcaggtccaccttgcgcaacggtttgccgcccaccgacatggaggggaggaaatacagccccattaacactcctactacaataagagtgagaagaaaagtggccggtatatagtttttcatattgctatatttgtaaattaaccgcaaaagtagtgattttttagacggagtacttcatgatagaggctaaaaaaagaaaaaagactgcgccagaaagagggcaacagtctttttctttaatgatgaaaagacagattcaaatcgtcttttctatgttccacacaaaagcacgtaatcccaattgttcggtttccttatccattttatgcaaagcgtccaataaaggctccactttggtatcatctaccactgtcataatggccgagcacatactgggccacgcgtgactgccataatgcggttctccttttacagagccgcgcccctgcaactgctgccaataactgaatccacgacaattctgacggtccaacaacgccagaatacgttcgtaaaaagcttggtcgaaagtgatgaaaactgatttcattattccattttttattttaagttctgtcatccggtctcctattcatttcaatccggataacaactatattaattattcttttttgcctttggtcatctccgtcttatgtgcttgataatagtcattcagttcacgggaagctttcatcttcttacggttacgcttgatacctgtacccgcaaatgaacagtagagcaccggaaccaaaatcaaggtgagcacggtagatacagtcaaaccaccgattacggacacccctaaaggctgccacatttcagaaccttcccctcctcctatcgccatcggcaccatgcccagaatagtggtcaaagtggtcattaaaaccggacgtaaacgactacggcccgaaacaacgaccgaatgaataacagacataccccgctcacgacataaggtaatgtaatcaataagcacgataccattcttcactacgataccaatcaacatgatacctcccaacaaactcatgacattcaatgtagtccccgttccatacaatgccatcaataccccactgaatgcaaacggaatagagaacataatgataaacggataggtcagagactcaaactgggcagccattacaataaataccaatataataatcaaaacagccaaagttcccagatcgctgaatgaatcctgctgatcctcataagaccctgccacctggatactgataccgccaggtaaatccatcttatcaataatagactcacccgctgccaccacactacctaaaggcgcacctgaaatcacagcagatactgttacaatacgttcacggtctttacgttcaatagtaggaggagctgaacgctccactaccgtgccgatatctttcacccgaatcgctttaccttcattggtataaatcagaatattctccaaactttcaatactggtacggaactggggagcataacgcaccttgatatcatattcgtcaccatcttcccgatagtaagaagataaagcaccattaacacggttacgcagatacaaagctgctgtagaaagattcaaaccatgtaaagccagtttttcacgatcaaaatccacctgatattccggctgataatcctgacggctgatattcacctcagacacaccgttcactttcaataaagcttctttcaattcagcggctgccttatctgtttctgtaaaatcatatccatagatttcaaaatcggcagtggcctgtccacccatgcctccactgctaccacccaagataacctgggctttatccagttcgggataggctttcagatcctcacgcataccatcgcagacttctgccaacgtaacagaacgctgatcgggattataaaggttgatattgaatgaaatgatatggctaccattatcctgaatagaagcccaagtattatccgcatcagcctgtcccacagtatagttacagatacgcatcaccccttcatatttcttcagccacctttcggtcagctcctgggccaatgcctgggcacgctctacgcgagctccgataggcaattgtaattgaacagaaatacgactgttgtcttgtgacggaaaaaactctgtaccaattcctttcgcacaaatcaggctcagcagaaagaacccgaaacaaccggcaataatggtcttgcggtgacggacagcccagttcaaacgtttctgataccagttatccaatccatccaacgcacgttctatcggtttgtagaatgtgacaaaccacttactttgttttttttgcaagcgaagcatctgcgcacacatcatcggagtaaatgacagagccgagatagtagaaatagtcataatgacacacatcatccagcccaactgacggaacaaaactcccgacataccactgaccatcgtcaacgggaagaataccgcaatcatggtcaatgtggatgcgataacagaaattgccacctcatttgttccatggatagctgcctgtttcggctcggagccacgctcgatatgggtcgttacgttttccaaaacaacaatagcgtcatccaccacattaccaatcgcaatagaaaggcacgacaaagaaataatattcagagatcccccatccgtgatagccaaataaataaaggaggcaatcaatgacatggggatagtgatacagataatcaccgtagcacgccaacgacctaagaaaacaaataccaccaagaccacaaacagaatggcatacataatagtttccgtcaaactgtcgatggtattcaaaatattatccgaagtgttcacaataacccccagtttcacatcactgggcagtgacttctgtaacttaggcaactgctccattactttccgggaaatgttcactgagtttgctcccgattgtttctgtacaacaatcatggctccctgcaccccgttattataggtttcctgagcacgttcttctacagaatcgactaccgttgccacgtcacgcaaatacaccgaagcaccattgcgtatacccactacgatattctccatttctttcgggtccttgaattctccttccacacgcaaggaataggtattactgcccacatcgaaagttccacccggagtattcttattttcagccctgacaatggaactgatggtctcaatcgtcagatcatatgcttccagtttgttgggatcacaataaatattcacctcacgcttcggcgcaccggcaatggacaccgttcccacaccgggaacacgagccaaaggatttactacattatcatccaatatcttatacagagccggctgactttcttctgcctgaacggacaacagcaggataggaatcatatccgtactgaacttaaagataatcggagtattgacttcatcgggaagctccgaactcaccatatccaatttatcacgcacatcattagtcaacacatcaatatcatagccatattcgaattccaaagtgataactgatatattttctgaagacttggatgtaatatgtttcaaattactaaccgagttcaacgtattttccaacggacgggttacgttgttctctatatcggaagcactggcaccctgataagatgtcataaccataatggtattggtatcaatatcgggatacaagtctaccggaagtttcgacaatgagaacagaccaaagatcgctacggccaaaaagcataacgaggtcataatcggttttttaaccgctccttcgtataaactcatgtttgttaaattaaaaattaagaactaaaaaatcatatataggtaaataaatatggagtattatcaactaattctcaatttttaatttactgccacttccacaccatcggccaaacgggtctgaccggcaaccaccacctgcgaattatcctccaccccggaaatcaattcatattcggttcccatccgacgtcccaattctactttattataggaaaccttaccgtctttgtagacatatacataacggtcgcccgaaccggcacgtttcacaatagcctgatcaggaaccaccacatgccgcaatgtaccaaagctcacagtcacacggccaaacattcccggacgtatacgctgacgggtattagccaattttacctctacaggaaaagtatgagtagcagcatcaatagtaggatacaccaaactaactttcccttcgaactcctcatcaccatacacatcaaatttcacctttacgatcatacctttagtcactttcgggaaataaggttcggatacattgatcaacagtttaaccggagtgatctgttcaatgaccaacacaggagtggaagcggaagaatataaatcaccgttatcaaaattacgtgctgtaaccactccatgaatagggcttaacaactgcgtattctccaacaaattattataggaagtacgacgtacatctaaagctgtttttgctgcatcccattcagatttggaagctccacccactttgtacagttcatccatacgtctgaattccgtttcttcattttctaattgcaatttcatttgtttcagatttgccgcatccatctgtactaatttctgtcctttggatacatggtctcccacttcaacaaaaatacggtctatacgcccgggagaggtcggagctatattatttttcgcttccgcttcaacagtggcagtatattcctctatctgatctacatcgcgggaagttacggaagcaagccggactaccggtttgtcctccatagcggtatcagcagcttccttactctccgttccacctgaacatgcccccagcatagttaccaccagccaagctacgaattgaaaatattttctcatactgttatctttatgttaatgtattattgttccgttacttcatcaatgcctaagactaaatccaaatcagctttagctaccagatagtcatagatggactggttataagtcagttgggcctctgttaaagccacttccgaactattcaattccaagatagttccttttccaacttcatatcttttttcggcaatagtacgccctttctccgcctgaaagacagcttctttattacttaccacctgttccgtactagcggccatattatccaaataaccggtagcttgcatagtgagttgccgctctgtattgatacggttctcttccagttgtttcatctggatacgggtctgtttcaattgagtaaaattacttcctttgaacaaaggaatgcttagattcaggccgatagtagaatagggcctccaatcgtattccttgaacttgaaattatcattcattgaagtatacatatattggaaactggcagaaagggtcggcataaagttggtatactgcaacttcagcgtctgctttaattgcaatgcattcagttccaattgcttcaacgtactgttatttgtcaaattgtctggacgaggcattgcctgacgagtaaacatagacatttcataatccttcagattgccttcaaccgctacctttacatcagactccattcccatcaagaccttcaactgcaaatttgccaaattcactccgttacgggcagacaccacggtaggtttcaagctgcgcatctgcacatccgcactaatcttatcatattcactgacagtcccctgttcatatttagctttcaccacattataattatcttcactctgcttataacttttaagcagcacttcataactgtcctgtgccaaaagcaactgaaaaaatgccttggtcacttgatttaccatatccagacgtgaagcacgtgatttctctaccgccaggttcacatctgtacttgtcaaactgatacttttgtaaagagcaggagcaaagacaggcagactgacagacagaccaccactataagtattatctgtaccgacttcaatcacctctcccatcatggcgaatgactgcttttttatggctcgtgaataactgcccaccaaactggcttctgggaaaagaccggcataagcttcccggcgggcttctttctttaacaggatttcctgaccggcgactttaatggtgggattgtcgctcaatgctatccggactgcgtcctgtaaggtaatcctcaatgtgtcttgtgcttgtgcactttgtattgctacataaagcagcaaaaacaaggttaacgtaggtttgcaataaaatttcattaactattattctttatttagtgacttatttaatttctaaccatacttattatgttcgtttccttttaaattcaataaaaaattatccacaatcttcaaccccttttcagtggaaatgccacgcatatgcataaatacaactgtttcataaatttcaccaagcgaataggacttgcatatttccgaatgcaacaacaaatccatctgctcacataccatagcgcgtacaatattataatttacatcatttctaaaaatgccttgttccactcctttgcgataaaattccatagccgaatccaaattctccttccggctttcgtcaatgtaacgcattaccttgggatatttctcaatatcctcaaagaatttcctgtttgtattctgaaaatcctgggcacttctttgaaaaaacttcaagaggacttccaaaacattttctgctttggaagccacttgagtcatatattcctgcatctcctcccgatgtaacttcatgacatcaagtaataaatcctctttgtcatgaaacaattcataaagcgtacgtttagatatagataatccggcagcaatatcatccattctcactgttttgacacctttctgggcaaatgatttcgctgctgccaaaacaatgtgttccttcactaccgttttatccattctttttttcctgacgctattcattcttaacataaagggagacaaagatacatttattttataatacccaacttagaacttctgacaaactctatcagatgtacaatttcaggactagacggaacctgttcttcaatacgacgcaatgcatcctctgtagatgtattcactttatacaatatacggaaagcatgcgctatatgtttaataaccgtttccgaaaaaccttcatgttgcaacacggtggtattgatgctgtaaaaagccgtaggctcatgggctgccacacaataaggaggaatatccttggtaaaacgacacccgccctgtacggcggcataagtccccaaacgagtctttccctgcatcagtacattggaagtaagaatagcataatcctcgactacacaacaacctgacacctgcgaaccgttaccaataatacagttattaccgatggtcacatcatgtgagatacgtgctccctgcataataaagttaccgcttcctaccacagtttcatctccggcgaaagtggcacgaataataaccgcattctcacggatggtattattattacctatacgggcgatggtatcatcacccgtatatttaaaatcttgcggagtagcagcaattacagctccgttataaatggtatttccgttaccgatgcgtgcgccgctcataatgctggcgttgggcataattacattatcatcacctatctccacattcttatcaatgtaggcaaacgggtgaatagttacgtttttcccgatttttgcagacgggtctacataagctaacggactaatcatattcatattatttttaaggttaattattcacgtccaccgcccaatgcgctgtacagattgataacagcctgcatacgctggaaagtatcggatacttcgttcaactgggcactcagcaatgactgttgtgcagtaatgatttccagataagtggcctttcccgcctgaaacaaatcattgttcatctccaccgctttttgcatttcagaaacctgtgcctggtgctcgctcaactttttgtctgccgtatcatacaggaacaaagcatcacttacttccttaccagcttccagaatagtctgctgataattcatcttggcaatctgttcttccgctttcgatactttcaagttggcaatcaattttccacgctggaaaatgggttgcgtcaatgagccgatagcattccaaagcataacggcaggattagaaatcactgtaccattggaaccattagtccatcctagagtacctgtaatattaacactgggataaaaagcggaacgcgcctgattggtagtataataagcgtcggctaatgccaattctgccgcttttacatcgggccggttctcaagcaactgtaaaggaactcccaccgccaaatctgccggcatcacttgttcctccaatgttccacggtctatgttctgaggagcctttgccaacaatacggagatagaattctcagtttcacgcacctggcgtttcaagtcagccaatgaagcctccgtctggtgataagcccctttactctgtgccacagcagcttcggtagtcataccggcttccttcatagcttccatagtgcgcactgtttcttgcattaacgccacattctgttcggtcacactgacttgacggtctagcatcaataaagaataataagcattggctataccaccaatcaactgtgaacgcactgcctgctgataggccttactttgcaaataagaagctttctggccacgatgggcattcagcaatttgccgaacaaatcaacttcccagcttgcagaagcaggtaaagtatagttctttacaggagtacttttgtccacactagtcaacgaaccttgtggagcaagggccaaagaagggagataagacaaacgagctgatgtcaataacgccttggcctcctttacacgcaggatagcagcctgcatatctacattgtttgccaatccctcttcaatcagcatctgcaatttcggatcacggaaaatttccttccatgacaagttacccatattggttgtatcgttagcagccaatgtatcgttggcggcaaccgggtcacgatagatgccagtggcatctatcgactcgggacgatcgtatgatttatagatgtggcaaccgcttaataaaaacgtcgcgcaacataatcctattatctttttcattgttcttctgttcatttacgggtgtattgttcaatttcgggttcaacctctgtattgtccacactttcccattcaatcggtttgaatttctcttgtaaccattggaataccacaaacaatacgggtacgataaagatctggaagatcataccaatcaacataccaccaatagccgaagctcccaaagtacggttaccatgagcaccaactcccatagccaacatcaacggaatcaaacctacaatcatggccaatgaggtcattaagatcggtcgcaaacgggctgccgcacccaaaaccgcagcccaggaaatactcattccctgcttacggcgatccaaagcaaactctacaatcagaatggcattcttcgccaacaatcccatcaacatgatcaatgcaatctgcatataaatatcatttgacatggttcctaaaatcatcttcaaagccggaatatttcccaatgctgcaaatccgtttacaaacaggaagctacccaacagaccgaacggtactgaaagcaatacggacaacggcagaatgtaactttcatactgtgcactcagcaacaaataaacgaatacaaaacacagaatgaagatgatacctgtggaactgccactggtagatgcctcttcacgagccatacctcccaactcataaccgtaaccggtaggcaaattctctttagcaacttccgcaatagcctgcaaagcctgtccggaagtatagccactggcaggagccaccatcactttgatagacgtataaaggttgaaacggcctataacatccggtccatatactttcttgacagaaacgaactgggaaataggagccatctcattcccattacgtatcttgatactattcaaggattccagattcttggtcgcttcgggttccgcctgaatcataacacgatacatcttaccgaaacggttgaagttagaagcatacaaaccaccgaaatatccctgcatggtagtcagaatatcactaggactgattcctgccttcttacaagcagcagcatcaatatccaacatatattgggggaaactcggattgaaggtagtctgggccgaattaatttcagggcgtgccttcaacgcatccatatagtccaaaactacatcataaaaatgattcaagtctccaccggtcttatcctgcatattcaactcgatatcactggatgccgaataacccggaatcataggaggagcaaagaacaatacctgcgcatccttgatgatcttctgcgcacgcataaacaaggtacctaccacaatatccgaattctgcatcatggagcgttcttcccaatctttcagcttaataatgatagaaccgtaagaaggtccctgaccaccaataaagccgaaaccggaaatcaccgtacgggaatctacagccggttcggcagccaccaagctgtctacacggtttaagatttccattgcacgttcctgtgaagtaccgggaggcagtgtcaccgcacccataatggtaccggtatcttcattgggcaccatacccgtcggagtaaccttcataaagaataccaacaaaatgatagaagcggcaaccagcccgaatgacaaccatttcttatggataaagaatactacatgcttcttgtacttcttcaatatagaatcataagccgcattaaaggctgtatggaaacgttctacacgggtcatcttctttgctccatgtccctcatcatgcggtttcaagaaaattgcgcacagtgccggtgacaaagtcaatgcattcaaagctgaaaaaccgatagagatcgccatggtgataccaaactgacggtagaatgtaccggcagtacctcccatgaaacttaccggaataaacacagacatcatgactaacgtaatagaaacgatagctccacccagttcactcatggcatcaatagaagcctcacgggaagacttgtatccctgatccaacttggcatgaaccccctcgacgacgacaatggcatcatcgaccacaatcgcaatggcaagcaccatcgccgaaagagtcagcaggttcacactgaagccaatcagtttcagtacaaagaaagtagccaccaacgccaccggaatggcaatagccggaatcagcgttgaacgcatatcctgcaagaagatatataccacaataaacaccaagataaatgcctctatcaacgtcttgattacttcatggatagaagcgaacaagaagtcattggcattttgggcgatattgatattcaaacctgtcggcagtgattcctgtgcctttgcaagcactttctccaaatcggaaatagtttcggtagcattagaacctgccatctgatagacgatacaagatacagccttgtgaccatttaccatattattgaatgtataagccagacgacctaattctatatcggccacatctcccaaacgaagtacattaccatccggcaaggccttgataacaatatcttcaaattcagtcgtttgctgcaaacgtcctttataacggatcgtgtattggaaagtctgattaccacgttcaccgaactgtcccggagccgcctcaatattctgttcggccaatgctgccgaaacatcagtaggaaccagtttgtactgcgccatcacatccggtttcaaccagatacgcatagaataatcctgtcccaacacattagcatcacctaccccctttacacgcttgatttcaggaatcaagttaatattagcatagttttcaatgaactcaatattatacgagtcggtttcatcatacaatgaaaagaccatcaacatggagttctggcgtttctgagtagtcacacccaccttggttacttcagcaggcagcaatccttgtgccatagaaacacggttctgcacattaacagccgccatatccggatctgttccctgattaaagtaaacgttaatatcggcagcaccgttattggatgctgatgactggatatacatcatgttctccacaccgtttatctggtcttccaacggcgcgatgaccgaattcaatacagctgtggagttcgcaccggtataggtggcacgtacctgcaccgtaggaggtgcaatatccggatattgcgtaaccggcaatgtagcaagtccgatgatacccagaataactatcaagacggagattaccgttgatagcaccggacggttaataaatctatctagtttcattctctatataccttatttatataaacgaagttaatctgtttattttatactgattatttaaaggccgtggcaatattcccttccttctggtctttcaggtgttgttgatatttcgcctctttctgttccggagtaatcggagtaattgtctgtccgtccttcaacgtctgtacaccttcaactacaattttatcgccgggcttcaaaccactggtaacaatataattcttaccgtcactcaaattcgacactttgatctcagtatgcttcaatgtattatccgactgaagcacataaacaaactttttatcctgaatttcctgtgtagccgactgaggaatcaaaataatatcctccatagtataagggaaaattacattagccataccaccactacgcaatacaagctgtttgttcgggaaaacggcacgcatacttaccgaaccggtagtctggtcaataacaccacttacagcgtcaatcttaccttcttcagtatacattgtaccgtcagccaattccaattttacagccggcatcttctccagttgttctttcagtgtgccaccggctcttgtcaaacccaacaactgcttttcagtcatagagaaatacacatacatttcaccgatttcactcacggtagtcaacggttgtgttaccgaaggactcaccaaactaccaatacgatacgggaatgtacccaccactccatctgaagggctggtcactgtgcagaagcccaaattctgacgagcgctggtcaactgagcctcagcctgtgccaaactggcttttgcagaaagcaattggtctattgcgctttgatactcaaaatcgctgataattttcttatcatacaaatttttcttctgttgttcgttcaaagatagcgtattgacattcgattttgccatctctacagcagcttttgcctgacgttcggcagccgcatactgtgtaggatcgatctgaaagagcgcctggcctttctttaccgttgcaccttcgtccacacaaagctttacgataaagccggaaacctgaggacgcacctcgatatcctgaacacctttgatagttgcgggataagaagtagactgctggctggctgtagactgtacagccacgacggtaaattcgtcatcacccaacttcataccgctctgaccgcctccacaactgcttaaaacggtcattgccgccgtaaatatcgcgaggcggctccatgaaatacatttcatactatttactgtcattttcataactaatattattgaactttacttatttgtcgaattaacagatgtttatagaaaactttttaaacccaattagtttttactgccgcaaaattagtcatttttccggcatttgttcgcttagcccattagctttaactataaataacgtgcgcatatagaaggatattaattatgtaaaatatattccatatatattcaatctgtttccagatctaaacaagcaaaccatattacaactcatacatgatacggacatgaatgaaactattttttcgctatctttgtccagcaaaatacgaaagaatttaaaaactgtatttgcttgatacacaaaatttaattttatagatagatatttctggtaacaatttgacaacctttaaagcgctttgctctactgcggtttacttcatagctccaaacaaatccaaatccatacaaagttttataaataatcacttctgacttgccgtacgcaaaccaaattcaaaaaagacacaaacaaagaataacccacaaagtagcaagtgaacctctattgtcgtggattattctttttattatctgtattaaacagtaaagattgtctaaacacttccgttcttgttttctttggtaactcaaaacgtcactataagatacgctacgaaaatatgcatctgtacttgtgacaattttcgattgtagttattctttctcctttcaagctgctgatctgtttactattaccgcactaggcaacggctaacaagtccgttttccacaatattcagtcagagaatacctgcccgtaatccacacataataatgacaattacagaacttctatcacaatcatagaaaagcgatgctttctacttattgttgtgccgcccttcatgtttctcccatgaccgttgcccattctatattcctcccttcttcctctccatgttttcctgccaccttcagaacaacatcatggtaatttatagtgaagtgcacaattaacttgataatatctccatcgctcaaactgaatttggagacgttttaggtaatctttccagtttctattttctggttgagaccaaccaatttcagctactgcactagcacgaggatatgccatatattctaccaattgataagtagggagatattcagtccaaacattgccttgtatacctaatacctttttagcttcttctggcgttaaaacatcaggaatcggattgaaagaataaacccattctaaagaggctactctaccatgagctaaaggctcaaatagcatgttcgactgataatggtttaaatacatgtgggtattgggagccataatgactagatttcctgcttttgcggctgtaatgccacctttaacccctctccatgacataataacagcttctcttccaatacccccttccagaatttcatcccaaccaatcagccgcttatgatgctttttgaggtatttgcccacatattcaattacataactttgcaaggcatattcatcagagatatgatttttgcgcatccacgactgacatttttcacaagatttccaccgttcattggggcattcgtctccccctatatgaatataggggcctggaaataattctataacttcttgcatgacatcttttaaaaaggtataacaagcagcatttcctgcacacagcacatcgctataaattccccattgtgtacctacttgatagcctttttggatacatcccaaagacggatatgcggttagagccgccaacatatgtccaggaatatcgatttcaggaacaattgtgacatgatgttcagcagcataagccaccacttcccgtatctgttcttgcgtgtaataacctccatatcttttcttttcaaaaacaggttgactaaatgatgaaggatgattaatggctgtagaatctctccatgctcctttttccgtcagaaaaggatatctcttaatttcgatgcgccaaccttgatcatcggtcagatgccaatgaaagtaattcattttctgcattgctagcaaatcaatgtattttttgacgaagcttactggatagaaatgacgcgacacgtctaaatgcattcctcgataggcaaatctaggtgtatcttctatgaaaactgcaggcacttcccaacttctttcaatagcagttgttgatgagtaaatttcaggcggaagaagttgtagtaacgtttggatagcataaaaaaatctatttttttcattagcttctatttcaatactatcctcggttacttgcaaacgatacccctctttccctaaagtgtttttaggaagttctttaaaaacaatgatattattctttggaactaggaattgttttatttcgggtgttaacgaagctgcttgtttcagtcgatctgtcaaaaaatgtatttcagtctttgctttattggttgccacttgaatgcaagtttgttcattaattacaaatttagagtgagtgttcgagcgtatagttttaggctgtggaataattgcgcaatttaaaacaccgctttcacttttgctaaacaacattccttttacaggaatattatatacataaggcatatttgtttcagttgaaaacaagttaactacttccacgtttaaatcataagaagacagtgtcatgtcactgagactagcaaaaatgacctttcttgccgccccctgtaattctattggttctaattcattgaggcaaatagaagtttgtggaatcggtttcaagatcaacggaatatctgccaaatttctaatatcaattcgtaatttattggcagcgactaattgggtagttatttccaaggtgccctctaaatatttgttcaaccatctagaagaaccataaatattacagtccaaacgttctagaaagcaattttcttctagtgcatagcggatgtaagtatccgattttagtcgtgcaaatataataacatctgctccctttactttttgtcgttgttgataaatttccaacgtttcttggctaagaattaccatccctttttccgtagcttgtttacgtagtattgcatcgtctttcaccataacagcttcaataccttgttccaaataggactgtaaagtttctacctgagtgatggtcgatgacatatctgcttgcataaccacatactccttccattctgggagataccttcctttggcattcaaatgaatgccaaaggaaaataaaaatatgtacagagcccatattttataaaaatatctatctttcacctgtttcatagtgtttattgaattttaccagtctcattaatgctggaaggaattccatgtagttttttctagctggtgatacccaaccaatttctgcataagctgcaattctagggaaggtcatcctattcatactttctactgttagaatctgttcaccccacatttgacatcctaatcctaaaattttatattgtaatgacttatccattccagcaggaataggattgaacgcgtatgattttgccaaaggaattctactcttgtcgtagtctaagtaggtaccatagtgatatgaattgacaatatcgtatcctttttgggcagtttcctcaatcaaatccaaatcacctttccaaaattgtacaatcgttccttcagccaattttgattttaaggcaatagcgtcttctgctgagttgtactcatggattttatttcccataatatcattccagcccatcatgtgtttgtttctacctttcaaccattctgatatggcattggtaaactcaatttgaagttcggctggattagcaacacctaatttcttgatgtaattgctgatagctacagaggcattccattggtcgtattttacttcatctccaccaatatgtatgatgggtgaaggaaataaagcaataacttcatccaatacatcatgcaagaattgaattactttttgggaagaaacatccaatacctcgtactgaactccaaagctacaaggaaccttaatttgttttttggttgttccaaattcaggataagcagcaatcaccgcactagagtgaccaggcatttctatttcaggaataatctgaatgtgtagcgattgagcatactctatgatttctttgatttctttttgagtataataaccttcgtgtacttttccatcaaatgaatttcctttccatccattcaattgggtagaatctcgccgggcgccgatttggcataatttaggatattttttgatttcaattctccaaccttgatcatcggttaaatgccaatggaaaatgttcattttaagacgcgccatttcatccaaaatactttttacagcctcctttccttggaatactcgagattcgtccaacatataagctctccaagggtagtaaggacggtctttaatggcgagttgaggcaaactacattgtccagctgtggttatcattagctggcgaagtgtttgaataccataaaaaatgccccgggcagaaggagatataatttttacttcatcttgaatgtctatttgatactcatcttctttttgttcagaagatgactgaagaattaaacgaatagttttgccttgactattttcaatcaattgaaaatcattttgcaaatacttttttaaccacaacctttcattctctagtctattatcctgtagcacaatgtgatagccactactcagattcaagttactcgcataaacctgctgttcttgtacagctgggataatcctgtgattatcttcagagctcaatgaatagggcagtgaatacttgtcaaaacaagtttcggcaggcttgttgcccatttcataaatcaagttgcctccttcaattagtgtgtgatgagaaataaatcgcttagtatatctttctccattccaatagatagcttgtatatacttgttttcttctgattgattacatacctggatttttaattttttacctgctttcaaggatatttcagcctgttgaatctgaggtagtccgaagatatattcatcagaacctggacatacaggataaaaacctagggctgtaaatatataccaagcggacatttgaccgcaatcatcgttaccacataaaccatcgatgcgtgtattatacatcttatcaatgattttataaatgttttcagaagtcttccatggttgagaagtccacatatacagatacggaatatggtgactcggctcattaccatgaatgtaaccaccaagaataccttcttttgtcacatcttctgtatgagcatagtacgaagggtctaatgagctgccaaagagattatctaggcgacgtatgaaagctttatctccccccatcaaattgatcataccttttacatcatgaggaacaaaaaaagaataattaagtgagtttccttcaataaaaccctgaccatgagtctcatagatattaaagtcttctttccatcgaccatctttatatcgaggacgtgcgtagccgttcaagaaagatttttggtaattataagctctctgtttatattgattggctaattcagcattgccagccatgagcgccatgcggtaaatagtccagtcatcgtaagagtattccaaactgatggaagcagaactaacattttcatttaaaggaacatatcctttttcaatatagcttcctaaaccgtcatagtatgttaagttagaactttgtaccatagcttcaagcgcctttttaccatccattggaatacctttggcaaaagcatcagataacaatgatacgccatgataaccaatcatacaccaattttcatttcccatatgtgaccatacaggcagagccttatgtatactttgaccttgatgcgccataatagattccatcatgtctttgctcttattagcatctattaagttgatgagtggatgtaatgcacggaaagtatcccacaatgaaaaaatggtataattagtaaaatgctcagcattatgaatactgtgatcaatgcctcgatagcgtccatccacatccatatatacagaaggatgtatcaaagtacgataaagtgacgtataaaacagctccttaacttcttctgttccatttacagaaatagaaaatacagctttgttccatttacttttagcttcagctaaaactttatcgaaattctttccttgagtttcctttttcaaattgagcagggctccttctttgtctacggctgaaatggctactttaatttccaaagaacgtccgtctgataaatcaaatacaaatccagctttcagctcacgtccttccatttcaggaaagttgtgttgaacatcaaattttctccaaaaacctccgtacaaactccgtttgctagtatctttgctttcatagcggagaatgggatgtgaaaacgaaatggcaaaataaattaagttcattctagcccatccatttgtcattctgaatcccgtaacaagtgtatccgattctacacaaattcctgaccataacgttttaccatcataattatagattccatgatttaagtccaaaatcaggtttccttctcctttaggataagtatagcgatgtactcccactcgttctgtggtagtcagctctgctttaacttgatactcatcaagtaatacggaataataacctggagaagctgtttcattttcatgtctgaatgttgagcgataacctaaagtcggattacttttagtccctggattcaattgtattttaccagtagtaggcatcaatagaatatctcccaaatcagaatgaccagtaccactaaaatgagtatgactaaatcctacaattgttgtatcatcatattgataaccagcacaatatttatagacctctttttgataaactccgtctacactatgaggaatagtatctgtttccggactgagttgcaccccaccatgaggcacacaagctcctgggaatgtatgtcccattccttgagtgcctataaaaggattaatatattgggtttgtgaatgaacacacaagcctatcagggcacataaacatgttattattaatttcttcattactttttaatctaatacaatatcaaattggtcaaattcttcagtacgccatgcatatttttctgttgtgggggaaatagcaaagaaaggtgagaatgttttgattttgattgtttttccgtcaggcataaattccataattctaagccagccatcccccccattaccatgccaacctccaccttctgtttgggcattgaacatcatctggaatacgtttttcccagctatattcttgtcacaacgttgacctacattatatacaaacccctctgtagagcaataatgaccacatatgagcatacgaatgtttttgcaaggataaagaagtttttcccaaataacttttccataattggcaggtgatacaccataagactctttttcgataatagatccatcccaacgcaaataagagtgagtaaggacaaataccttatgattttcaaaacgttcacttattgccaaagatttagcccattccagtacttcatcacgaggagcaaattccaatactattaccagtatatttccccagttcttgttagtaaattcataagcagcattttctaatgtaggaaccccaaaagcattgttacatacactaaccaagcagtctttccaaagaagattgcgagttacaggaaaatactttgagatattgcacaatcggttttcggctcgcttataaccataatcgtgatttccaccgcaaatgatgtaaggaagtctatggtccaatctttcaaaagctctagaggcggctttccattgttcttcgctagtctgattaccattcacgttatctggaaccaagcattcattttgttctaccaaatctccggtgcaaagtacagctttgacagctaagtttttttttacgctggccacccaagctgtcatcagttcaaaaattggctgattggtatcaaatttagtataactttgtggatctggtaaaagaatcattgaaaatgaatttttgtcagaaagcgtcggcttattttgagaatatgatgatataaatagcaaaaagcaaagtagaaaaaaagatagttttttcatggtaaatatcgttttatggaaaccatccgttcatattccatattagatcaatagtagaataatgaacggatgatattttataataaatattgatttattaaaatcagttaccccatcctatatggttttgtttcagatttgggttagcgcttaattcggcagcaggataaggcaggttatacaacttgtcttcccaaataaaatcacctactcgtgaccattcttcagccaaagtaccccaacgtttcaaatcaaaataacggataacatcctctgtaaagaattcaactcttgattcatagttaatagcttccatggcgctttctttggaatcaatgacaaacggaggaagaaccttagattcatccaatccctcaggaatgtatttgtctggatgtgccaatgcaaaacgacgtgctctagaacgtactttttctacatattcactacatttctcaaaatcaggattagcttgtaaagcatatgcttcagcaatgtgcaaatacactctaggcaagcgcatcagatgtacatccacacgttgtgtccagctttcttcaccataccatactccgcgtttttgaatatcataaccagtaggagtgtttaccaaccattcatctctccagttcatttttttaccagtagtagtaacaacctcatccattattgtaaagaaggttccatcaaagcgaggatctctatttttccatgcttgagaagcatcgaaataaggagagttgtctttgatagattttccatcaatcacttggaaaaaatccacaaattctttagaaggatagaaatagtctgctgaataagtatcgccacgcatcagatgccccaaatcaccacctaaatcttctttagaaccgaagtataattctcttctatatttgtcgatgccttcagcaatacctaccgaaaaaatgatttcttttgaattctcttcttcaatgtgaaaaactcgacctggatcatccaatagttcataatcgaatttttctacttccaaccctgctttcaaagcattttcataatccttcatgatcagataggcttcagacaagtaggcaaaagctgtaccttttgttgcgcgatgtgtatatgcttcatcccatttgtcaggcaaattttcggtggcaaattctaagtcaggaatgataagactcttgaatatttcttcttttgatgtggcagctaactgtacttctgaagaattagtaggatcattcacggatgcacttcttaaaggtacatcgccataaaattgaaccaaacggagataccaaaatgcacggataaatctggtttcagccaaatacatattacgcttttcagctgcaattatctgatcacccatttttgagataccatcaatgttgatgttgcatacagcaataccttcataacagcgtttccacaccccctgcacaatactgctttcattagggttaaaagtagcaccatagaatggttgagcatccttgaaccccgctgatgagaagtcaccagtcatacctagttccaattgtgcaaatgcccagtgtccattcaagcattgcagtttcgcatagcaggccatcgcaccaagattcgcatgttctgcttctgtataaaaagttgtttcatcaatagcaccataaggattacgatccaaaaagctatccatacagctagtgaaaattaatgatgtaaatgcaaaagcatataataaatatttacgtatcatatgtatcttgtgttaaaatgttaaatttgtaccaattaaaagaattctaggtgttgggaaatcatcaccccagttagtatagtgacctacagagttcccattttcaggatcaaatccatcaaaagtcttgtcttttattgtgaataggttttcaccggataagaatactctaatacgtgttggttttagattgaaggtataacctaatgtcaatgatttcattttcacaaatgaagaattagctaccatcaaatctgtcatttcctcataattttcaccttgaattaaagcgggatattttccagcaggatcagaacctaatgtccagcgattgtcataccaatgtctactcatattgcgattaggcatacgattttgaaaactcataggtgaatgttgcttacgaccaaatacacctgaaaataccatatttaagtcaaaacctttccagtcagcagaaagagtcataccagcggtagctttaggaataaaacttcccaatattgttctatcctttccatcaataacgccatttccatctaagtctttatattttaaacggccaactttagcattaccttgtcccatatctttatattttttagcttcttcagaagtagtgatgaccccatctgttttatagccatacaaagcactaataggttcgcctatgcggttaatagttacaccaccataacaaccgatatcgatgacttcctcattaataccactgcttaactttttgatttcattgtgcaagaaagatacattagctcctactgaatagtgcaagtcacgtatattacctttataactaatttctagatccaaacctctgttttgtacttctgcataattcatattaggagcacctaaaccaacagaaagaggaagaaccatagaacggagaataccactggtgtttttcacaaagtagtctgcgctaaaactcaaactattgttgaagaaacctaaatctacgccaatgttagttactgtagtagtttcccactccaatgacttgttaccaagtttagactgtgtatagccagcatatagaatttggttgtcagcagcagtaccaaatacaacattttctttactcacagaagcaatggtaggataccatgagccaatagattgattacctaattgtccccaagacgctctcaatttcaagttactgacaggctttacattaaagaacttttcctcagagattctccatgctccagagaatgaaggaaataccccccagcgcttgtcttttctaaaacgagatgaaccatcggcacgtaagttgaatgagaataaatagcgaccagcgtaatcatagttgatgcggccgaaataagaagccaaagctaattcagatttaccaccactcaaaccacgttcacgagcattggtaccaccattaataacatgcatgttatcaacttcagaaacgaaatctttagcagttccgctcaaatcatcttttgtgaatagttgttgagagaaacctcccatagcatgaatagcatgtttgccaaatgtcttgtcaaagtaaagcaaatagtctgtcatccacataaaatttttggaacgtgtttcagtatagctattacgtgtatttgtttgaccgccatcattgaacttaggcaagaatgatttatattcattgtaaacaatatcgataccaccattaaaacggaatttcaaccaatcagtaatttggaattccataaataagttgtccatcaaacgataattgtggttattcggagtattccaccctacttcagctatggcattctttgaaccagtcagttgggtgtcaggctccccataagaaccgtcttcgtcataggctggaataattggagcattaaagataacatcagaaaaacgagttccaccactaccttctgtatagcgatatgtcatgttggcgttattgccaatcttgaacattttacttacttgcgcttcaatgtttgaacggaagcctgctttctggtagcctgtgttcaatgcaataccttcttgatttaaatattcagcagacaaataataatgaagtttatccgtaccaccgctaatatttgcattgatgttcagagttggtgcagaactgtagatgtgatccccccaatttgttcctactccaaagtcggctggatttaaaccatcatattttgtagttggattacctccatcaatagctttcttattgtctctcatttcaagaatagctgagacaaactcttctgctgacagcaaatccatcatgtgtgaaggtttttggataccccatgtagcgttcaaagatactttagctttgccttctgcacctttcttagtagtaatcaaaataacaccatttgctgcacgtgaaccataaatagctgcagatgaagcatcttttagaacgtttacgctttcaatatcggaaggattcaatgtttcaaaaccttggtctacgggaattccatcaataactaccaacggacttgcatcaccattaccaaaagttccaacaccacgaatactgatagatgtttctgcaccaggaaaaccagagctacttaaaatattgataccagacatcttaccttgcaaagcaccacctacagagatacttgaattagtagctagttggtcaccactaaccatggaagttgcacccaataagtcctttttcttcatagtaccatatcctactactaccacttcatccaaaagttcagtatcctctcgtaaagtaacaagtgctaatttttttgaatttgcattcagaataatggtctgataaccaatatatgaaatagctatttgagcattaatcggaacattagtcagttcatagttaccgttaatatcggtaatgactccggcagtagtaccttttacttgaatgctggcaccaatcacggcttcaccattttgatctactactttacctttcaatatttttaagcctttttcttttgtgtcaaaacctacgttaatagtattcttattcctattgaaatacaacccagtttgtatagacaaactctttaatacagtttctatggtttggttgcttacatttaaattaacgcgtgaagattggctaattttcttttgatcatagaaaaaattgacccctgtctgttttgttattttttttaaaactacctcaacagattcatttttaacatttacgctaattcgttcattttgagctaagatgagtgatccattaaaaaaatagattgcaaatagcaaaaaaactaaaataaatcttttagtcttcttattctcttttgtaattaaaagattattcataaattcgtacgtttgttttaaatagattatttggtgaacaaaatggttaagttgttcatggtaactcgcaattatatgaacaactgtttaagacaaacatggaggagttgtttttacctaacaactcctttttttaagtaggaggtttcataggcatttattcataaggttaatattttagtgtctttataaagaatacacgcaactatttctattatgcgaacacgttaacacattttaattattatataaaataaccgtattattttgatatttatatcgtatgccagtgacgtattctatagagttaagtacatctttcagtgtagctctttcatgtatgcctgtaatcaagttatcataaggcttatttccgctgaaaatcactttgcaatggtagatacgttccagttctttagccacatcttgaataggggtagagttgaatcggattcctcctgtacgccaaatagcaaatttttccataatatctttttctttactatacgaatctgaaattttgttgatgatcacatgttcgccagaactgattctcatcatggcttcaggcaaatccacttgtactttaccttctttaacttctaccaaatcagtttgatcataagggtgtgatttcacattaaaaatagtacctagcacggttatcgacatattttccatttttacgatgaaaggcttttccggattatgagttactttaaaacaaccttctccagttagttctacaattcggttattccccacaaattgctcaggatacttcaccatagtgcacgagtttatagctagttcagtgttatcaggtaaaataatagttttatgttcaccatagtctgtagttactgtaatgataggagttcgcttttctactctttcttcgtaatagccaaaaccttttatcattaagaaaaccaatgcagctgtagaaaggctataatagataaagcgtctgactttctccatacgtttgacacgtttggatttagccaataatttccatgcttctttttcacaagttgctttttcaaagcgattggctaaagtttcatctcccaaattgctccaaagttgttctgctaattgatcaatatcttcatcggtacagtaattttttatttgtttcaatatggactccagttcgtttttagaatagaagccatcaatataccgttgaaaattttctttaaaaatattattcttactcatatgcattgattagtatatgtagtacacttaacccatcgaaggctaggagtacattaacattattttaaaattgaaatagaatttggaaaaaaattatttggctagtatgcagcaaaccttcctttttaaagtaagtgcgtataatttttaaggaggcagaaaggtggtcctgtactgtagatatagagatgttgagttgctccgcaatctctttattagtaagcatatgatgtctgctcagttcaaacacttcacgctggcgattgcttaataatttgacagcgtgtttcatgtgttctcccaaatcattggctaatatcgtatttttagtagaattatcaaagtctatcgcttgctcgtaaagactttccaaaatacgtttgtggcacgattcatctcgtaaataattgataatgcgattacgagccatgctaaataaaaaagatgaaaaagacgtaccgcattttaagaaataacggttttcccaaatattgaaaaatatgtcctgacagatatcttctgccacgttttgtgatttaagtaaggcgatagcaaacttgaacaacctaggtttgtattgcacataaagtttacaaaatgctttttcttctcctaaaatcaagcgctctatcaacctactttcttcatcgttatttagattttcagtcataatccgtaaacagattttgtagtagttaataattgaaaagttgcacaaagatatgtcaagttaagaaatgcacaaaatatttagtattacaaatcaattaaacctattagacatttttttcactttatacaacttatctaagaaaattattactctcttgggatttttagttacaaaatgacttcgggtaaaactgtcctactatatgtaaaccactgcagattacggtgatcaaactttctgcaaaactttttagagtttatcgaaaatgtttgtatgagtgtcgttttcacttcgttccaccatcttttcccgcgccgttaccacaattcaaatccgataacagaatagtaacacacctccagttcaacttggctttcaaacgatttcaactagcacttatcataagtgacaagactacctaaaacatcaattcttaatcattcttctacgatttgctcaatatctcactttttcactatctttgtattagaaaatacgaaagaatgaaatctgattttcacattggtcaaaatcaacacttaaaaaatcatcaattcgacatcattttacagtatttaggcttcaaattataattttatttatatttttgccaccaatttaaaacgatatctaattataaggaaaaagattatggtcaagattaccaaagaagctgctttgctataccactcgcaaggcaagcccggaaaaattgaagttgtaccgacaaaaccgtacagcacacaaacagacctgtcactggcttactctcccggagtagctgagccttgtctggaaatagagaaagacccgcaaactgcatacgactatactgcgaaaggcaacttagtagccgttatttccaatggtacagccgttctaggactaggcgacataggtgcattgagcggaaaacctgtcatggaaggtaaaggattacttttcaaaatctatgcaggtattgatgtttttgacattgaagtgaatgagaaagaccccgaaaaatttattcaggcagtaaaagccatcgctcccactttcggaggtatcaacctggaagacatcaaggctcccgaatgtttcgagatagaaaaccggctgaaagcagaactggatatcccagtaatgcatgacgaccaacacggtacagccatcatttcatccgccggcttattaaatgcattggaagttgccggaaagaaaattgaaaatgtaagaatcgtagtaaacggtgccggagcctccgccacttcctgtacaaaactgtatgtagcattaggagcacggaaagaaaacattttaatgctagacagcaaaggcgtgataaccagtgaccgtcctaacttgacagaaagtaagaaattttttgctactgaccgtcgcgatgtacatacactggaagaagccattaaaggtgcagacgtatttttaggactatcaaaaggtaatgtgctgactcaggatatggtccgcagtatggcagatcatcctatcgtattcgcattagccaatccgactccggaaatctcttacgaagacgccatggcatcccgccccgatgtactgatgtctaccggacgttcagactatcctaaccagatcaataacgtaatcggtttcccttatattttccgcggagctctggatactcaggccaaagctatcaatgaagaaatgaagctggctgccgtacatgctatcgccgatttggcaaaacaacctgttcccgacgtagtgaacgaagcctatcatgtgaataattttactttcggtcctgattatttcattccgaaaccggttgaccctcgtttgattaccgaagtttccatggctgtggcaaaagcagcaatggaatcaggagtggcacgcaaaaacatcaccgactgggaagcctacaagacccggctgcgcgaattgatgggacaagaaagcaaattgacccgtcaactttacgaaacagcccgtcgcgacccacagcgggtagtatttgccgaaggtatccatcctaccatgttaaaagctgccgtagaagccaaagccgaaggaatctgtcatcctatcctattaggtaatgacgaacgcattgaaaaactggcaaaagaactggatctgagcttggaaggaattgaaatcatcaacctccgtcatgaccgtgaagctgaacgtcgtgagcgttatgcccgcatcctttcggaaaaacgcgcacgccaaggagccaaccttcaggaatccaacgacaaaatgttcgagcgcaactattttggtatgatgatggttgaaaccggagaggccgatgcattcatcaccggtctatataccaaatattccaacacaatcaaggtagcgaaagaagttatcggtatccaaccggaatacaaacatttcggtacaatgcatatcttgaattcaaagaaaggtacttattttgtagccgataccctgattaaccgtcacccggacaccgacacactgattgacatcgctaaattgtcgaagaaaacggtagagttctttaatcacactccgacaatggccatgctgtcttactccaacttcggttcagatacagaaggaagcccggctaaagtacatgatgcggtggactatatgcagaaagaatatccggaactggctatagatggtgaaatgcaagtcaattttgcactgaacactaaattacgtgatgagaaatatcccttcacacgtttgaaaggtaaagaagtaaacacgttagtattcccgaacctaagttctgccaatgctacctaccagctcattcagtctatgagtgaaaccgaggtaatcggcccgatacaaatgggattgaacaaacctattcatttcactgattgtgaagcttctgtacgcgatattgtaaacatcactgcggttgcggttattgatgccatcgttgacaagaaaaagaaagaaaaataaataactttcaccacagattgcatagatttacacagattattaatcatgcttgttagtaccagcaaattctatctgtgtaaatcaaggctatttgtggtgaaatatattcaattcattaaaacaatactatgagaagaaaaccgctttccctcccacaaatcgtaaccttagcccttttatggattgccatttgctatattattctaacagggagcgaacatattgacgggcctttaatactatccattatcatttcgggagctttagtctttattccactattaaaatatctcaaggaaagaggaaaataatcttttatccgctttttagcttacattttgtacatattgatatttttacacgcattttctttataatttgttgcatatttcaattcttatctatatttttgcaccatcaaaagaaacaagaagaattaattaacaattataaaaagaagtagattatgaatgcagctaaggtattagaaaatttgaaaagaagattccccaatgagcctgaatatcatcaagcggtagaggaagtgttaagtacaatcgaagaagaatacaacaaacatcccgaatttgacaaggtgaacctgattgaacgtttgtgtattcctgatcgtgtgtatcaattccgtgtaacgtggatggatgacaaaggtaacatccagacaaatatgggttaccgcgtacaacataataatgccattggtccttacaaaggtggtatccgttttcactcttctgtaaacttgggaattttgaaattccttgccttcgagcagacattcaaaaattcactaactactcttccgatgggtggtggcaaaggaggttccgacttctctccgcgtggcaaatcaaacgccgaagtaatgcgtttctgccaggcattcatgttggaattatggcgccatatcggtcctgagactgacgtacctgcaggtgatatcggtgtaggtggtcgtgaagtaggtttcatgttcggcatgtacaagaaactctctcatgaattctccggtgtactgaccggtaagggccgcgaattcggtggttctctgattcgccctgaagcaaccggatatggtaacatctatttcttgatggaaatgctgaaaaccaaaggcacagacctgaagggaaaaacttgtttggtttcaggttcaggtaacgtagctcaatacacggtagaaaaagtaatcgagttgggtggtaaagtagttaccatgtccgattcagatggttacatctatgatccggatggaatagaccgcgaaaaattggatttcatcatggaactgaaaaatttataccgtggacgtatccgtgaatatgcagaaaaatatggctgcaaatatgtagcaggtgctcgtccttggggtgagaaaggtgatatcgcattaccctctgccactcagaacgaattgaacggtgatgaagccaaacaattggttgccaatggtgtcatagctgtcagcgaaggtgcaaacatgccttctacccctgaagctatccgcgtattccaagaagccaaaatcctgtatgccccgggcaaagcagccaatgcaggcggcgtatctgtatctggattggaaatgactcaaaattctatcaaactgggctggagtcaagaagaagtagacgaaaaattgaaaagtatcatgaaaaatattcatgaggcttgtgtacaatacggtactgaagccgatggttatgtaaactatgtgaaaggtgctaatgtagcaggattcatgaaggtagccaaagctatgatggctcaaggtattgtttaataaaaaccattcctttatattatatcatattgtagagaaggacgcgggaaataat

SEQ ID NO: 3866 - DNA, 22357 bp, Unknown
  gut microbiota DNA sequence
aagcctattatacaataactcatcactgcaacaaacctattttccctattatgtttctttttgcaagagagaagtaaaaatgacagacatacacaatgccttagaataaaaaaacggactgtacagtctttcttttctgtacagtccgcttaaattatatacaatgtagagagataacgcttattcttcgtcagcaaacatcgggtcccatgccggaagacggattggtttctgttttaaaatatccagcaccttggcaggaacatatttcttttctgccaccacacggaacatatattcatcaaaccatttatctgtcatgataaggtgtcctctgtatccactggcactgccccaactgttttccaccatccattttttcggctttcccgctttatccaagtccaccgccatcaaggtcatggcatggctgctgccactggagaaagtttggatacgttgtttcttgtccataccgaaagtagttcccatcaatgattcgtaatcataattatcagggtccagcaagccacgtttactatcgaggaatttgcctacatcacaagaaaaatacatcatggtactgtccttgatggaagctatggctatttctttaatatcctctatcggcaagtttacataagtccaattcttgccatcataacggtgacggtcaaaatctatttcataacatttataaaactcgcggctgggatcattcatcagcattacataattattggtcaaatcatttcccaaaaactctttatagaaagacaccggagtatattctttcgcttccccacccttcagactccatgtaaaggtggaaacaggttcgccaagggtcagcaccagcatacgataaaccgttcccagcatttctgtctttttcttttccagttcggccggcttcgctccggtagcggcggcttcgcgtagttgtaaaccaaattccttcagtttcagtcctatcagactactcatctttccggtattctcactgctgaaagtttccaccattgcactcttgaggaccagtccgtatttctctataatatccgatactcctgtgaattgtcccccatcgcttaagggatgcttgaacagccattccaccattttatcgtccatgggctttccactggtatcaatgattccctgtaagaataagtttgctttttctaattggtcgtagaaaaagcagtagttctgtgagaactccatctcatccagtccgtatttggcaatcatctggctgcggagtacgttcagtccggtaaaaagccagcaacgaccggaagattgttggtcggttattcccttggatagcaccttgtgtgaaaactccgtatcaaaatcggcacggttctcctggttcaatgccaacgtgttgatacttgttccgcctaaggcgttgcggatggctttgtcggcaggggttgccttataactttgtttgatttgattcagcatttcacctgaaatgcctccctgttgtgcctgggctgtcaatgcagctgcaaacagaagagcgaatgtgatgtgtttcttcatattattgtaaaaatataaaatgatttattagggtgggtaaatgtacaagttatttttgaaccctgctaatctttcacgtgaaagatatataatcatcagatcctatcattattatgacaggtccgactgttctgcttttttctttatcttatatcccagtatagcaattgtgatactcatcaagggactgataatgttaaagaatgcgtaaggcagatacacaatggtgggaacactaaggatagtggcctgtgtcataccgcatgtattccagggtatcaatggcgaagtgactgtaacagaatcttccgtcgtgcggctcagcagtttgctttcataaccgtttgcactatagatgtctttaaacatattacccgtcaggataatggatatatattgatctgctgtagcaagattcaggaacaagcccgatgcaactgtggacgacaccattcctacccgctttttcgtaaaacgtacaaatacagaagtgatactgccgagcattcctccggctgtcatcgcccctccgaaacacatggcgcagataatcagccagatggtattcatcatacccgccattccgcgagtggatatcagttcgtttatttccgcattaccggtttccaattgggttccaccataaagcattcccattcctcctttgaacaaggcggcaatcccttcgactccttgtccggcgatttcgcataatagtccgggctggaaaatcaaggcaaagacggtagccagagccgtagaaacaaatagagtgatgatggaaggcactttacgtgcaatcagtatcgctgtgacaacggggacaatcatcaaccaccatgaaatatggaacttatcactcaatatacgggtgtattcggcgatatggccggtatcagtggcttcatgtgacaatccggctatggtaaagattatcaaagtgatgacaagtgatggaacggtggtaatcatcaagtaacggatgtgagtgaacagcggtgtatccgttacggacgatgccagaatggtggtatccgaaagcggagaaactttatcaccgaaataggctccggagataatcgcacctgcaatccaaccttcaccgaaaccttgcgccttccctattcccatcagtgcgatgccgatagtggcgatggtagtccatgagctgcctgtcatgacagatactaccgcacaaataatgcaagtggataccaggaaaaaatgaggatgaataacctgtatgccataatatattaatgtagggactacaccgctgaccatccatgctccggacaaagctccgatgatcagcaagataataagtgcggtacttaccccggctatattattggtgacagccagttcgaattccttccacggacgacggaatcccgccatacctatcagcacacaaactgctgtagccactagcagacagacttggctgccaccggacaaggcatcacttccaaatgtacggatagtgacaaacaataataaaataagtacgaatacgggtaaaagggatactaacggtgaagggattttgttatctttcattctttttttattcaatttttattcaaaatgtaaatagaactatcaatttggttttcagcgtgcaaagttcggaatattttttgagttctaaaagtcaatcggcggtatttaaagactttttttgtatttgcaggtaaacctttttgcaagggggggcgttattagttcaaattataacctaaaacttaacaaatatgaatgaattagttggtggcttaggctacgctgtaaaaaattggtggatgtccctgttgctgggcttgctctacattgcggtagcactatgcttattgttcgctcctgtgagcagttatgtggcactgagtgtcatcttcagtatctcgattctggtcagtggcattctggaagttttttttgctgccggaaacaaaaaaacaatcagtagttggggatggtatcttgccggaggtattattgatttgctgataggtatttatctggtattctatccgttggtcagcatggaactgattccgtttattgttgctttctggctgatgttcagagggtttacattgtgtggctattccacagatttgaaacgctatggcacaaaggactgggggtggtatctggtgtttggcattctggctattctttgctctatggctatcatctggcaacctggacttggtgctgttaccgtgctctatatgctgtccatcacttttcttattatcggatgtttccgtgtcattttctccttcgagttgaaaagattgcataaaaacaagtaaaaaaaatcgtttattttgggctacgtcatacgttattcgtatttttgttagcccaaaataaacaatgatttctagtaagagtcttaaatacactgtgcgtattctgctaggtacactgattggtgtctacctgggaataattgtgctgctgaacataccgtatgtccagggcaaattatctgtttttgtaactaaggaattaaaaaacatactgaatacggaggtttctgtaggacggattgatatgggtttgctgaaccgtatcattgtggaagatgtccttttgcatgaccggaagaaccaggagatgctgaaagtagcccgcttatcggcaaaattcgaccttctgcctttattgaacggtaaagtcaccatcagcagtgtccagctttttggatttacggtcaatttgaaccgggaaactccggaatctgcccctaatttccagtttgtgttagacgctttcgcgtccaaagatacggttaaaacaaaatctaatttggatttacgaattaattccgtgctgataaggcgtggcagagtgacatacgatatattatcggaaccggaaactcccggaaagttcaatgcccatcatctatcggtgaagaatctcgctgcaacgctttcactgaaggcattgcgcagcgactcgttgaatgccgccatccggcgggtcagctttgacgaacaatgtggtttttcattgcagaagttcgccatgaaagttacagccaacaataaacgtttggatattaaggattttggtgtggaactttcaaataccgctttaaagatagacagtctgaccttgaagtatgacagcctgcccgaattgccccaaatgacagaaaatgtaagatatgacggctctttgaaggcttccgttatactgaaagatttggctccttttgtgcctgccttgtcacgctttgaagaaccgttggatctaaatctggttttctccggtcacggcaaacatttggactgccccaccctgcggctgactaaccaccacggattgatgattgcaggggaagctgccttaagtaactgggatgcaggcatggatatgtacatttacggcaaactgggtaacttgaccatgacgaaagagggcataaacgttctgatgacgaacctgacgggaaaggttcctcccattttgcaacgtttggactatattcgttttaacggggaagcggcgggctatctgcatgatctcacactgacaggcttgttccatacaggggcaggcatggtgaaaacggacgtgatgatgagcattgatgaacaaagtatgagcagaacctattcgggtagtgtggcgagtgcagacctggatttgggaaaattacttaatcaggaaaagaaattcggcaaggtggatttcaatgtggaactgaaaggtttcaactataagaaccgatatccggaatcatacatcaaaggaatcatatcttcctttgaatatagtcaatatcaatatgaaaatatcatgttggatggcgtatataaggacggaggctttaacgggcgcttatccatggacgacgcaaacggttctgtccaaatagacggtaatttcaatgttgccaaaacaatccctgactttaacctgaaggcatccgtaaagaacctgcgccctcacgacctccatctgtcggacaaatatgagaatgccagtatttcactggacctcactgctgatttcaccggcaaatccattgacgacatgaacgggcgcatttcattggacagcctgcaattaaacgctcccgatgaaggagggtgttttcttgataatctgactattacagccggacaggtaagcggtgaaaaagagttgcgcataaattcatccttcatgacagcggtgatacgaggtgactattcctaccacaccattccggccagcgtggtaaagacggtacaacgctatattccgtccttactgactataaaggataatatgcctgagcctcacaataacttccagtttgatatctgcctggaaaataccgaagtgctatccaaattatttcagattccattggaattatacctgccggcatctttaaaaggatattttaacgacggcgaggaaaagttgcacgtagaaggacattttccggaattcagatacaatggaacacgttatgattcgggcgttttattttgtgagaatccttctgaccggttcaaatgttcactgcgaggcggtatgctgatgaaaagtggtgcaatgcttaacttctcggtggaagccaatgccaaaaacgatcatttggaaacaacaattaactgggggaacaatactgatgtgacttacggtggtaaatttgccgccgatacccgtttcttcaaaacggaaggtccccaccctattcttcaggcagatataaacatacagcccacaaaagtagtgctgaatgatacggtatggaacattcatccctcgcatatcgccatagattcgggacgcgtattcattgacaatttcctgtttgaacatgaggaccagtatttaaggatagatggtaaactgaccaagaaggaaagtgattcctgccgggtggatttgagaaatatcaagctggactatgtactggatattgtgcagtttgacgatgtagagttcggcggacttgtaaccggaaaggttcatctgaaaagtgtcatgaagaacccagtgatgcggacccgtctgaatgtgcacaaattctgtctgaaccgttctttattaggagaagccgacattgcaggtgtatgggataaggaattgggcggagtacgactggatgcccaaatagcggaaaaaggaatttcctccactcatgtgacagggtatgtctctcccaagttaaaaggtcttgatctgtcgattcgggcagatagtaccaatctgggattcttacaaccttttatagaaggaattttcagtgaaataaatggccgtgtcaacggaaatgtccgtttatatggcgatttcaagcatttggatctggaaggtgaagtgagggccaaaatggatgctaaaattgatgtgttgaacacctatttccaaatccgggatgactccatacatatatcttcgggcagtctggatttcaggaatgtaaaagtctatgaccgtgagggacatgacggactggtaaatggttatctgcatcacacaaagctgaaaaatctgatgtaccatttcaatatacgaggcaacaacctgttgatgtacaatacctacgaagccgggaatatgcctttttacggaaaagtatatggtacaggaaatgtggtactggatggtggaaataatgcgatgacagtggacgcttcactgaccacaggcaacaataccagcttcacttatataaccggagtaaccacggaagcagcgagcaatcagtttatcacttttgtagacaaaacccccaagcgcattcacgataatgtggaaaccaatctttaccaccactctaatgtgcgtaagactaaagaggacgacggacctcctatggatctccgcatcaacatgttgatagaagcaactcccagcgctaccatgaaaattatcatggatcctgtagcgggagacaatattacagcaaccggaaatggaaacctgcaagtgaattttttcaataaaggtgatttccgtatgttcggtagctatgtcatagatcaaggtatgtataaactaagcatgcaggaagtaatacgcaaggactttaccttgaaatcaggtggcacggtgactttctcaggtgacccttatcaggcgaatcttgatttacaggcggtatacacggttaattctgcttctttaagtgatttggtagtagatccctcgcgcaaccaaggtacggtgaaggtaaactgtctgatgaatctgactggaaatttatccaatccggatattaaattcgatttggaactgcccactgtaagcgaggaagaccgggaattggtacgtagtgctaccagtacggaagaacaaatgaatacacagattatttatttgctgggaattggtaagttctacacctatgattatgccaataatgaccaatcctctaatgcaaccagttctttagccttcagtacactttccggtcagctgaacaatatgttgtcccaatggatgggcaataaaaactggaacataggcgccaacctgagtaccggtgaaaaaggttggacagatgtggaagcagaagctatgttgtccggcaggttattgaataacaggctgatgataaatggaaacttcggctataaggagaatgtgatggcaaatagcaacttcgtaggagactttgaagcgatatggttattgacaaaaaacggagatttccgtttgagagggtataatcagaccaatgaccgctattttactaaatctaccctgaccactcaaggagtaggtctcatgtataaaaaagatttcaatacttgggatgaactgttccgctggttcttatggaaaagacggaaaagctcgttacaaaaacgaagcgatgactaattaacctataaagtttatttcatatctttgcaagacaaatttaaaaatatgaatatgtcctatttacccgccgaatggcataaacaaagtttgattcaactaacgtggccccataaagacacagactgggcatacatgttggacgaagtgaatgactgttttcttaagatagcttatgaggttttgaaacgtcagagtttgttgattgtggctccagaccccgattccataagagatagtatagataattatggagctgatatccaaaaactagtcacatcaaaaatcaacacaaatgatacttgggcacgcgatcatgcttttatcaccctgttgaaagaagacgctactcccctgctgctggatttctgttttaatggctggggaatgaagtttgccgcaaattatgataaccagattaataacgaactgtattttcaccatcctgttctgaaaggtgaatatgttttctgccggaattttattttagaaggaggttccatagaaagtgatgggaaaggaagcctgctgactacagagcaatgtttgctggctaaaaacagaaatgaaatgaaccgacaggaagtggaggattttctaaaagaaacatttaacttaaaacaggttctatggttgaaacacggttatctggcaggtgatgatacagacagccatgtggacacattggcacgtttctgtccggatgataccattgtgtatgtaaagtgcaccaatgaaaaagatgaacactataaggaactggcaatgatggaagaagaactaaaagcgttccgtactttggacggcaggccataccgtctgcttccgctacctatggcaagtgctgtttatgatgaggaacatcatcgcttgccggcaacttatgccaatttcctgataatgaatgaagctgtgctttatcctacttatgctgattctgtgaatgatatgcgcgccaaagaagtattggctgaagcatttcccggaagagagatagtaggtattgactgcactgctttaataaagcaacatggctcgctgcattgcgtcaccatgcaatatcccgaaggtgtatattaataaatatatgtatgaaaagaacgattaaagtaggaattatccaacagacatgcactaatgatatccgtcacaatttgagcaaactgcaccacaatatagaacaggtggcggcagcaggtgcacagctggttgtattgcaggagttgcacaacaccccttacttctgtcagacagaagatacggatatgtttgatttggcagaaccggttcccggtccttctaccggcttctacagtgagttggctgccggatacggtattgtactggttacttcgttattcgagaagcgtgctccggggctatatcacaatacagccgtcgtttttgacaaagatggcagtatagcagggaaataccgcaaaatgcatattcccgatgatcccgcctattatgagaaattttattttactcccggtgacctgggatttgaacctattcagacatcactgggaaaactaggtgtacaagtctgctgggaccaatggtatcccgaaggtgcacggctgatggcactgaaaggtgctgaaattcttatataccctacagctataggttgggaaagcacagacactcaagaagagaaaatccgtcaactaggtgcatgggtaaccgtgcagcgtggacatgccgtggcaaacggtctgccggttatcgccgtgaaccgtgtaggacatgagcccgatccttccggtcagactaatggtatccaattttggggtaatagcttcgtggcaggtcctcaaggagaaatactggcacaagccaacaatatggatgaagaaaatatggtagtggaactggatatgacccgtagtgagaatgttcgtcgctggtggcctttcctccgtgaccggcgtattgatgagtttgaaaatctaacccgacgctttatagattaaatacaaacgttatcgttatataaattcacatattcgttaaacaattcatggttaaggctgttttagttatcagaatattcaaaagatattattgatttactaaacagcttaattatgaaaaaagtattatttttagccgcattgttacttgtttgcttcagcggagtgacaaatgcacaaaccagaaaacaaagagaagacgctaaacgcgaagcatggaagaaagaacgtcaggaaaagaaagccttggaagctcagcaggactctgtatcctacgtccaagcaattaatgctttaaaaaacggttcttttgtattagaagctgataacgttgtattccgtaatggaataatgcgttttgtttcctctaacacgaattatgtggaagtaaacgatgggcaaggtattattcagaccgcctttactaattttgtgtataactggagcccgaacggcttgggaggtgtcacggttcagggaaatgtgaacggaataagtatgcgccaggataaagacggtaatgtgtactataattatggaattaatgggattgccgtttcggccaccgtttccattgtactgactggcggaaccaatcaggccagtgttactataaatccaaatttctcaggcaatacgctgacaatgaacggatatctggttccctataacgaaagtagtgtattccaaggaacaacatggtaattcattaagaagatatgagaaaaaggaatgggcattttcactacccattcctttttatttattattatagcattggaaatgtttcttgtctgctcataacattaaccgaggttgtgattccaattccaataaaaaccttttagcggacagtccgcctccatatcctgtcagcgagtggtcactaccgatcacacgatggcaaggtgcaaagattgatatggaatttgcaccattagcattggctaccgcacgaactgcttggggcatcccgatatgcctggccatttcaccataagacattgtcctgccaaacggtatctttaacagttcattccatactgttttctgaaaatccgtgcccacaaaaagaagcggcacactaaattctttgcgttgtcctgcaaaatactcgttgagttgctctattgattcttcgattatttctgacgtacttatttcaaattcggcacacaatacccgcttcaaccgttgattcacacgatcgcagtgtttttccacctgccagtcacacaggcagagttttccgccaaatgaaccgagcagcaacactccgcagggtgattcataactctttatcttgatcgtatttttctctttcatacactttttatatgcttccttcatatgtttataagctgtttcagcttatcggactactttaaaccaaaaagacaaagcgtagcgaattagctgaaacagcattcactacgctttgttcggatcgtcccgttatcggccttttatacaatatcctatataaaaagcggaaaaaacttacttatcctcttttatatcaacgaccagattcaactcatccaattgtgattgatccaaagcagcgggagcatccaacatcacatcacgtccactattatttttagggaatgctatacagtcacggatactatcaagtcctgcaaacaaagaaacccagcgatcaagaccgtatgccaaaccaccatgaggaggtgctccgtatttgaatgcattcatcaggaagccgaattgttcttgtgctctttccggagtaaagcccaaaatttcaaacatcttggcttgtaattgtgaatcatggatacgaattgaaccacctcctacttctacaccgtttactaccatatcgtaagcatcggcacgaacagcagccggatctgtatccaacaaaggaatatcttcttctttcggatgagtgaacggatggtgcatggccatcagacggccttcttcttcactccactcaaacatcggaaaatcaacaacccacagacaagcaaatttattcttatcacgcagtcccagctgacgtcccacttccagacgaagttcgcataactgcttgcgggtcttcatagcatcaggaccactcagaatcaggatcaagtcacccggcttggcactgaaagcttccttcatctgctgaagtacttcctgtgaatagaatttgtctacactggattttacattgccatcagcttccacacgggcgtaaaccatacctttcgcaccgatctgaggtttcttgacaaattctgttaattggtctaactgtttacgggtataacttgcagcgccttccgcacagataccaccaatatatgccgcatcatcaaaaacagagaagccatgacctttcatgatatccatcaattccacaaacttcatgccgaaacgcaaatccggtttgtcactaccgtaatatttcatggcatcggcccatgtcatacgcagaaacggttcgctcaactcgactccacgtaactccttgaacaaatgttttgccattccttcgaaagtggaaatgatatcttcttgttcaacaaaactcatctcacagtctatctgagtaaactcaggctgacggtctgcacgaagatcttcatcacggaaacactttacaatctggaagtaacgatcaaagccggaaaccatcagcaattgcttcagtgtttgcggagactgtggcagtgcataaaactgtcccgggttcatacgtgaaggaacaacaaaatcacgggctccttcaggagtagaacctaccaacataggagtttccacttccagaaaccctttactgtccaaatatcggcgcacttccattgtcattttatgacgaagttccaaatttttacgcacacaattacggcgtaaatccagatagcggaatttcatacggatatcatcacctccgtcactattatcttctatcgtaaaaggaggagttaccgctgaattaagtacattcaataccgatacgataatttcaatttcaccggtgggaatattcatattcttatttgaacgttcgttcacttcaccggttatttgaataacaaattcacgccccaagtgattggcacgttcacaaagttcggcattcaccgcttcgttgaataccaattgggtaataccgtaacggtcacgaagatcgacaaacgtcatccctcccattttacgtgcacgctgtacccaacctgccaacgttacacttttgcctgcatcggaaagtctgagctctccgcaagtatgacttctgaacatatattcttaaatttaatcaattgtttggcaaaggtacgatatgttttccattgtacaaaaccgcctacaagaaaaaaagtcccgtagctgtataccaacggaacttttttaatctggatgtacagatctcaattcttgaacatttcaatgacatcccttaattctcctggaaatacttcaccagttttctcccacaacatcttgcctttacgttggaggacaaggctgggagctatttctatttcataggcatcggctactttccgattactttctatattgactcttacaatattgaccggtttttcaaattcatgtaacagcggttcaatccattcacaatggggagaccaatccgcataaaacacaaccagcaataatgagtccgactggtttacctcttctatttttccagttatatccattactgttttcaattttaaattatcctctacttcctaaactgttcacgtcaggattcaactcttttaccgctgctttcacctgcttcttggtaggcttaccagtattggacacttgttcaacaggaaaccgctgaccactattcgtcagctcatccttttgttccatctttttcttttcttctttacccatatcttctcatttttaaggtttatgctaataatgcaacaaaatagataaaaagatggttcacataaaaagtgaaaaaggatgcctgaaaattattcagacacccctttactactacatttaaaactacgtgaaattgagattattatactttacggtcgcaataacgtttgcattgtacacaaatatcataccccagcatagctccaagaataaaatcctgctcgggtgacaatttgttcagtggctgattcactaggaaacgaatggcattaatgcattcttttctaccgaaaaacaggtttattttatcatttcccacgggctggattatgtaattaatcttttgattgatcagccgttttacagcaaaatcttcatacttcctcttggtagtatagagtaccatctgacgtactcctttttttaattcataaatatgattcagaaatactttcaattctaccgggtttatgtctgaagctatcataaggcaattgtcaaaattacaggttcttctttatttcttcaacccaactgttaatacgttcttcagtcttgccactttcgttcacgtcatcaagagccaaacctacaaatttcccatcgattatcgctatagaagatgaatacgaatacccatcggcagaaactgcccccacaaaagtgcaacctgaattctttaactggtcatatataactcccataccgtcacaaaatgtatcacaataggattctgaatctccacagccaaagagagcaactattttaccattcaaatctgcagtctttatcattttaatggcgtcataccaatcatcttgcaattcaccgtctccccaagtagaagtccctaacaataaaatatcataactttccactttttctgtggtaattttacttgcatcaattacatcaactgatgccacacctaatttttcagctattgtctgtgcgatgctctcacaagttccagtagaggaaccataaattatacccatttttttcatacagcaaatcatttaatttgtttgttgcaaagtaaaaggtttgaaagagattctgaaatacctagaaatagtgattttaataaagttcaagagacaaaactcagtttttgaaaacataaacttataatctgaaatttaagcatcctaaaagactaaagaaagggtcgtatcattactcaagacagagtttgatacgacccttttaagtgttataattactatctgtaacttttaggagcagtcattttcgttttgacacattgatatgtttttagaaccgataagcagctccgaaattaataaccccttggtcaaaatcatcaaccaattggtatctgaattcaacattcatagcccagttacgtcccaaagcgaattccgctccggctccgagattaaccccgatacggaattcattatggttacccccatcatcaacatggacgtggtctccatcccagtcaacatccaaatcatgcatgtcaaacatccagttggacatggtcagaccaaacagcggataaagtttgacactttgagctaccggacaaagatagtggaagttcacatttaaatccaacatacttacattgtcattctcaaaaaaaataattgaatgaaggttcaatacggagaggattagtgatattgtactggtatttaattcccaatccagcactttcaatttctgttccgtaacttaatccaaatccaattgcctgtctgcctttttgagcgtaggtactgctcaacatgacaaacatcagtcctaaaaaaataaagatctttttcatttttaaaaatatataagtgtgttaatcgtcttcatcgtcatcatcccaatcatcgtcatcatcgtgccatttatgatgtttatgacgcttgtgttttttataatgcttgcgatgatgcttatcatgatggtcacaataagagcaataatgttcacgccagcattcgctatgataacgaatcctgtcataaaatggatcatagtacatcgaccctggttttatgcctatctctaccaatatacgattccagccattccggtggtaacgcttgtaatagtcacacacctcccgcatatgcctgccggaagtctttgctatttcaagagccaaaccgacattcccccaattactaccacatcttctgtaataatcatccaataattgattagatatattatattctacgcataaacgtttccgatagtcggataactccacagctgcatacttgttcgccctgcctatgaacagagaaagcctgtcttgtgcaaacatggaacaagaaatgactataaataataacagtacttgaattcgtttcatattaaaatctggcaataaaactattgaaattgcaaatatagatataaaaaagcaatacacaattttttatggagaatttagatactgtctaattttacattttgataaaaaaactacttcttttttccttcccaatgattgttttaaatggtttcttgctggcaataatgataaaataacctgcatacatgatggtaaagcggcctttatactattttctgaatgtctctaactttttcaactaccttactgctattttcttactttcgccaagaactgacatcggttgtgaaaattataataaaacccctctcaaaaccgtgcaaaccagcacagactagagaggggggtatgaaagagtttgcttagaatttatatcctaaagtaatgcctatatttgcattatggggggcatcgccatccattaccttgcaaaaaccaagttgggtatcaagacctacgagaatctttccgaactccacacccagaccgatgttccatcctgcatcaaatctgttgtaatccagtccgtcatcaccgaatgtgtctattttgtcatcaccattaatatggatgcctccaacggatgcgtcaccatcgaatttagccttaccacctactccgcaagccaaataagggcctgtcgcgatgacaaggttggtgttatctgcaatattaaaacgaaactgtacgttaacaggcaattcaagatagagctggttaattttcacatcagcatcagcatctattatatttccgtcaaatccacttgaatattttgcccccctttgcgaaaaaaacaatgaaggctgtaaagatatcatatcattaaactgatactccatccccactccgatacgtgctccgggtttaaattcggagtgatctgaattctcaccaatataactactaaggttaagaccagcctttacattaaaagacacctgcgaaaatcccatagtacagattaacgcaaacaatacggttaaaatactttttttcataatcataagttttgattaaagattatttattttatcattgcttcaacaatgacaatgcaaagatataacaattataagttcgttgtcacctcaagcagacttttgttatgcacattctaaagactatatggtttatttttaagaatccaaagtttttcatataactatagaaattatctataagaaaagaatatactccccaacagttgtttttggggaactttattatcatctattctcctcttccttattgaatttctctctttgttccttcttttgtacgatattgataaaagaagaactaatgataccggtcggaatggctaccattgccacacctaccagacaaataatacaacccaataatttccccaaaaaggtaatgggataaatgtcaccatatccgactgtagcaaatgtaataatggcccaccagattccgtcaccgatatttttaaagacttcaggttgtgcattcctttcaatataatacatcaaaatggcggaaaagcaaattgtaatgaaactagctgtgtaggctgtttcaagttcttctctgacagaagcaagagccataccgataattcggaaagatcgcgagtgccgtattaacttaaaaataatgaagatatagggtaaaataatgacatgaacgacttccgtatcccagtatgcataggtaagaacacaaggcagtactgccacgaagtcaacaaaaccataaaaagagaatgtatatttcagacgtgcctttgctgttttcataccgggatagagtgccggtgcagatacgatacgggctgtgtattcaataagaaaaataaaagaagatacataagtaatgccgaataacagtactttgtatgtggccatttcttcaaatgaacttgcaatgacggctataattgaaatcagaatgaagaaaagaacaaaatattgaacaaattttcttctcaataactgttgaatcaaaatatataatttcattttgcaaaaaaaattatttattcatgctatccgtgtgttttccacacacggatgcaatcactttgttattcagactcttttattggatgttttactacaaaccttctcaataataaaagtcgctttttagttttgtattgctaaaaacgatccgcaattatctgactaaaacacataagcaagtgataactgccaatatctatttttgctttcgaatacatcaccatcaaaaatttgatctatggcatcatgcttattgcctcctatattatgcttggcagactgggttaatcctatattataatagcaacttaccattaaatgatttacaattttcactccacctcccaagttcaatccgacttcagtcgaacgccatcccatagatggaagatccttatctataacatccacagctatatgagcaagtttgcgtccccagttgtccttgtctaccaaaaaagaaaaggaaggaccgactcccaaaaacaaatcaaaattatttgatattcccatttcccatttcagttctataggaatatcaatactttgtgttttaatgtcagcgctgcgtctgttagaggtatttgtcagtttgattccacgctctacatacagcagagaaaagtccaaagcgataccatgaaatcctgtttgatattgcaacataggccctacttgaaatcctgtcaaactctcttccttaaactggtcacgcatgccactaatatttgctttgttgccaagcacaccggcttttaccccaaaatgtaatccctgagccatactatcagtgattccccaaaatacgaaaatcgtaaaaaaacaaattatttttttcatgatcatttatttaagaagttgaatatgtttctattattttgaagattgatgcacagtaagttgtgggaaagggaatccgattccttctttattaaatgtcgtataaacaatctcattaatatcatataaaacattccagtaatcagctgttttaacccaaacacggacagtaatgtcaacgctactcgcacttaatgagcctaaaacaatgataggggcaggagtatccaaaatacgtttgtccgcataaataatacgttgcaatacggttctgaccctttgtacatcctctccatattctactccgaatacccattcaacacggcgcatttcctgtttgctgtaattaatcacagcatttccactgagcatcccgttgggaacgtatatcatccgattatcaagagtggaaagtatggtatggaaaatctgtatctcttttattgtaccacttactccaggtccatctatataatcgcctactttaaacggtttaaaaacaagtataatcaaaccacctgcgaaattggaaagattgccggaaagtgccatacctacagccacaccggctgacgccaaaagtgcagcaaaactggtcgtttccactcccaacttgctgattatggcaaaagcaagtaccatgttcaataaaattttcactaaacttttcaagaaagtctgtacactggtttctatcttccgtttttcaagaactttggctattaatacactaatctgcttaatgataaaacgaccgactgaatatatcagaatggcgacaaatatatccttaccagcgtccattccaaaatctaccagtttctccagtgcttgctcaagtttactgcctgaggctgcattcaataataataaattcatttttttcgtttaacaaataaaaattaatcagcttgtcacgatcatattgcaaatatgccagcacatcctgacagtatagtttcgcaatgttccaataaatcatccaatatatttttacattcctaaatagtcggatatttaaagccgcaaagatatcatatataattgataaaaaccaaacttatcacttaaaagagagaacctaagcaccgtattctgtatcaagcatacaactctaagataatatatttaatttttttcggtaatatttgccgaaacatcggtgaagcactattatactaggtgaaaaatgcacggcacaagaacaatctagcactccatgctgcataactaatcaaaaagatccagtaaaaaaacataaaaccaactagttaattcatacttaaagagtatcaaaccaatcattttctgtatttttaggtacttctctgtaaataatactcaataatgaaaacaagaaaaacattctaacaaaacataactaaaatacaaaatatttcagagattcactctaccttaaactttacagcattcgacatttagaaaaaatatcgtaagagttttaatgagagtaaactcggaaattcattccgttgacaaagcaacccacttccatcaaaagaaccattatttacatgctgtaccacagaaaggcaaccaatatatcatactatcttctgatctttcttctaaactttaccctgtactctttcatacggttagttgctatatcataacaagataataagctgctattagagaaaacaatatttttttaagatgtttgtagactctgataaaattaatacctttgcgaagtcaatttatatataaacaatgtcgaaatgtaaattgaaatattgcagataacaaaaaaaggacaaagaaatatgagacttataaaagtaacaggtggtttgggaaatcaaatgtttatttacgctttttatttgcgaatgaaaaagtactatcccaaagtgcgtatagacctttcggacatgatgcattataaagtgcactacggatatgaaatgcatcgtgtgtttaatctgccccatacagaattttgtataaaccaacctctgaaaaaagttatcgaattccttttcttcaaaaaaatatatgaacggaaacaagctcccaatagtttacgagcttttgaaaagaaatacttttggcctttactttattttaaaggattttatcagtcggaacgtttctttgcagatattaaggatgaagttagggagtctttcacttttgacaagaataaagccaacagtagaagtcttaatatgcttgaaattttggacaaggatgaaaacgcagtatctctacatattcgtcgtggagattatttgcaacccaagcattgggctactaccggaagtgtatgccagttaccttactatcaaaacgcaatagcggaaatgagcagaagagttgcctctccatcttactatattttttcagatgacattgcttgggtaaaggaaaatcttccattgcagaatgcagtatatattgattggaatacggatgaagacagttggcaagatatgatgcttatgagtcattgcaaacatcacatcatctgcaacagtacattcagctggtggggagcatggttaaatcccaatatggacaaaacggtaattgtgcctagtcgttggttccagcattccgaagctccggatatctatcctacggggtggataaaagtaccagtgagttaatccacaatacacatgaatacgcacgtctggaaagctaaaaaataattggcatttcggaaaccgctgagccgaaatttcggctcagcggaaattgtagcatccatgttcatttttggtttaacacaccttttcaaaccatagtacgaccatcataaattattttgaagaacgattgacaaatgcttcagcagagtcgttcaatgctaaaatcaaagcttttcgaagccagttaagaggggtggctgatctgaaattcttcatgttcagactggctaggctata

SEQ ID NO: 3867 - DNA, 8571 bp, Unknown
  gut microbiota DNA sequence
agttccaaaagaacttatgcttaccgttctcctctattcattaagtccaccatacttatattatttcccccttttacttgatacacaatatattatgaatatttttttagtcactttctacttatactctaccattagcataatcagcactctaaaaatcaggctattatctatttaatattctatttattttctacttatatgaaccataaaacgatcaatcgttttctttattacacaattacagtatttatcaatctactaaattctaatcggtcaaactcgcaggcgcgccccaataaaggctaacagttggtatagccttccacctgacatacgcatatcagctaatatttgccatatcggatgccctctcacaccataatcacagtaccctactatcttatctcctatccctcactgctgcaaagcttcaactggtctggaagtatttctgcattttccatctccaagaatagaagaaaaagtctctttctccgcaaaaatcctcttcttttctggagaacaaaatgaagaggagcccttttctttttttgccctgctttactttgtaacttcatgttttcatatccacattttccgttgaaatgcctacgttactaccgtccacatacaaattcttgtattttgaaatctctatcaacaagtaatcagtactcacctctacacacttccgttgttgtaccgcctcaaagtaatggtcctgtatacttccggaagtaagaattccaattttttcgtattgggctttactaaaaaatccacgttccaacagtgcatccactacttgctgtacataatcggccgtacatccttcgggcaatctgcgagtaaaaagcagacacctatcctctctccaacagcaaagacatcctttgtggtaaatacgtgccaataaatgcaatacaagcaatgtagcccaactcttgttccaccaacaatattttatcattctcgaagaaatccacactcaggtagaaaaattccaatccggttgtttgtaatgccatatcgatattttttattgatgacaaatatagaaagaagcccagacggaatgacgcgatttgacgcgatttgacacaataatacgcaataatgcacaattgatgctccacacacatcttgaatagcagccggaaagatatagacgataaagacgaaagatatattatcttacatgggtatcattatagatgttacaattttatcaaatatacatagaaacagatagatgtatacaaaaaaaagagaaactgactccaaaggaaaacagtatctcttttttatcttataagattcttctctattattcttccgtatagcgttcaatagtctgatcacgatcaggacctaccgaaacaatcttgatcggggtttccagctgttcttccaagaaagtgacatacgcattgaattcttccgggaattcatcctcactggtcatcttggtcatatcagccttccatccgggaagctcagcatatactggttccagtccctcactaatatcataagggaagtaatcaatttcctcaccatttactttataagccacacatgctttgatggtttcgaaatcatccaacacatcgctcttcatcataattaactgagtcaccccgtttaccatgatagaatacttcaaagctacaagatcaatccagccacaacgacgttcacgacctgtcaccgcaccatattcatgacctaaatcgcggattttcttaccagtttcatcaaacaattcggtagggaaaggacctgcccccacacgggtacaatacgctttcatgataccgtatacattaccaattttattaggaccgatacctaaaccggtacaagcaccggcacaaatggtatttgaagaagtgacaaaaggataagaaccgaaatcaacatcaagcatcgttccctgcgcaccttcacaaagcacactcttacccgacttcagaagattgtttatttcgtgttcactgtccaccaaatggaactgtttcaggtattcgataccctccaaccattgtttttccagttcggttatatcatattcataattcagacttttcaagatctgttcgtgacgtgcctttgcctttccatacacttcttcaaaattatgaaggatatcacctacacgtacaccgttacgactcactttatcagtataagtaggacctataccttttccggtagttcccactttggcatctcctttagcagcttcataagcagcatccagaatgcggtgagtaggcaaaatcaaatgagctttctttgaaatgtgcaaacgttctttcagggggtgtccgctagcctccaaagcttcagcctcagccttgaacaaagccggatccagtaccacaccattaccaataatgtttactttatttccttgaaatattccggaaggaatggaacggagcacatatttctggccttcgaattccagtgtatgacctgcattcggacctccctggaaacgagctaccacatcataacggggagtcagaacatcgacaacctttcctttgccttcatcaccccattgcaaacctaacaagacatctactttcatgtttcttcgttttatgttacttatcttttttcttcctacgcttggcccaagtacacttgctgcatacaccatagatatataaggaatagtgcgaggcatgaaatttcttcagtttcgtattggcaatggcttgtttcagattctcatcctgaaattcggtcactttgccacattccgtacatatcatgtgatgatgggtttcattgttgtacgcacgctcgtactgggaagaattgccgaactgatgtttaataaccaattttgcatcgataaaaagaatgatggtattataaagagtagcccggcttacccggaattttccttcatttgccatataattataaagcgtatcaatgtcaaaatgacctttaatggaatagatagtatcgagtatagcatatcgttcaggtgtcttccgatgcccgttaacctgcagatattctgtcaagatctgctttaccttatctttcacattctcttccatcacagatttcagttccgccgtcaaagttaagcctttttatgataacatgaaagtttaatgccaatattctgtttctaattttatttctccagccaaagaagctatttctaccttatctgatttggttaatggagccaacaaccgattcacctttttgccattttccttgctttgaacggcaaacttcttcaaagcagtagcagctgctttgcggggcagcactccctcgctttgtaaagtgaccattgcctgatccaaaaattcagcttccgaacgctcagtcagctgatttcccttcatcaacagccttgccatcagcataaagccacataactgaaaatattcacgctcatcggccatccattcaaaagccttctccgaagcataaggtaaatattggaacaaactcatgcaagtcagttccgctatttcaggatagcgcatatcttctacccatatatcagctatttccggataaaatgtttctaccggctgtaacattcccgccagaattttacattcacggatattttctttccataaagcttgcgccacttcatgatttttttcataacgagcagctatttctttcaaacgcggaagttcgatgccaaaattcagtttatagtctaatcccttctcacgcatactttgggaaaccaccccattcataaacaaacggaattgcccctttatgtcctttattgtttcgtgtacatccatatttattcttattcatttctataaggaagattcgcaaattctttgctataacgtaacatttgctccgcgtaaccttcattataagatacttttacatctataatatttccatccttatctgtcacggcctcatatacaggatttacaaaacctttgtaaggagccagatgaagtttttcataacgtgccaatatctcggcgtgcaaaaccggatctattttcaccgcatacttttcgaccaatttacgggcagcctcaaaatctccttcacttttaatgcgttgtatctcagccagcaactgtccgaacagagtgcgcaatttttgataatcgtttatcttcacatacgttttcccatccttcttaaccagttcaaccaccttatctgcagcacctttctcaaatgtccaccgcgcaatgagctggcggttacgcatgtgtgcttcctctaccatattacctaactcgatgcggactaactgggtcatcagaccattcatcatataagtataatattctgctttaaaggcatctccatccggtgtaagccccaactctaccattttgtcatccggcagatagtacaaaccgaataaatcggcacgtgcctcttctatcgtagatccatacgctttcaaagcatcctgatctactcccggtaacaactgaccagaaccgtgccccaaacattcatgcaaatcagtatgtaaatcccctgtaagatctgcatatttctttatccattctttctcttcggcaccgcaaacaaattcatctgtaaatccattaccatgagccgctttattataggcttcagtcagatttccgatggttacagacttagaaccatgcacactacgaatccagttggaattagggagattaatcccaatcgctgtagcaggatacaaatccccccccagcatagcggctgtaatcaccttggccgacacacctttcacttccttttttttaaaccgatgatctacaggtgagtgatcttcaaaccattgagcattagcgctgatgatttccgtgcgcttggttgcttccagatctttaaaattcacaatggactcccaactagctttcagtcctaacggatctccataactttcaataaagccgttaacaaaatccacgcgtgaatccaaatccttcacccacgcaatagaatattcatcaaaatctttcaagtccccattcttataaaatcgaattaatttttcgataactattttttgttgtgtatcttctgccacaccaagagccttatccaaccaataaatgatcttatcaatggcttgcccatacaatcctccagatctccagaccttttcttgtacttttccgtcctcctttactaaacggctgttcataccaaacattaccggcatcatatcatccggattcttcaaattatgataaaaatcttccgcttctttctgggttaccccttcgtaataatttgcagccgaagtcaggaccaaatcctccccgtctgcctgattcacacgtttaggcatcatttcagaatcaaaaatcaccggaaagacttcttcacaaagttcttccactgtttcccctttacccaaaggtaacttcaatgcatccacactattcaatgcatccctaaaaaattccggagtgaaacctggtacgaacttatttgaagcataatgatgatgaattccgttagaaaaccatatgcgtttcagataagtttccaaattgacgaaattcacatctgtacgatctccctgatactctgtatatacggtttccaacattttacgaataagcaaattgtatttgccattctgatcaaacaaaatatcacggccttgcaaagcagcttgtgacaaatagtaaatcaactttttttgtttcaaactcagttcttcaaatccatacactttatatcgaagtaactgtaagtcggcaaattgttcaaccgtataatcaaattcctccatttcattcatgcttttatctacttcattgcaaccaacctgtttcatttctacaattaacgttttttatagatacataattcgtgagccgaaacaaaaaaaggaaaacaattgttttcctttttcttaattataatgtagcaaattatgctcttatttcttttcttgatttctcttacgatagccattaggagtctcacccacattcttataaaacgcagcataaaaagattggcgattagcaaaacctaccattgcactgatctcttccacattcttatccatatagcgtttatcaactaaaagatgcaaagcatctttaatacgatattcattcaacaaacaagaataattcattccgaagcgggaattcactacagctgacaaataacgagtatttgtctttaattctttcgccaagtcttttgctgaataattagggtctttgtactttttctgaacaactacaatgttcaaaatcttatcatacaattcatcggcaagttctgctctaatcagagatctgtaagcagcctttttctctttcttttctctcaggttatacggttttttcttaggagccgcttcctgggtttctgattttttttccacgtcgctcatcagttaatttttcttttaatttttcgttgtttggttagttatataaatgcaaatatctaattttggacaaatgtgggaaaagtttttttcatatgcaactttttttgcttaatttatttcttaaataatcacaacactttgttttttaagtggcaaaaaagtttatttgtccaatctacaataaccaacctctcttttaagcaataatttcaaaacaaatgaattatgaataaaagtatatcttatttactattattaggcagagattcctaccaaatctaaagattttactacctttgtaaccgattacattttaaaataacaaacagatatgttccaaactctaaaaaactactttggatacgatagtttccgtcctttacagcaagatattattcaaaatatattagctcaaaaggatactttggtattaatgcctacaggaggaggaaaatccatctgttatcaattaccggctttactgatggaaggtacggccattgtcgtttcaccccttatttctttaatgaaagaccaggtggaaagtttacaagcaaacggaattgcagcacgggcactgaacagcagcaataatgaaacagaaaatataaatctacgtcgcgaatgtcttcaaggaaaaatcaaattgctttatatttcacctgaacgattacttatagaaacaaacttcctgctgaaagatattcaaatttctttatttgccattgatgaagctcattgcatctcacaatggggacatgatttccggcctgaatatacccaattaaaggtattacgtaatcagtttcccaaagtaccgattgtagcattgactgctacagctgacaaaataacccgaaaagacattgtacaacaattggccttgaaagatcctaaaatattcatatcttcctttgatcggcccaatctgagtttggaagttaaaagaggctaccaacaaaaggataagatgcggactattcttgaattcatagaaaaacacaaaaatgaatgtggtatcatttattgcatgagccgcagcaaaacagaaaatgtggccgcaatgctgatgaaacaaggtatccgtgcaaccgtttatcatgcaggattaagcagcgatatgcgtgataaggcacaaaatgatttcataaatgatcgtgtacaggtggtgtgcgccactattgctttcgggatgggaattgataaatccaatgtacgctgggttattcattataaccttcctaaaagcatagaaagtttctatcaagaaataggacgtgccgggcgtgatggtatggaaagtgatactttgctgttctattcactgggagacttggttatgctttccaaattcgctacagaaagcagccagcaggaaattaacttagagaaattacaccggatgcaacaatatgctgaatcggatatctgtcggaggcgtatcctgctgaactattttggtgaaaccatggaccatgattgtggcaactgtgatgtgtgccgtaatccccccgaacgctttgacggaacaatcattgtacaaaaagctttgagtgcaatagcccgaactaaccaacaaataggtactcacatgttaatagacatattgaaagggtcagcaaaccaagaactgattgacaaaggttatgacaaactgaaaacatatgccgcaggaagagatattcccgcacgcgactggcaagattatctgctgcaaatgctgaatctaggatatttcgaaatagcctataatgagaacaatcacctcaaaataactgaaagcgggcaaaaagtattgttcggcaaagaatccgccatgctggtagtcattaaacgggaagaattcgtacctgctaaggaaaaacgcaaaaagaaagccaaggaagaggtactctttcccactccggttacttttggtaatgaaaacaaggacttgttcgaggagttacgtatactgcgtaaaaagctggcggaccagcaagctatacctgcctatattgttttatccgacaagactttgcacctgatcgccacccaacaacctacaacaatagaagcattcggcaacatcaatggtattggcgaatataagaaagaaaaatacggaaaagagtttatagagttgataaagaaggtactgaagaaatgaaaaactattcttcccatat

SEQ ID NO: 3868 - DNA, 12034 bp, Unknown
  gut microbiota DNA sequence
ggtaggcattcttatttcttgtgcgttccccagtttgttttccgatgattgctgcaaggcttgccgtgaaaaaatacgctcttgcgccagcaagaggaagattttttcacaggcaaccaagccccttcaggggccgccttgcgcaatcattcggaaaaacaactatctttgctgcaagaaatgaggatgacttcatcttgaaagcgcctggtctctgtatattattacagacggttatgcgaggtataagataggtttatctctataaccccatcttgctccttactatattcatgttgtccttcaggttcctgtccatgactcttgcataatgttgtgtcattcttgtggatgcatgtccgagcatggcagatacttcctgtaatggaacgttgttggccagcgtgacggtagtagcaaacgtatgtcgggctgcatgcgtggtcagattctttttgatgccgcagaagtccgcaatctccttcaggtagctgtttgccttctgattgcagacaacaggaaggcatgtcccttgtttaagacatatcggatgtgattcgtatttcttcagtattgccaatggaaccggaagaagcggaacatttgctatggaacttgactttcttcttctctccagctttacacgtccttttcttatccaccagtcaccgttattgtcctgctccagatgttccggtcttaatgtggatacatcagcgaacgccagaccggtgaaacacgcaaacaaaaagatgtccttgacaagctccagcctcggaatatcaaattccctgttcattatagcctgaagctcgttatttgtcaggaatacaggatcagtctcgtcctgttccatcttatatccgtaaaacggatcttttcgcatccattctttggctattgccatattggtgattttcttcaggcatttcatgtagcggactattgtgttgcggcacagtccggcttctgtcttcaggaaaacatcaaaagccctgatgaaatcaggggaaagttcatggaatgtaatatcatccttctcataaaagcgcggcacaaacgtttcaagttttctgagcacattcttataacggttgatggtgacgggagaatagtctatgtcaacaaccttttccatagaggaaatttcttctttgactgttccaagcaacgtccggacagtctcatcctttccgaacacacgctttaatatcacctttggagttatcagtgccgattcaaaggtcagttccttgtgcttttcgtatgcgcgtgtagtgagggcggaaatatagttgttcaattcgatggaagccctgtcttttcctttgctgcatcccttggccggattccagttctttagtggaacgcttctctgtattcttatttcttcatattgcccgtttatggtaatcctcattaggattggagcctcgccatttttcagcagttttgttttcagaacgaaaaatagaatgttcattgttccttgtttcatgatcattttctttttgaagttgcacattcggttatttcgtcaatcctgaatggagcggatggctggagagaaatgttaaattcggtggcttttattattgccggctctaaaaaaccaccgttttttgtttctcttactattatccgcctgtaggtacaatcattatcatcggataagaaagcctttagcagacgttgtatttcatccgtcattcagtagggtatgcaaatgtagaatttcatccctgaaaatgattcacgcaaatcgttgagaataagtgaagtatggtacatatcggtggttttttcatgggactcaaaaaaagccaccgaatcagcaattttttattgcaccaaattgcatatttttgcggacagtacataaagaaaaaaccgctgaaataactgtatttcagcggttttcatgatttttcgttttgtaaaagtggtgccaccaggaatcgaaccggggacacaaggattttcagtcctttgctctaccaactgagctatggcaccattgtttcttgtttgcggttgcaaaggtagtgaaacttttttaaactgcaaactatttctaaaaaaaaacactgataaaagcataagatgcttattatcagtgttgtttaattaaaattatttttcttttagtggattccaaccttgcgctttcagctcaaactcttgtccgtcacgggtaatcagggcacatcccagctccggtttggtgatgtgaccaatcacttttataccctctatagccgaaactcgttcatgctctgttaaaggtacagtaaataatagctcatagtcctcaccaccatttaaagcacatgttgtcacattcatattcagctcttccgccattacagccgtttggtaatcaatgggaattctttcctcgtaaacgcgacagccggtatcgctttgtgagcatatatgtagcagttccgaagaaaggccgtcggaaatatccatcatagcggtgggcctgattcccgctttagccagtttctcaatgatatccttacgtgcttcaggctttaactgacgttccaaaatatattcttttccggaaaaatccggatttgcttcttttgctccttggaaaacagccttttcacgctctagaagttgaagtcccatataagctcctcccaagtcaccgctgacacaaatcaagtctgtatcttgtgcgccgttgcgataaactactttgtccttgtccgcttcacctatgcaagtaatactgatggcgagcccggttacggatgaagttgtatctccacccacaatatctacatggtgtagttcacaagccagttttagcccatcatagaactgttctaaatcttcaatacaaaagcgtttggacagtgcgatagaaactgtgatttgttttggagtaccattcatagcataaatgtccgagaagtttacgatggccgatttatatcccaaatgtttcaatggggtataaaccaaatcaaaatgtaccccttccatcagtaagtctgtggttaccaatacctctttatctttaaattccaatacggctgcatcgtctcccacaccatattgggtttccggattttttaactcgatatccttcgttagatgtttaatgaggccgaactcacctaaggtcgctatttctgttctgtttatttcctgcatgttcttaaattcgattaatcatttcacgcataatggtagtcatgcgcggttgcgcttcatctgccgctttctgaacctcttcgtgtgaaacttccacaatttttccctccacgcctaggtcggtgataaccgatactccaaacactttgatgccacaatggtttgctacaataacttcaggaacggtagacatacctacggcgtcagctccaagaatgtggaacatcttgtattctgccggagtttcgaaggtgggtccctgtgtaccgatatatactccttgttgtactttgatacctttttctttagcgatctccagtgctttgtctatcagttctttggagtaggcttcactcatatccgggaaacgggggccgtattcaatgttcttgccgtgcaacgggtgttcgggaaaaaagttgatatgatctctgataatcatcagatcaccaatttcaaagtctgcattcgtacctccagctgcattggatacgaacaatgttttgatgcctaattcacgcatcacccgtacggggaaagtaacttctttcatggagtatccttcatagaagtggaaacgtccttgcatagccatgatgtctttattacctaatttgccgaaaatcaatttaccgctatgtccctctacggttgaaacagggaaattagggatatctttgtaactgatctcgtatttatcggtaatttcgtgtaccaggcttcctaagccggtacctaatataatagcagtttcgggactggtatgcatcttttctctaagaaaagttgctgtttcttgaattttttctaacatagtcggttatatttgagttaaacagttcttgttggtcttgtaaaaaggctacctcaatgggcagcatatatatataaggtttcagcatttcgtccatcagtggatgggctgctagtcgtacagagtctttttcagtggtgataatcatgcgtttaccttccggaagtttcatgaaacgcttctttatcagttccatatctcttgctgtaaagtcatggtggtcactgaaagccagtgactcaatgtgctcattgtatggtgataaatcttgaatgagttttgctggggaggctatgcctgtcaccaataggatatgcttgtctttttctatctcttttaatgaaactgcattccctgctgtaaacaacggatgcagcttgccgtatgctaatgttgtgaagtagagctgctgataggggtaaagttccatttgcttgcttaagactcttaaatccataggggtgatgtccttaggacatttagtgacaataacaatatgtgcccggctttttccgttttcaggttcgcgcattcgtccggcaggcagcaaggtgtcttcgcaaatcagtcggtggtaatctactaataagatgtttattccgggctttacatatcggtgctggaaagcatcatccaaaataatcacttctgttccaggggcgatgtgactattgcataactgctctatgccatgacaacggtcccggtctactgccatatggatatccggaaacttctgtttcatttggaaaggttcgtcacctatcatctgtacggacgtatccggtctggcaagtacaaagcctttggatttgcgtttgtagccgcggcttagtacggctactttgtaatctttctgcaataatcttatcaggtattctgtatggggggtctttccggttccgcctacggtgatgttgcctaccgagatgaccgggatatcaaacttacgttctttgtatattccccagtcaaacaatttattacgcagccatacaccggtcccataaatccatgaaaccggatatagccacttgtttatcttgataagattaccttccatgtgcaatttattggatattagggtcaaacggcatacgtgcctgtatacagttggcgtcttttatgttctccagcgccttgaagctgttataatagcttcccaaatattctttaatttcgctgtttatataatgttttttctgatttcccagcaggcttgcgaaaatattttctttttcaggatagccgataatactgtaattttcgataccggcttgggtggcggcggcattcaatgctttgtctatacctcccagctcgtctaccagaccaaggtcttttgccatggcaccggtccatacacggccttcagcaactttttcaatagcctctgtagacatttttctaccttcagcgcaacggtttacgaacagcttgtatcctcggttgacatagttctgcattaattcttgttctgatgcatttagcgggcgggtgagaaccggacctaggctggcacccaaatcagccattttattagttttcactacatcaaaatttagtcctaaagtttcagtaaacagtttctcacctgaatacatcatgccgaatatgccgatagaaccagtcagcgtagtcgggtcagcgaaaatgcggtttgcagcgcaggaaatgtaatagcctcctgatgcagcataatctcccatagaaacgattaccggttttttctctttcagtcttactacttcacgccatatttgatctgaaccgtatgcgctgccacccggtgagttgacgcgtaatacaacagcttttacgtcatcgttatcacgtaatttgcgcaggtctttacacatcttttgtacatcaatacaatcttctgtggaactgccgggagcatccaggatctcgccgtatgcataatatacggctattatatttccacttttgtctttgggcacatttttcttgacgtttatcatgtcttctatgaaaagactgtttagtttgtcgttttcgtcacgaccgcttaattgtttcagataggaaataacctcatctttatacatcagggtatctgccagtttgcattgaatatattcttctgcctgacaaaaatccatatatcggtcagcataagcattcagagtatctgtcgggatgcgtcgtgagtcggatacatctgcaagaatacgatgccagacagattctagacattcggtcatctgttcgcggttggccggactcatttctgtagcaataaacggttccacggctgatttgtaagtacccactctgaatacctgtacttccagtcctagtttggaaaccagatttttgaagaaaacaggttgcatgcctgctccgtgccatccaatacttccttgcggattgataattattttatcggccacgctggaaagataatacatcccctgtgcatattggtctgcataagcaacgatgaatttgccgctttctttgaaatccagtaatgcattgcgtatttcctctaaggaagcgtatgatgcttccagataagaaggttggatataaatacccttgattttgtcattgtcttttgccttcttgatagaagctagaatgtcatccaaaccgtatgcttcaaattcttctcccaaaagttgttggagtgggttttcctgtacacgttcggacaaactgcctttaaagtcgagtacgaagatagagttgtctttcaccaccgtttcagtatccgatgaggcgactatgccaaccagagtgataatccctagtatagtgaacactacgcctgccagaatgacgccgatgacgctggcaaacgtaaattttagaaaatctttcattgaatgtgttgtttttaatgttaataattagctaacaaaaataggttattgcattgaaaaaagcaaaaaaagtgaacttcttttgttacctgtttgttcttcatttataataacccataaatacgttgttttatatgacaaaaagttttaaggaggctctgaaagcccgtcgtacattttatcggatccaaaacaaatcgacattgtctgataaagaaataagagatttaatttgttttgctgtagaatttgtcccctcagctttcaattctcaaaccactcgtgttgtgttattaacaggtaaggcgcatgaaaagttgtggaacattgtaaaaaatgtcttgcgtaagcgagttccggctgaggtatttggcaagaccgaagaaaagattgatggctgtttcgcttgtggatatggtactattctctattttgaagatatggctatcgttcgctctttgcaggaaagtttccccacttataaagataatttccctatctgggcagagcagaccgatgctatgcatcagttggcagtctggaccatgctggaagatgcaggaatgggggcgtctttgcaacattataatccgctgattgatgatgaagtacgtaaagtttggaatttgtctgatgactggaaattgatagcgcagatgccattcggtgtgcctgttgcacaaccgggctttaaggaagtgaagtcattggatgagcgtgtttttgaatttactgattaaaattcatgtcttatcttttggcttattaggggaaaataagcatctttgtgtgcaataaaaacaaagatgtgctatgaaaaaattattatcacttccccctaatctggtggaatgttttcatgatatagagaaagcggaccagacagagtggttttgtacttccgatcctataggtagtaagctaggatcaggcggggggactgcatggctgttggaggcttgttgtcagaaagtagctcctgacagcgattttcttacttggctgggaaaagaaaaacgtattttacttcatgcaggcgggcagagtcgtcgtttgcccggatatgcgccatccggcaaaattcttactcccattcctgtattccggtgggccagaggacaacggctgtcacaaaatctgctttccctccagctccctttatatgaacaaatcatggagaaagctccgtcttctcttcatacattgattgcaagtggagatgtttatatccgtgcgggccaaccgcttcagactattcctgatgcggatgtggtgtgttacggtttatgggtagatcctaatctggcaaaaaaccatggtgtttttgtttcttcacgggctactcccgataagcttgatttcatgcttcaaaaaccttcggtggaggaattggggaaattaatgcaaacccatctttttctgatggatatcggaatttggctgttaagtgaccgtgcggttagtctgttggtaaaacgatcttataaggaaggaaaactctcttattatgacatgtattctgatttcggacttacattgggagagcacccgcgtatgatggacgatgaacttaacaagctgagtgtggctattctgccgttgcccggaggggagttttatcattacggaaccagtcgtgaacttatttcttctacattggcagtacaaaatctggtaaacgaccagcgggagattatgcacaagaaggtaaaaccgcatccggccatgtttgttcaaaatgctgaggtaggttatcaacttacctcacaaaattcggaaatatggatagagaacagttatgtaggagcaggatggaatatccatcaccagaccatcataacaggggttcccgctaataattggaacctggaggttccgtccggtgtgtgtattgatgtggttccttttggagaatctggctatgtagcgcgtccatacggcttcaatgatactttcaagggagctttggctaaggaagaaacatattatcaaggaatgtctgtaggtgagtggtgtgctgtacgcggcatttcggtggaagaaatagaaaacggtcacgacttgcaggccgcgcgtttgtttccggtttgctcatctgtagaggaattgggagcagttatgcgctggatggtctctgaaccggcattacagcaaggaaaagaaatatggcaacgctgtcgtaagttatctgccgatgatatatctgcttattctaatctttatcgtctggcagaacagcgtgaagctttccggataaagaattggccggcattggcgcataattatgatcgaagtgtcttttatcagctaaatttggagaatgctgctggagaatttgctcggtatgatctgtcgttgcctgagcctttatcagaatcggctccgctgatgacacgtatcagtgataatatgttccgtgcccgggtgcagcagcttaaggggctggcttatcgggaatatgagaatgaggcttttcgtttgatgcgcgacggacttactgcttcggctttagccaagaggcagcaaccgcatttgtcagtgtactccgatcagattgtctgggggcgtagtccggtccgtattgatctggccggcggatggacggatactccaccttattgcttgaatgaaggggggaatgtggtgaatattgctattgagttgaacgggcagcctcctctacaagtttacgtgaaaccctgtcgggagtataagataattcttcgttctatagacttaggcgctatggaagtggttacaacttacggggaggtaagggatttcatgcaagtgggatccccattctctatacctaaagcggcattggtgctggcaggtttccagccgggcttttccaccgaatcgtatgtttcattggaagagcagttgaaggcgtttggctccggaatggaaatcactctgctttctgcgattcctgcgggctccggtctgggtacaagttctattcttgcatcaactgtgctgggggcaatctctgatttttgcggactgaactgggataagaacgagatatgtaaccgtacgcttattttggaacagttactgactaccggaggggggtggcaagatcaatacggaggtgtgcttcgtggagtgaaattattgcagactcatgcaggtatggatcagagtccgttagtgcgctggttgcccgattatttgtttacaggtggcgaatatcagaagtgccatttgctttattacacgggaattacccgtacagccaaaggaattttagctgaaatcgtgcgtagcatgttcctcaactccacagagcatttgtctatacttggcggtatgaaggggcatgctcttgacttgtacgaagccattcagcgtgggaatttcgatgaaatggggcgtttggttggtaaaagctggaagctgaaccaagcgttggatcccggcactaatcccgaggcagttgagactatcattcgccggattgatgattattgcctgggatataaattgccaggtgcggggggaggcggctatctttatatggtggctaaagatcctgaggctgctatacgtattcgaagtattcttactcagaacccacccaacagttgtgcccgtttcgttgatatggctttgtccgacaaaggcttgcaaattagccgaagctagttataactgaatagagttgggaaaccagccgggtgatattttctttagcaaactccggttccattgccttctccagggtgatggggccgggggctatagagaatatacctttgaatcccgctttgtttaattccggcaggttttctatactgcctgccagtacaataacgggaatatgttctttttgtgcttcctttagtattccgtatggtacttttcccatagctgtctgctggtctgcttttccctcgcccgtaataatgaggtctgctccttttattttttcggagaagtcgatggctttcaataataattctgttcccggttttagctctgcgttaaaaaaagccagtagtccaccacccatgcctccggctgcacctgcaccggggtagttcgtgatatcttttcctgtcgttttctttataacttcggctaatgattgcatgccttcatccagtctttgcaccatatttgaatcggctcctttttgttgtgcaaagatatatgccgctccgtcagggccgtagaaagggttggctacatcacatgctaccatgaagtgtgtttctcttaatgcgggatgaataccggatgtgtctatgtttgccacggcttccattatttggcctcctgtacctaaggtatgccctgatttgtctagaaagcggaaacctagtgcctgtagcattcctaatcctgcgtcattagtcgcgcttccgccaataccgattataaaatttctgcatcctttgtttaatgcgtcttttatcaattctcctgtaccaaaggttgttgtcagcataggatttctttgttcaataggtacgagaggtagtccgctgatggcagccatttctataatagctgttctgccattgccggacagaccgtaatgtgtttttgccattttcattagcggtccatgtgccgataaggttatatatttccctttagtggctgtgatgagtacgtccagtaaaccttcaccgccatcagcgatgggaataactgaagtgtggcagaaaggatttatgcttttgatacctttttcggcagcttttcctgcttctgctgaagttagacagcctttgaatgaatcgatggcgataattattttcttcattgtatatctttatatagtgcaaatctactgaaaacttttcttctttaaatagaacaggttgtcttttatttgtggattggaatatgtgtagcttgatggataaagtagatgttttttgcttttgtctgggtgtaagtattggttcttgaagttgatggtgtttccgaacaaccgtcgagatgtaagaaaatgattttttttcttctcggcattttttctcctaaagtttttcccaagtgtttgcagagtcagcatttttgagagctctgtggtttgtgtttcgtaacctgtccggtttttcttcgggcttgcttcttttccgtctttccttgttttccgtctgctgttttcgtatgggtcccttcctttttccgtccttatacgcgcgtgcgaatattataatgtgtgtgtctt

SEQ ID NO: 3869 - DNA, 344710 bp, Unknown
  gut microbiota DNA sequence
agaaaggagcttcgggaggggtgattgaatggaaagtgaactgaatgaacatataaaccttttaaataaaactgtatgatgaaaacacatgacaatcgggtcttgttcagcaaagcattgctaaaggccgcaacctgtcttttccttactgcgggtgcagggatgagccctgtatttgcactgccgggaacagcagagtctatgaaaatggaaattacacagcaaactgtaacagtaagcggtgtggtgaaagacaagaaaggggaacctatcattggtgccaatatcatggaaaaaggaacgaccaacggtaccattaccgattttgacggtaaatatacgctgaaggtaaaaagtgcccagtccgttttgacaatatcttatattggctataagacccaggaaattccagtcggaaatggtggtaagaaagatattaccctgcaagacgattccgaactgatggatgaagtggttgtaatcggttatggtacgcagcgcaagggagatgtaaccagtgcggtggcttctgtgaaggccgaagactttacagcaggtaagattggagatgcagccgaactgattaaaggtaaagtggcaggattgaccattgcgaaaggctccggtgatccgaatgcggaatctacaattcgtttgcgtggtgtgatttcattgcagggaggctctactccattggtattggtggacggaatagaaggtggtttaggaacggtttcccccgaaaacatagcttctattgatgtgttgaaggatgcttctgcggcagctatttatggtacacgaggtgctaatggcgttattttgattactacaaaaaacggccagcgcgagtcgcgtacggctgccaattattccgggtatatgtctctttccaagtttggcaagacgcttgatttctatggagcagaggaaatccgtcagggattgacaaactatgctgataaagggtatgatacggattggttggatgcggtatcccgtactgcatttactcataaccataattttaatatttccggaggatcaaaaaataccacttattctgcggattttacgtatcgcaaagaggaaggtgtgttgcttgagacctataatgaagagatgagaatgaggtttgatgtttctcactggatgttaaatgatatgttgaaagtgaatttcaatatggtaaagacattccataagaatggtccgattgatgcggcaggtctgggtatttaccgacaggctattatgcgtaaccctactgaacccatctggaatgaggatggaactttttacgagaattttgccgtaaattattattataatccggtaggtatcatccgtgaacaggatggtaaatacaatagtgagaatacccggatgacggggaatatcacctttgaaccgattaaaaactggcagaccaacctcatgttaagccgtagggttactagtgatcataatcgtggatattatacttccgaatatttttcacagaagagcgagaatcacacaggatatgcttatcattctcagaatgaatataccacagataatctggaagttacttctaaatataatcatacttggaataaacatcgttttgatgcattggtgggatataattaccagtataatgtaaatgaaggttttggagctaataactatgattatccaacagatttttatctttggaataacttgggattaggtacagctttgaaagatggaaaagccggcatgagcagttacaagaatgacaataccttgattggtttcttcggacgtgtaagctatggttacgataataaatataatgttctgctgagtgtacgccgtgaaggctcttccaaatttggtgagaacaataaatgggctactttcccttctgtttctttgggatggactatcagtaacgaaaaattcatggaaggccttacgtggctgaataacttaaagttacgtgccggttatggtgtgacaggtgtcattgtaggtgactcttataattcattaacccggtatgagtatggttctccttatttctatgataatggcgtctggcatcaggggttaagcgtaaaatccaatcctaatcctgatttgaaatgggaaacttccaaggaatttaatattggtctggactgggctgtattggatgaacgcctgagtggttctattgatgtatatcagaagaagacttcggatatgctatatgattttacggtaccgactcctcccaatttgtataacaagactttggctaatgccggcaagatgcgtaaccaaggtattgaaattgctgtcaatgccattcctgtacggacaaaggattttgaatggaaaaccacagttaccgcctctcataatgcgaacaaattattgagtctttcaaatgacttgtatgagacttcaaatcagatagatcatgcttatttgggtgaacctatcagtctttctacccagcggatggaagtggggagatctatgggacaattttatggcatgaagtccgttggtgtttcagaaaacggactttggatggttgagaatacgaagactggtgagattgaagagtttacagacaatatgctgtctaatgatgactaccgtcaatatttagggaatgctcttcctaaattgtatttgggatggaacaactcgttcagatataaaaattttgatttatctttccagatgacaggccagtttggttttaagattctgaacgagcctcgtgcttattatgagaacaactcgatcgcttataatcgcttgaaatctgtgcaaaaggctccttatggtggacaatataccttatcaacagcccaaaaacagacttttgtaagctattatttggaggatggtgattttttgaaaatgactaacattacgttgggctataacattccattgaaaagcagtaagtttgtgaaaaatatccgggcttatgtttctgccgataatttattctgcattactggatatgatggattggatcctgaaatgtcaaatggtgatatttggtctttgggtattgactggcgcgataaatatccttctacccgttcattcactttcggtctgaatgtatctttctaacttttaaatgaagaactaacatgaaaacaatattcaataaagcactttgggcttcagcgataggagcttgtaccttgtctttgggcagttgtacagatttgagcgaaacgatttatgatacgattgcttccgagaagtatgagtttacagaaaaagaccgggcggccatgtttgctccggtatacagcagtcttcgtgatgtgtattggggatggtatagttatgccgatatgatggaccagtcgtccgattcatggtgtattccttatcggatcagtatcggctggggagatttgtacgtgtctatgcacaaacatcagttccattcacagatagcccatttcaatgatacatggaaccgtaactatgccggtatcaatgcctgtaacaaactgttggcagatgaagtcattgctgctgatataaccacttcttcgcaattaagggcttatcgcgctctttattattatattttattcgatttgttccgcaacatcccattggatacgcaatatgaacatgaagacggatggttgcccgaacaggcaactccccaacagatgtgggatttcctgatcagtgagttgacggatgtaaaggggaaatgtggaacaaaagtagaaatgggtaagctgaacgactatgccatcaatatgcttctggcaaaaatgtatttgaaccacaatgcatggttcaatgattactctgataattcttattacggaaaggctattgatgaggtaaatgaagtgattaacagtggcaagttctctttggctccgaattattcggataattttagagaagatatttccggttcgcctgaaattatctttggtattccgtttgaattcaattatgccggaggtaactatatggcaaatatgtggatgcatgtagccggacgtgcaacgtggcagtttaacggatgggctaccggtggggcggctgttcttcctcaatttctggaaacatacgatgaagaagacagccgctatgaagactgttggatatcaggacagcaatatgactatgccggtgctcccatttatgtggacagtgaacctttggtatatactcgggaattacatagtatagacaatcccggttgctatccctttgaaagtgaacgcttggtgaaatatgaaatactttcaggcgactatggaacttcttatgatgatgtgcctttcttccgtttggctgatgcttattttattaaagcggagtgcttgcttcgtttaggtggttacaatggagaaagcgagcaagtggcggccgatttggtaacagctgtacgccaacgtgccttcaagtccgatcccggtaaagcaacggttactgtagctcaattgaagggtggcagccgttataactacggacatcgggagaatcagggaatcatgggagaagccgataactggattatcacagaagaagggggcgatgatattgaactgggtggtttgttggacgaactggcctgggagtttgtggcagagcatcaccgtcgtcaggacttgatccgtttccgtataaacggaaccaatcagaatgtatataatggcaagtcatggttttgcaaagatgcgaagacggataagacagacaggcattgtgatatttttccgttacctaagtctgcattggatggcaacattaagttgaagcagaatccgggatatggtggtgccgaataatgaattcattaattaaaaaaagaaaagtacgatgaaaaagaattttatatatgctttaattgcttgtttcactctgtcactggctgcatgcagtacggatccggaggatgctaccagcaagcatgtgtacggggagaatgaaaatccctatctgaagacgaatgcggatgctgtggtttctaccaaagcagagtttcccatcagccgtttggaagcgaagacggttaaactgactgattatgcagaaaagtttcatacgtatttggggatgacggtagatgagacgttggctgcattgtctaatgggagtgtggtgttttatcctatcaatatatcgaaaaactgttggaatagaacagctcctaccaagggtaccaacggttggtactataatacggcaggcggtgtttgtgatgcagcttctggtatagctagtattgagttggatgcaacaaagaaggagctggttcttaatgtgctcgaaaccgcttctgtaggtacagctatctccattaacgttggatttgctataaacaatggtgcaaattttgatgattatgtacgttttgcttttgatgtgaccgttactgatccgggacgtattgttgttgccaatactattccagcaggtgactattctgcattttctattgaatttgcagattatcaggaggtgatagaaagttgtttggggctgactttatctgaattcattaccgcttgcaaagaaccgggaggcccgattgctctgtatatggtcgatagtgaatctggtgaatggaatactactagtgattatactgctggtggtagtggaataggttattggctgacttctaatttaaaagtaacgaattggagtgatgatggttcgactggtagtgttttgtttgttgaaacacaagagaatggtgatatggttaatataggtcgaaatccagcttcaacttccggttctgtttttaatgtaaattttgtatatgcgcttaaggaggataatagtaaattcgtagagtttattgttaaagcaacgttggaataatattttatcgagggaaatcagtatctataatggatattggtttctcttttttatttagtaaattcagaaaaacaaatgtgtgaaaatattattattaagaagtcttttagtgactttattaggatattttagctttataaatgttttagctgaaacgaatgaccatcaaaaactttatatatgtgttagtggtaatggggtaaatattgactttaccgcaggcatttaaatgggactccaataaaagctataattatgaagaaattattgtgcaaagaattactatttgctttatccattttttgctgtttctttattgccttcagcagttgcagtgacagcgaggatgaaagtattatcctccagctcaccctagacagcagtcagcaaagcaaaacactattttgggatgagacagaagcttccgtaaagttctccgctaccggtccttggacagccactgtagaagatgtaaccagccgtgccaccgattccagttgcacttggattaaactgccccgatatgaaggtgaggcaggcgaaatttcattgcccatgttgttgcagaagaatgatagcgaaaactatcgggaagcaactcttgtcatagtatgcggagaatccgaagtaaccgtccatatccgccaggaagctaatcccaatgctgtgttaaccttgaattcggctgatatcaaagattttgataaatattacaaacctattgagtttagtaatatgaatatgcttcgcagtgatgcgcgctggtcatggtggcgcatgaagcaaagcgagcatttcttcgtgttttgggaaccggggttcggcaacgatccgggagcagagtcagtgccggaggtattgcgtgtagacattgatgatttattggcaaaggccgaacaattctaccggacaaatatcgaaaccttgaagtttgctgacactgggcaaaacaagtcttttctggataaatataagatggagatttacttgctgtatcagactgagtggcttgctacaggttccggttacgacaatacaatcggtgcattgtgggtaaatcccagcacctgccaaccggtaggttctaccattgcgcacgaaataggacatagtttccagtatcaggtaagttgtgacaagatgttgaacggagaggcggacttttcgcaagtaggattcagatacggttatgggtcgagtggtgaaggtggaaatggcttttgggaacaatgtgcgcaatggcagtcgttccaagattatccggcggagctgttcggttaccatgtagatgtgtggaaagccaattaccatcgccatttcaatcatgaatggatgcgttatgccagttattggttgcaatattactgggcgcagaaacatggagtcgatgtggtagggaatgtctggacacagtcgcgctatccggaagatccgctcatgacttatcagcgtctgtactgtaacaatgacttgcaaacactttatacggaactttatggctacgctacccgtatggtgacttatgatatggacgtggtgcggaattatgtcacagagaccgcttgcaattatacaacgaaaatgtatgatgcagccggaggatattatcaggtaggctatgccagctgtccgggcactactggattcaatatcattccattgaacgttcccgaagccggaacaacggtcaaggcgaattttgccggactggctgtgggatgtgctttggcagaagaggatccgggaacgacattggatgccgacggcaatgtggcaggtacggctaccgcttacaacaataatggtggcaatacggcagccggatggcgatatggatttgtggctattgtgaatggagctccacaatacgcatctatgaataaggaaaatgcaggagtggtttcttatacgataccgatcggaacagaaaaattatgcctagtggtaatgggcgctcccgttcagtataagtcacatccatggaatgatgatgagactgacgatgagcaatggccttacaaagtaaagtttgaaggaacggacttgcttggcaatttctctattgacgagacggctatgcctaaagatattacattgacattcgatgtgaagtgcaatgccggttccgaggattatccacaaggaacggtggacctgaaaacaaataaagatttggcacaggcgtttgtcatgaagcctgccgtgttggaaagtaaactggccagtgtaggtacagaacctgccgaggacaaagtggttatcgcactcagtcagactgacggcacttttgcttacacttctactgccaataacggattttggtgtgaagccaatggcaacgtaggcaactggggtgatacggcaccggtctatgtagaattcagtggactgaccatgacatacggacaccggaaaggagtaagtgttgccggccagaaatatatgttgaaacctactctgatatataccagaaatggtgtacagtataaagcgactattgtgttgaatatgcaattttaatagctgtttacatcgtacacctccaagaggataaaaaaatagtctaaacgaatggaagaatagtacaaccgcctaactgtcaaattcataaaatgagatttattggacgattctgccattacattatattatatcttccctttcttgtaatttttttattttactttgcaagtgaacaacgtatataaccgatagattatgaaaaacaacaagaaactctgtcttgcaattttatctttgcttttattgattagaaatgcttcatttgcagccaaggaaaagaaatatgtactctcttcacccgatggaacattgaaagtggaaatcagcgccggaaacgaactggcctaccaagtgatgcatggaaatgatacaattctctcacactctaatataggtttggttctggaaaacggaactatagtaggtaaaactccccgtatcacaggggaaagaaggagaaagataaaggataacatagaatcacctttttaccgtttcaaggagttcgttgcaacaggcaacgaactcgacttgaagctgaaaggcgggttcggaatcatcttccgtgcatacaatgagggagtcgcctatcgattctataccacacaatcttcggatatcattataaaggaggaacaggccgagtttaattttaaggaagattatacggcttatcttccttataccaccaatgataaaaaaccgatggtgatggcttatcagaatgtatatgacatcactcctctgtcaaaagcacagcctaaactggcttttcttccggttaccgtggattgcggcagcgtaaaactgaccctgttggagtcagatttggaagcttatccgggcatgtttgtgcagtcacagcagggaaagtatggattgaaaggtgtctttgctccttatccggctaaaacagacttttatccttggcggaagcaggaatatgtaactgaaactaccgattttatatcccgtagccgtggctcccgttcctatccgtggcgtgtgttggccattacggagaaggatacggatatgccggtcaacaacctagtctatgctctggcttctcccaaccgtatcggtgatacctcatggataaagacaggcaaagtggcatgggattggtggaatgactggaatctgaaaggagtgccgtttaaagccggtatcaacatggatacgtataaatattatatcgatttcgccagccggaacggattggagtttattgtgttggatgaaggatggtatgccccgaagagcggggatatgctgaccgttattcccgaacttgatttgccggaactgatagcatacggcaaatccaaaggggtggaaatagtgctttggacggtgtttaatgtactcgacagccagttggaagcagcttgtaagaaatatgcggatatgggaatcaaaggttttaaggtggatttcctggatcgtgatgatcagactgccgtcgaaatggtgtatcgcatcgctgagatgacggcccggtataaattaacccttgatctgcacggcatttacaaaccgacaggtatcaaccgtacctaccctcatattatcaattttgaaagcgtgttcggcatggaagaggtgaaatggacggatatcaagaataatatgcctctttatgatgttactttcccctatatccgtatgatggcgggaccggtggattatacgccgggagctatgcgcaatgccacgaaggcagattggcgcgctatgtattacacaccggccagcatgggaacccggtgtcatcagctggctgcctatattgtacacgattctccttttaccatgttgtgtgatgcgcctaccaactatctgaatgagcaggaatgtgtggatttcatagcttctctgcctgtggaggtggattctacttttattgcttcgggcgagttgggaaaatatattgtaacagtgcgtaagaaggatgtgaactggtatatcggtggtatgaccaattgggatgaacgtgatgtgcagctcgatttctctttccttcccgaaggagtgtcttatacggctgttttgtttaaagacggtgtgaatgccaacaagcaggccgaggactatcggaaggaaaccatccggattgataaggacagccggttgactttgcatctggcgtcgggtggcggattcgccatgaagttggagctttgccctgttcacggacaggttaccggtattcctgaagggaaaaatattccttctttctatcagaaatacatagagacagaaggtctgtatgtcacctcttctggaaaggtgagcgatgaggccttattgaaagcttgtgatatcatcagtttgatgttggcaaaacgtccggatgtgaaggcacacatggtgaagaaaggctgccacgtcatgataatcggtaaagatgaggaaacttgcgatttgccggagtttgcccatatctgcaattgtgaggacagcattaaatattggaactggcgtgcccgtggttttggcggagcaccggaagatgaattttcatccagttgcggagaagagaatctgctggcattgccgcaggataaatatgtaggtgagaatatcctgattcatgagttcgctcaccttattcatacggtaggtatagtgggagtggagccagactttaatgagcgtttggaggcacttcgtcagaatgcaatccggaaagggctgtgggaaaagacgtatgcagtgagcaataaagaggaatactttgccgagtgcgtacagtctttctttaactgtaaccgctatgccgaacctgcaaacggagttcataactgggtgaaccgccgcacgaaactgaagacgtatgatccggatatgtatcggttgttgcaggaatatttttatgagatagaaattcccattcataatgtggtgcatgaataagcgtcgcagggacaaatagaattttgctatatagagatgaataagatacgattggttgttgcttccttattgttgggagctgctacaggctttgctcagaagccttttaatgcttcgggtacggggaatcccattattcccggatattttgccgatcccacggtgaagaagtttggcgatacgtattatatgtatgccactacggatggcagtggggccggtttcggtcctgcacaggtgtggaccagcaaggattttgtaaactggacgttaatgcccatgaactggccggacagtcattggatatgggctcccgatgtgatgaaacatacggatgggaattattattatttttattgtcagccctgtatgattcattgcggggtcagtgaaacgccgcgcggtccttggaaaaatatattgggtgaaagtgaggctgttcttgtacccgaccgttttgtgacgaatgccattacattggacgggcagacctttgtggatgatgatggttctgtatatttgtattgggggacttgggggatttataaaggtttcggttgcggagccggaaaactggcttccgatatgaagagttttactgaaacgcgtctgattccgaatacggaagccacggatttttttgaagcaccctttgtgatgaaacgaaaggggatctattattttatgtattcttcgggttcctgtcacgaccacacctatcgggtgcagtatgccacttcggacaagcctatggggccgtacacctatcggggatgtattcttgaaaccaatgccgatggaacaattcatgggccgggacatcatagcgttttgaaagaaggcaatgaatattatatggtctatcaccgtcatgataatccgcattccaaccgcggatttcatcgtcagctttgtgtggaccgtatggagtttgccgaagatggaagtattaaatcccttattcccactcatgacggaataggtgcattggcatcttctgtagtgaaatcaaaaaatctggcattgggtgctaaggtgagggcttcttctttttatgatgccggtttccgtcccgaatatgctgtagatgataataacgggactttatggcgtcctcgtggcatgggacaggagtggatagaagtggatttgggtgttgcccagcagatacaaactatctggactcaatttgagtatggcacacaattttatcaatatttaattgaaacttctgtcgatggcaagcattggtctgttttcgctgataagcggaataatcgtctggcaggcagcccgatggtcgattttggcaaggtgaaggctcgttatgtccgccttacctttaccggaggacagaagaacggatttggcggggcggtctggaacttgaaaatctttgatggggtggaagcatcggctccgcaacaatggctgggacttaccgctgccgattggaatggtcgtgaatggcagaacaatgaagggatgctgggaggggcttttacattgaaggaaggttcggcacgcacacagcgtatcggtggacgcgatgcgttggtactggaaccgggaactacattggagtatagtcatccgttactctcctcgtccaaagagcatacagttagtgggttggtttacaggtcaggtaaatggcagagttatgaagcggggtcgtgtctttcatcaggagcgattacgctgcatagttccaccgaacctttggtcattaccaatttccgttactacaattggaaacaggaagcagcggaaaaggcatacgatgcggaaacggatatcgtgcgtctgcctgtagccgatcagcagaaacatgggctggtggtcagtctttctgccgatgattttgtagtgaacgatacggttccttatctggaaaaccgaggagtaaaagggtattttgaagcccggaaattacctctcgttgtgaaagaagtgaaagggaaaaaggcatttcattttgagggtactcaggtctatacttccagttttatgcttcctgccactttgcaggataatgctccttataccttggaggcgtgggtactgaatgattccattagtgaaaatgaatgtgtggccgattttactacctcgcatgatgaattggagaaaatcatgttggtcaacggcacggagcctcgttgtggagtaatcaatcactatggctggtatgaagatgcaggatataaggacatgaaggaattggcaggaaagtggcagcacatctatatctgctttgatgggcggatggaacaggtttatatcaatggaaaattagtcagtgaaaaagatatccagttgctggtgaaaccgtcacaattcatcacattgggacgcaatgccgaaggagactggccctttaccggttatctgcactcattgaaattatgggatgaatatttgccgttgaaagagtgattcccccttttcctatgaccggaatatgtatttttgcaaaaactatgataaacaattaaatgatagaaccatgaagaaacttttagtcactgctctgttgactgctaccgtagcaggcggaacagcgcaagtaaaaaatcagtcgcacggctatcctatcgaccccgtacctttcacttcggtgaaagtaaccgattcattctgggggcaacggttgaatgccagccgtgaagtaacgattcctctggcgttcagcaaatgcgaggaaacaggacgttatactaactttgtcaatgccgcccatcccagtgataccattaaagtaggcggtctggcttttgatgataccgatgtgtacaaaacgatagaaggtgccagttatctgttacagacctatccggacaaaaaactggctaagtatattgatagtgtgctggttattgtcgctgcggcacaggaaccggatggttatctctatacttcgcgtaccatgaacccgaagcatccgcatgagtgggcaggaagcaaacggtgggagaaggtggaggaactgagtcatgaattctataacttgggacacatggtagaaggtgctattgcgcattaccaggctaccggaaaacgtaatttccttgatatcgctatccgttatgccgactgtgtatgccgggagataggtacgggcgaagggcaacaaatccgtgtgccgggacatcagattgctgaaatggcccttgccaaactgtacttggtaacagggcaacagaaatatttggatcaagccaaattctttttggaccagcgcggacatactactcgtacggatgaatacagtcaggcgcacaagccggtagtggagcaggatgaggccatgggacatgctgtccgtgccgcttatatgtatgcaggcatggcagatgtggccgcactgacaggggatacggcttatatccatgccatagaccgtatttgggacaacattgtgggcaagaaatattatattaccggcggcatcggcgccaccagcaatggggaggcttttggcaagaactatgaactgcccaatatgtcagcttattgtgagacttgcgcggctatcggtaatgtgtatgtcaactaccgcttgttcctgcttcatggtgaggcaaaatattatgatgtgctggaacgtactttatataatggtcttatttcgggcgtgtccctggatggtggcgggttcttctatcctaatccgttggaaagcatcgggcagcaccagcgccagccttggttcggctgtgcctgttgtccgtccaatatctgtcgtttcattccttctttgccgggatatgtgtatgcggtgaaaggtaaggacgtgtatgttaatctgttcatgtccaatacttcgaacttgaaggtagagggcaaggctgtttctttggagcaggctactcattatccttggaacggtgatgtcactatcggtgtcaacaagaacaatgccggacagtttacaatgaaaatccgtattccgggatgggtgcgtaatcaggtagttcccagtgacctgtacacttattcggatggaaagcgtttgagctatacagtgaaagtaaatggagaaccggtacagagtgaactgaaggacggttatttctgcatagaccgccgttggaagaaaggggataaagtagctgtccatttcgatatggaacctcgtacggtgaaagccaataataaagtggaggcagatcgtggacgtatagccgtggagcgtggcccgatcgtttattgtgcggaatggccggataatgattttgatgtgctgagcgtgtttatgaaccgcactcctcaattcgaggtggttgaaaaaccggatttgctctatggcattaaccagttgaagacggatgcgcagattctgggctatgacgacagaggtcgtctgacggctactgatgtgaagctgacgttgatcccttactatgcttgggcacaccgcggtgcaggtgctatggcagtgtggttgcctcaggaattaagtgcttcccgtccgactatgcctgctacgctggcatcggaaagcaaagtggatgcttcgcataaggtgaaatccatttccgccattaatgaccgtctagtaccgaaagatgagaatgaccgttccgtaccctattaccattggtggcccaaacagggaactaccgaatggatatcctacgagttcccatccgaagcaactgtttccagtgctaccgtatattggtatgatgatgctccttggggaggatgccgcataccacaaagttggaaggtgtactataaagatgcacaaggccagtggcaaccggtgagtggagtggataagtatggagtggaaaaaggtacggggaatacagtcaattttgacccggtaaagacaaaagcggtaaaactggaggttgttcagccggccgataattcatcgggtttgtttgaatgggaagtgaaatagaataattcaaaatgaaggttggtaagttaggttggctggtagccatgttccttagtgggggcatggctgtcgctcaaggtacggtcgatgattatcggcgtgcttatgcattgaaagagaaattcagtgcggacaaagttttctattccaatgtcaatccgcaatggatagagggtacgcatcaattctggtatgtgcggaatacgccggacggccgcctgtatgtatctgtggatgcggataagaaagctagaaaagaattgtttgattctcatcgtttggcaaaggcgttgggtgctgcatccggaaaagaggtcaagccggaagctcttgcattggggcgtttgtcggtcagtaagggattggatacgctgcgctttgtgtttaataatcaacgttggatgtatgcgtcccggaaaaatcagctggtcaatgaaggtgcggttcccctccttctcaggcaaaagcattggatggaggtggatgatgagaagacggcatcaccggttccgtctcctgatggtaaatggatcgcatttattaaaaatcagaatatctatgtaaaggaggtggctaccggaaaagaaaagcaactgagcttggacgggacactgggtaattattattcagcctacatccgctggtcaccggacagtaagaaggtggcttcctgcaagatccgtccggtggaaaagcgctatgtttattatgtggaatcttctccggctgaccagcttcagcccaagcttcacaaacaggagtatgcgaagccgggagacgaacttccttttaaagtgccctgcatctatgaagtggaaagcggacgaagcattattccttctaccgaattgttcgaccggcaatatgaagtatatggtcccgaatggaatcccgacagccgtgccgtgacttttgaatataaccagcgcggacatcaggtgtacagagtacttgaactttctgccgaaacgggaaaagtgcgcccgttggtagaagaaaccagcgatacatatgtgaattatacccgtcatttccgtcatgacttaaaagacggcaagcagatgatatggatgagtgagcgtgacaattggaatcatctttatatgtacaaccgtattaccgcacagcccgattatcaaattactaaaggagaatggtatgtacgcgaagtgctttgggtagatgaagataaccgtcagatttatttctcggcaaatggtatggaagctggtgaagacccctatttcatccgttattaccgcatcggttttgatggcaaagggcttacttgtcttacccccgaagaagggatgcaccgtgcctggttttcgggagatatgaagtatttggtagatgtttattctatggtggacaaggttcccgtcgctgtgttacgtagtgccagggatggcaaagtggcgatgccgttggaaacagccgatataactcttttggaggccgaaggctggaaagctccggaggtgtttgttgccaaagggcgggacggcaagacggatatgtggggattgattgcccgccccaccaactttgacccgaacaagaaatatccggttatcgaatacatttatcagggtcccggagaccagtatgttccgaagactttccgtccttatgactggaatatgacttccttggccgaacttggttttatcgtcgtaatggtcgatggaatgggaacttctttccgttcgcgtgcttttgagaatgtatgttataagaatttgaaagatgccggtctgccggaccatattgcttggattaaggcggctgcacggaaatatccttatatggatgtggacagggtaggtatttacggttgttctgccggtggtcaggaatctacaaatgcagttttgctttatcctgatttctataaagcggcttattcggcttgtggttgtcatgataaccgtatggataagatttggtggaatgaactttggttgggctatccggtaggagatcaatataaggaagggtctaatgtggaaaatgcacatctgttgagtcggcctttgatgttagtggtgggagaactggatgataatgtagatcctgcctctaccatgcaggtggtcaatgcattgataaaggcgaataaagattttgaattggtcgtgattcccggagcgcatcatacaatgggggaagattttggcgaacataagcggtatgatttctttgtccgtcatttgatgcaggtgaatccaccgaagtgggatgagataaaataggaggagtgaggtttgtagctgtaggagtttgtcagttataataaatataggtggcagtgttatggaggacaagtccatagcactgcttttttatgtaattccgtgttttcattgatgaatgtgtcttttttgttcattatgttgtaattattggttgaactaatttttttcaatacaaaaattaggttcagtcaacagtattatttttatttgtggcgtatatagtataaaaataaaccaattttctaatactaacattaaattataatggaaaacattactgttaatgtatttgatgatgtgctttatttagcatgggaatttgtatatctaatatttttcactcgttttgtgtgcgtacacggaaattataagaatgcgtgtgctattttaataagtatctattattctcataaaaattataattgtttccttttagaatagaatataaataacaatagtgatttatattatttcacattcacggaaaaaatggactttaaatttttgtttaacttaatattttattatgaaatttacaaatgaattaagaggagtgaaaagcagacttcttctgttttcagtgctgttactgataccggtgatgatgtttgctcagagcattaccgtaaaaggtactgtacttgattcggcaggtgaagccgttattggagcttccgttgtggagaagggaaatccttccaacggaaccataactgattttgacggaaagtttactttggccgtgtctaaaggaaaaagaattgttatttcttttgtaggttacgaaacgcaagaagtggatgcggttaccggaaaagaactgacaattacgctgcaagatgattcacaagcgcttgaagaggtagtagtgctgggttacagtagcagggctcgtaaagatctgactggctcagtaggttccgtgtctggtgtgaagattgctgctgtaccagttacttcagccgctgtggctttgcagggaaaaatagctggtgtgcaagtaacaacggtcgatggtgctccaggggcagatattaacattcgtgttcgtggaggtacgtctgtgacccagagcaatgatcctctttacattgtcgatggttttcaggtggataacatcaatgatattcctcctacagacattgcttctattgatgtattgaaagatgcttctatcacggcaatctatggagctaagggcggtaatggtgtagtggttgttactactaaatcggccaaagctggaaaaatacaggtaagtttcaatgcccatttgtctactagtcatttgtctaaaaaattagatttaatgaattcagcagagtttgcacgttatcaatatgaatggtcggcgtgtaatggtagccgttctagcaatgccaaatttttccgtgctaattttggcaatccgcaagatttggatatgtattattctttgcctactcatgactggcaggatgaggtaatgggagagaatcctatcaattattctactaatgtaactattggtggaggtacagataagatgcgcttcactgcttctcttactcaaagcgaagataaaggtattattatggggtcgggtgtgcgccgtaccaatttgaatatcaagacagctattgatataactaaaaatttgacattgcatatcaatcctaaatttacgtttcgccgtgatcaaggagctggaggtgataatattggtacaggcggtattattgatgtactccgttatagacccactaacggattacgtgaattcggatatatagatccttcttatgctgaccctgatgaagaagcattgtttacttatactaatccgaaaagtgatattgccattaatcaacagaataagtatgcttataactatactaatgctatttcattggaatggaagcctgttaaaggattggtgcttcgtacagaagccactcttagtttaaactggaaagatcaatatcgtttttggggtgccttgacaggtgaaggtacaaaaaataattcgttgcctgtagcaagtattcagaaagatcagtcttttaaatatatttggactaatacggcatcttatggtttttctattaaagataagcataatttttccatgttattggggcaagaaatttatcatagccaaaataagaagaacttccaaaagaatcgttatttcccacgtgcatttgaggctggacaggcttgggataatatgggattcggtacaccgcaggagtcaacttcatcactttcgactccagatcgcactgcttctttctttgggcaggcaagttataactataaccacaaatacttactctctgtaactatgcgtgctgatggttccactaaatttgctccaggtaatcaatggggatatttcccttcagtatcaggtgcttgggtgctttcagaagaaaagtttatggaagatataaaatggattgatcagttaaaacttcgtgcagctatagggttggcaggaaataatcgtatcagtgatgatatgtggcgttatttatatactgttaattctaccggcggacctggatttggagaagcaactcagtttggagagcaatggtatggtaatcaagggggtactacttttgccaataaaaatattaaatgggaaactacattaactcgtaatcttgctgctgatatcacgctttttaatggtcgtctcactgttactccggagatttattggaatacgacgaaagatttactttataaatcggacattccttcagcaactggttatgtaagtcagatgcaaaatattggacaagtaactaataaaggggttgaattaactatatcaggagatattctcagtggcagggattatgtgctttccgcaaatctttctttaggtatgaataaaatgaaagttgataaattaaatggtacagacaatgtgatttgggatcagaataaccgttggaaatcaagttacaatgattattgtttgaaggtgggtgaccaagtaggacttatttatggttttgtatatgatggtttatattcaatggatgaattctattttgatcccactaataacttgcaagcagtaccttggggatcaacggccgctgaaaacggaacttcgaaagatgcacctattatggatgcagacggtgtggaacatccaaaaacaataatcaatcagatttcaggagattctaattcaggcatagctactctgccgggcaaagtcaagttcaaggatttgaatggtgacggatatatcacagaagatgaccgtactgttataggtaataccaatccaaaagtgcagggaggttttggattgagcggacaatggaagggttttgattttgccatgaacttcaactttatgcttgattttgatgtgaataatgcgacagcttaccagctttcctcatccgaaagcaataagaataagttctacaatgtgctttccacatttgccgacaaaggttggcgttatacccgtgatggtgacggcgaatgcttgtacaaatgttactatattgatggttcgttggatatgtaccgtgaattaaacgaaggtaggacactttggaatccgacggatgtgacaaaaaaaataactcattcctattttatcgaggatggatcgtttctgcgttgtcaggatttgactgttggctatacgttacctggaaatctgacttctaaatgggggatttcgaaagctcgtttttatgtgtcagcctctaatttgtttattattactgggtattcgggttatgatcctgaagtggatattcagacaggattaacttgtggtatggactataaccgttacccacgtagtcgcagttttgtactaggtactaatattacattctaaatttgaaagcacatgaaatttaaaaatactttaataataggattagcaactttgactctaatatcatgcaatgatttccttgacgtggattctccatcaagttacaatgaggactttgtgttcagccaggaaacagaaattagccgtgcgttgaacggtgtttatgcttctatcttggtaggtgatctttatggcagtgcctatcagaaaacttttaatttgaacagtgatgttgatatgcagatgtatacaggtaatgtagcaacccataatagctatgcacgttttgattgtgacgatcaaggtggcgaaattgataaatattggagagcttcttataaagctattgaagatgctaaccgttttatccggggtgtagaaactggtccgctttataatgaagagaataccgctgttatgcagatgttgggcgaagccaagtgtcttcgtgctatggtttatcatgatctggtagtgatgttcggggatgttcctttcactttcctgccagcctcacaattaggtgataattatgtgattcctgtaatgaatcgcgaagaaatccaaaataaacttattgaagatttgcaggatattgctcctaagatgtcttcttctacaacaacaacagtagaacgtgcgtctaaggagtttgcttgggcattaattgcacgtattgcattgactgccggaggttattcacttcatccggataaaaataatgcaaatagttatggtgtgatgaaacgtccggaagattatcagaagtattatcaaatcgtaaaagaatatactagcctggttattgcttcggggacacactctgtaggcacttcttatcaagatatttttaccaaggaaagcaattttgaaattattgctaaaggtgatcctatttttgagattccttttgctaaggagtctacaggtaatacagggtattctcaaggacctacatcaaccgttaatgaaggaaagacattgggtaagaatgtatggggagaatctaaaggtgatatacgtttgagtgctttttaccgttattcattcgatgagaatgataagcgtcgagattttattaatggactttggtattatggtaacagtgctaataatgctactcaggattcttgtatgattcgtgcggattatactgtccataataataaatggtctaaattatgggcgaatgcgggacagtttaccaatttgagtgccagtaatacaggtattaacttcccttatatgcgttatacggatgttttgttgatgaatgccgaagctgttaatgagttggaaggacctactgccactgctcaggagtcacttcgtcaagtccatgcacgggcattcgatgaccaaagtgttgtttctgcctatattgctcaggtggcttcttctaaagaaacttttttgaaagccgtgcttgatgaacgtaaatgggagtttgcgggtgagaatatgcgctggagagatcttgtccgtaataatctttatggacaggaaattgtttatagttttttgcgctatctttctgtaggaatgtctaatgccggttcttctactggcttcgaagatgatatagctgaacatgatggtagtgcttatttggatgatcttcccgaatctatgtattaccatgttcttccacaaacggttgaatggcgtgtggatgtaaatcaagtttatggctatccttatcccaataagatattggatatgctctatatttataatccttacaaatcagctaatcaaccagcgacagctttggtagctgttgatggagcaacttggaagatggcggaattttatcagtggagtaatgattcggagcctactaaccaatgtaaatattcattctatggatatattcgtcatacagaacaaggaatgattgtgttggtcaaagatggaacagaatcaccactggatggtaattctgttcctgaggtgaatgatttacctcctgtacgttatattttaccttatcctaatgcggctatccaacgctcagcaggtgtatacaagaactattatggctataaataatttataaaaggacagaatgatgaaaaaaatatttttatatgcattaatgttattttcaggtttctcatgtatttcgtgttctgatgatgagaaaggaatggcaaatatagatagagaatggatgactatgttcatttgtgataataatagaggaaaaggggatgactatgcttataattgtaaagcagagggaccgaatggcaatgatattcatctttattggtatggagtgaataactgtgcgggctaccagattcgtcaggcactacagccaaatgtttcgggtggtgcagatgcttggggtacatctgccgaaaacggtcttttgttactagataccattgtaggaccggaggtccttgatttagttattaaagatcaacagtattccactgattatcgttttgctattcgcgtgttatcaacaaaagatgataatgtgactgatttttcacatgcatccaaatggtatggacatggtgatggcagacagtgggcagaatggatgggcattaccacttctgatcgatatgcaactccattctgtgtctatgtagatgcttctaagactacacagactactatgcgtgtgatgttgaatcgtgctttcaaaactgtaacagaaggggtatcagatgatgataaggctatttatcgtgaaaaatttcagcttgatgctaacgataattttgtttatcagtggttggaagtagatccgtctcctaataatcctgaatcaacagtgaatgaaaaatggagaaaatataaattaaccgatgaggattttgaaaagggatatgtagatattgacggacttcagaaaaactctgtttatgtgattaatgttcgcaacgagaatgtgaaggtaaaatgggacgcatattacaatacttgttctgcccgctcagacggagaaccgggagagcctattttagtaactcatgacttaagtgctccaagtcgtgaccggtttgattcagatgaagcttatcaaaatgctttgatacagcacgaggctgctctgaaatacaatgcaatgcgtattgatttccttttaacagacttcatttccgatgtaaatttagccgaaggacagacttattatttggaaggtggaaagacttattgtatgtttgataatttaactacctgcaaaggttttgttcttcgtactcgtcctgaggatgtagcagcaggtaaacgtgctaaagtattgttaggtggtatgcatatgacaggtactaatgttaattctatgaatttgatgttcgggcgccagccacaagctggagaaggaggagaaatttatatgaagatgctcgaattttatgatattgatttcgattgtccaatggctcttacttatggtgataatgttgccggtttgggttcggctacaggtaattatttcattaatatgttttctaatggtatggctgtacatttggaaagttttgtggtgaaaaattgtactttcaagcgtctggtacgtgggttcattcgtgagcaggggcctaattacaaaatttgggatcatgtcttgatagaggataaccagttctttgactgtggctattatagtaatggtgccggaggttatccatggattgccggttccgggaataatgcgaattctaatttatataaggactttgtggttcgtggaaacactttctatgattgtccgttcccttcatttttcagtgaaaccaagcagagtgcatggaagggaggggcatggaatataacgtttgaaaacaatactttggttaactggaacactcgtgcagcaggaaatattttcaatatgcgtaatattccagatggaagtacttatacggtgaaaaataacctgattgttttgaccaagcaggacggtgatgtccgaaagatgactatggcaggagctgatatccgtaagacaatgactatggcagacggtacagccggacatgtgacattgaattttgacaataattattctacaaatacttttttatccaacggacaaatttttagcaataatccatggactgcgactaaaaataattttggcaccttggtcaacaatggttctgctactttaaatggaacattggaagttcttgtagatgatatttctccattagaactgatggtaagtccaaatccaccacataaggctactgctgataacgatcaatatatgcatcgtgcagatgcacttgatggtacggctggagagcatggtgtaaacttgtattacaatcagacaggtaaagttatggagtcaaaaatttatcagttgaacattggtgcggctaaatggcgtaatggttctgttagatagcagaatggggtttgataagttttatagttattataatgtgaatgtcttctgagaatctttggattttgaaagacagatatttgatagaaaagccgatctgtgatagataggcttttttatgtataggtaaaggggcagagtatcaaaaattgtataggtttgatgatgtctgtgcaaaatctgcctgaaaaagaccaaatattctctgtattcagattggaaaacgcataattttgtttgctggtttttatcaaaacatataggaataatgaaaaatacattcaaaaaagtgtttattggctttatggcttttgccatggtaaccggctcctttgcgcagcaaagagctcataaaaaggataatgagtcgtatcctaaggaatggaaacaaatagcacgtatggagcaggattctttctttctgacagatgaagctcggcggattgctgaaaatgtattggcttttcaacgctgtacgggcggttggccgaagaatatagatatggcccgccgcatgaatgataaagagctggctaaagtgataaaggataaatcacgtcgtgatgattctacgatagataataatgccacaactgcccagatgatttttttagcccgtctttataggcagactaaggatatacgttatcgggatgctttccttcagggagtggaatatttgctgagtggtcaatacgaaaacggaggatggccgcaattctggcccggtccgcgtggttatcaggtacatattacttttaatgacgatgccattgtcaatacattgaatatgatacgtgatatgatgaatcacaaagcgccttatgaggatgatttgatagacaaggctttgtgtgtacgtttgggaaaagcctttaataaaggaatagagtgtatactggctacacaaattataaaggatggagaaccttcagtgtggtgtcagcagaatgatagggaaacattgaagcctgcaccggcacgtgcatatgagttgccgtcttattgttcggcggagagtgccggaattgtgcgtctgctcatggaattacctgcacccgacgcacgtgtgaagcgggcggttcacggagccatgaaatggtttgacaggtataaacttaccggtttgaaatgcgagcgtatcgtgctggcaaatggtgagcgggatactcgtcttgtggaagatcctcaagccaagcctatttgggcgcgttattatgatttgaaatattgtgaaccgtatgtatgtgaccgtgatgggctgccacgtcgccatttggaagaaataggaacagaacgtcgtaacggatatagttggtacaatagcagaccggctgagctttttgccatatacaatgcatgggcggacaaatatgatccgaagcataaagtggcaatcagtctggcaaccaaaggagcgaatgaaaacgggcttattgaaatgtatcgtcgtcccatggcagagcgtacggcttttgatgtggtggtaaagccgggagagagtattcaggcagctattgaaaaggctccggaaattccgacagtaccttttaaaatcttattgttgaacggaacgtatcatcaaaaagtgattattgacaggcctaatattgttttggtgggggaaaaccgtgacagtacgcggattgtcttggctgaaacagcccagacacgtgccatcacggaatatcatggacgtccggtaggcaatggtgtcattgtgttgcaggaaggtgcggatgattgtgttattagcggactgactgtttacaacaattacggaactgccgttgaaaatacgaccatccatcagatggcgatttttggacgtgccactcgtaccattatcatcaacagtaatgtatgggccgatggaaacgatgccctttccttgtgggcacccggaagcaatggtatgtattatcatgccgatctctatcttcgttgtccgggtgtggattttctttgtcctcgcggatggtgctatgccacacgctgccatttttatggtgatagccgtgccatgatttggcatgacggacgaggtgacaagaacaagaaactggttattaccaattcttcatttgatgctaagacaccgacacttttaggacgctatcatcatgattcccagttttatctcatcaaatgtaaaatgtcgaagaatgtgcttgacgggaatattcattatgcttattcggataaagtgcttgatccctgtccgtgggggctacgtacctattattatggttgtacccgtgaaggagggcatagtggctggttaaacgataatttaaaggaggcggagaatgctccggagttttatggcgttaccgccaagtggacattcaatggcaaatgggaccccgaacaacgtatcagagatctttggaatgtgttggcctactaatttaacagtttgtaatatgaaaatgacccctgttttatgctgtattgtttttttgtttgtgtcaatgttatctgctgttgcccgacagcaggagaagccccgggttattgtcactacggatggtgagattgacgatcaaagttctatgattcgttttcttatgtattcttctgattatgatgtcgcaggcattgttcaagtcaatggggtacagaaagacggacatagtaaagataaatggatcgaatcacaaattgccaaatatgcggaatgtctgcctaatttgaggaaacataatcccgattatcccgatgctgaatatttgctaagtgtcttggcggttggtaatgagaacagagaggacttgcataaattgcctcctttactgtctgatagcgagggggcacagctcatcataaggacattgcttgattctgatccgaggcctgttcatattttagcatggggtgggccaacacccaggccaatgccttatggcagatcaagcagaaatattctgctgcagaatgggcaaaagcggtatcaaaagccagattatattgtatttggtatcaggacggcggtggaaaatggatagaacagaatcttcctgaaatcattatttatgaatcgggcgcaccggatcatgatggaggatggagatatgtatgggattacatgagtgtggattattattttaagaacagacttagtaaaaattcaaaagagttgcaacagatcatggataaaccttggttggctgaccatattaagaatgggcacggaccactgtgtgccgcctatcctcaggaatataccagtgagggggatactccttcttttatgcctcttatacgtaatggacttgaacagcatacagactatacattaggaggatggggaggacgcccggagtataaaaatggcaatcacatgcaagatgggaatgatttgaaaaacggtgtgccggattcgcattatactttccagcgttggttgcctgctatacaaaatgactgggcggctcgtgccgactggtgcgtggctgatgaatattcaaaggcaaatcatcaacctgttgcccggatattgggagaaagtgtacgcacagtccggccgggagaaaaaataatactggatgcctctccttcatttgaccctgataaaaattcattgtcttaccaatggtggcaatatcgggaagcaggcagtgtgcaaacaaaggtggctataaagcacgccgatgagaagagggcggagataattgtaccggataatccgggcaaacagttacatttgatacttgaacttacagataatggaacgcctaatctaaagtcttataaaagagtgattctgaatgtgaattgacttcctgtatgaattttcatctgtactgtcatgttgttttgaacaggaggcctacacttcttccatccgctccagctcccatccccggaactgtatgataatacagtgcagcttcgtgttctgcaccaactgccgtacccggggtgcggcagcatattcgttaatctgtttcaccgcttcctgccattgcgtccgggttttctcttccgtgtccttcaccgacagatatttcagttcaagaatatagctatgcttcacctcgtagcgcatcaggtccggcatgaggaagaggtcgcagtaaccgtggctcagttccatttccggagccatcaggtaataagcgtttacgctgaggtaggcggtgaagaaaccctgtatatttcgctcgccttccatggcactgcgtacagatgaattttccttgtaggcatgggcaatgaattccagtgtttcgcgccaatggccttcgtaagccatttcatcgaacaggtccatcaaattgttcaggttgatatggcgtttgtcctggtactcctccagcatgaattcgtaatactgtttgcgcacattatagttggggatactcaataccaagcggctgccgcgtgtggcagtgatggtcaacatgccataatagaagagcaggctggggaagatttcgggtttggcgatttccttggccgggaaggtggtgatcaggttggtgataatttgcccttcttcggtgattttacgtaatacgcccttgcggttgccgtccagcttgtccagctggattagtttcttcattttgttgtagtccgtacgggtgttgggatctatcatctctttaggagatttgcccagcgtgatgtaattgcgcaggtagtaaagtaccatgtcgcaattgaacattttcgggtcgcgttccaggctttcttctgcgaaacagtaattattataccacggtttcatctcccggatcattgcttcgatgtccgcgtcgatcgggagctgtccggcatccttataatattggaacatggtgcgcacgtccgtttcgctgaatcccagcatcatgttgaactggtagtcggtactgatattccagccgatgttgaatccgctggtcaggtcgtccaaggtgacggggctgacgccggtcatgaagatgcgctcgaacatgcctttgaatttcttgaatatttcacggtagaatccgctggcatgggtcagggcatgataaatgtcttttccctgctcgttcagaacgatgttggtaaagttatcgtattcgtcgatgatgaggtaaagtttcattccggattcagccgcatgcaggttcaggtagttcaacttgctgacaaagtcgggctgttcttccatcttttgtgcaaatccgggaaaataataaggctcatacactttgccgaacaggtccatcaccatgccgcaatagttattgaaattttcttccagtgaaccgcttccgccactggcgcgcgagaaatcaagatacaccacctgaaattttccttgcaggggggtggggcggctgcctatccatagattgccgaagcgtttctggaacttttctttttgtgctatgtcataatacgcacgcagcatactcaaaaagatactcttgccgaagcggcggggacggataaagaacaggttccggggctgtttttccagcaaaggcagatacatggttttatctacatagtacatgttctgctctgccacttccacgaagttggcaatgccataggggatttcttttatattttccatcattgcttctgttgtctttagttcgtatccggatgccaatacaacaaagatagtctattcttcctgaaggaacaaaggaaataaagtttttaatagaaagaagatgttcaaggtaagttatgcgcttgaaagaaaattctttattactccccgctagatttctactggggcgaaaaaaagggcgtgccaaaagccatgtttattatttagaccttttggcacaccctcttggtggattctgaaatcagtttcttatttcttctctgccgcggcatgtggatagtcaatcgtataatgcagtccgcgactctctttccgttccattgcctgacgggtgatcaaatacccgatgttaatcatgttacgcagttcgcaaagttcgcgtgaagccttacagcgtttgaaaagacgctcggtttcttcatataaaatatccaatcggttccaagcacggattaatcgcgtattactgcgcacaatacctacataagcttccataatctggttcacctctttcatgctttgggttatcagtacccgttcttcattgttcatggttccttcatcgttccattcggggatatcctcattgaagtcataccggtcgagtacatttagtgcatgtttggctgccgcgtccgcataaaccactgcttctatcagcgaattggaagccagacggttacctccgtgcagaccggtacatgaacattcaccgatagcatacaaacggttgatgctgctctgtccgtccagatcgactttgatacctccgcacagataatgagcagccggagccacaggaatatagtctttagtaatatcaatacctaggctgaggcattttttataaatattggggaaatgtttttttgtttcttccggatctttatgcgtcacatccagatatacatgatcttcaccgcgctgcttcatttcgttatcaatggcacgtgctacgatatcacgtggggccaatgacaggcgtggatcatatttttgcatgaattcttcgccactttgattctttaagacagcaccgtaaccgcgcatggcttcggtgatgaggaaactgggacggtctcccggatggaagagggcggtgggatggaattgtataaattccatgtcctttactgctcctttggcacggtacaccatagcaatgccgtctcccgtagctaccagtggattggttgtattgcggtataccgcttcgcatccgcctgttgccattacagttactttggacaggaacgtatccacttctcctgttttctcattcaatacgtaagcaccgaaacatttgatgcctggtgtatggcgggtgacgataattcccaaatgatgctgggtaatgatttctaccgcatagtgatctgtaaatatggtaatattgggatgagcttttaccgcttctatcaggctggtttgtatttcagctcctgtattgtctttgtggtgcaggatacggaactcggaatggcctccttctttgtggaggtcgaattctccatcctcttttttatcaaaatccactccccattttatcagttcctggatttgtgcaggtgcttctcgcactactttttctacagccgcgcggtcactgatccaatcgccggcaatcatcgtgtcttcaatgtgtttctcgaaattgtctactttcaagttggtaacagatgctatacctccctgagcaaaataggtattggcttcttccagtcctgctttacaaatcagggcgactttacctttgtgagctactttcagtgcgaagctcattccggcaagtcctgagccgataacaaggaaatcgaattttttaaccatgataatatgctttatgggtgcaaagctacgaaaaacctttattcattgtaccttttgctcttgtttttactatttttttcgtgaagaataaacgaaatagataatgcaagtatgaaattaaaagtgtaactttctgcatttttaaatagaataggatggaaaacaataaagaaatcattcacgaaagtgaggtaaaagaacttataattgagttgaggggtgagaaagtactgatagaccgggatgtagctaagctttatggcgtagaaaccagggatataaataaagcagtaaaaaataatgcagataaattccctgaaaattactgttttagcttgcaattatctgaaaaacaggagctggtggaaaatttccaccggttagaaagtttgaagtattcaaccgttgtccccaaagcttttacagagcgaggattgtatatgttggctactatattaaaaggtccgagagctaccgcaactacttttgccattatcgaatcattctttaagttaaggacattagtacggaatgtaaatatcatggctaccgagtatgatgaggaaaagaggaagagtctggtacaacgtagtggagaactgctgaatgaactgctgactgatgagggtgatataacagaaacggaatcttctatcgaattaaatttgtatgctttgaagatgaaacgtacagtaaagaggacaaaaaaaggataaattctctcattctgcgccgtaatgaggtcgataaacgataaatttattatctttcgggcaaattacaataagatgatgaatcgaatttttcatgtgaagatagcaggaggcacttatctgtttctgatactgctgacagccgtcatggtatttgctttctggtgtatgaaggcaatgataggattggtggtggcattggggctgatcattaccattgaacgtattatccattctacttatacgctgactgcggatggaaagctggtggtgtattatggtcgtttttataaagggaagaccattcccttgactgacattacggatgtggagctgaaacgaagttccggattcggtggaattatgccttcgaaatatgtattgatacattatgagaagaaaaatttattgtcattggttcctgtaaagccggaagaatttatcaatgcgttggtgaagcggctggagcataggatagaggaggaataaattatggagcaagtatttaaaacaaaaagagctcgtaggtggtggattattatagtcagtctggttgttctgattatttttctgaatgtgtatttggagcaaagttgggctttttcggcgcttgggggaattattatttctgtattaatgttttattcgcaatcgaaaaccatttatattgtaaaagacaatggtgttctggaaattaaaccgggatgggggaacagaatatgtgtagacggaatccgtaaagtgtcttataatccgaatgcaataggaatgcaaaaggtgaaaatagagcacgcccaaggttttgtaatgattaaccctgataagcctttggaatttgtagaagcattgagagaaatagatccaaatctgtctgttgaaggttttgaacagataaaaactaattaacccaaaataaataccatgaaatatcaaattgcaatcatcggtggaggtcccgcagggtatactgctgccgaagctgccggaaaggcaggactgagtgttgtattgttcgaaaaaagaagtctgggcggtgtctgcctgaatgagggatgtattcctaccaagaccttgctttattcggctaaagtatatgattatgcgaaacatgcttcaaagtatgccgtgaatgtgcctgaagcttcttttgatttaggaaagattgtggcgcgtaaatcaaaggtggttcgtaagctggtattgggaatcaaggcaaaactgactgcgcatcaggtaaatatagtaacgggagaagccacgattgtagataagaataccatccaatgcggtggggaaacctacgaatgtgagaatttgctgctgtgtaccggcagtgaaacatttattcctcctattccgggagtggaaaacgtggattactggacgcaccgtgatgcactggataataaagaagtacctgcttcattgactattgtcggcggtggagtgatcggtatggaatttgcttctttctttaccagtttgggagtacaggtgacagttgtcgaaatgttggatgaaatcctgggtggcatggataaagagctgtcggccatgctccgggctgaatatgccaaaaaaggaatcaagttcctgctcagtacgaaagtagtagaggtatccaaaggggagaccggtattactgtgtcatacgaaaatgcagatggagcaggaactgttgcagctgataagttattgatgagtgtaggccgtcgtccggtgacaaaaggtttcggactggaaaatctgaatttggaatggacggaacgcagatgcatcaaagtagatgaacatttgcaatcttctgtccccggtgtctatgtatgcggtgatttgaacggagtctctttgttggcacataccgccgtgcgtgaggcggaagtggctgtccatcatattacaggtaaggaagatgcgatgagttatcgtgccataccgggtgtggtctatacaaatcctgagattgccggggtaggtatgagcgaggaagctttgcaggccgcaggtattccttatcgagccgttaagttgccgatggcttactccgggcgttttgtagccgagaatgaaggagtgaacggtgtctgcaaagttttggcagccgaagacggtactgtattgggagcgcatatgttgggtaatcctgcttccgagctgattgtattggcaggtatggctattgaggatggtaagaccatagaggattggaaacgatatgtattccctcatcctactgtgggtgagatattcagggaactataatgaaacgagttttatttttctttttactgattttatctattcacttcataaacgcccagccgctatctcagcggctggacgctttactgcatgaggaagttctgaaaacatccgaggtgggtattgccgtattcgatctgaccaccgggaaatccgtttaccgttatcaggacgataaactataccggcctgcttctgttgagaagataatcacttcggttaccgccttggcgcaactgggagcggattataccatggataccggtcttcgttatcgtggaaaaatagaaaatgacacgttgaaaggcagtctgtatctgataggcggttttgatccggaatttatggacgaggatctggaccgtctggtagatgcgttggcaagtcaaggcatccgttatgtgacagatacccttgcggcggatgtttccatgacagactcggtttattggggttccggctggtgttgggacgatactccttactccttccagccctatctttcccctctcatgctgaataggggctgcgtggatgtatcggtttctcctgctcagaaggactcgttgcctaaagtcgtttgtacgccggtttccgattattatcaggttcataatcacggggtgagccgtaatccgcaagccgggaagctgaaaatcacccgcaactggctcagcaatggcaatatcattaccgtttccggaaatgtttcttatccctatactgagaaattgaatgtatatacttccaaagatttctttttccatacctttgtcagccgtttgcgcagcaaaggaattgaagcgcgaacttgcacgtatgctgattgtcctgtaacggccgacagtatagttacgctttataccgtccgaagaccactcaaggaagtgttggaaagagctttgaagaaaagtgataacttgtgcgccgaatcgatgttttatcatttggctgccaagcgttccctgcataaacgggtgacgggagaagatggaaccgatgccattcacgcctttatgaaaacagctttagggtttaacccggagaactataagatagcggacggcagcggtgtttccgtttataattatatctctccacgtttactattggagtatttgaaatatacctactatcatcgggaaatttttcttcctttctatgagtccctgcccatagccggagtggacggtactttacaaaaccggatgaagcagaccaaggcccgtggaaatgtgcatgcaaaaacaggttctgtaaccggagtcagctcgctggcaggctatgtaaaagctgctgacggacatcaactggcctttgttatcatcaatcagaatgtactgaaattaagccgggcgcgtgcgttccaagataagttttgtgatattttatctcgttgaatttgagtttttgaatgttctgaaacgtattaagtagcagattttgcatataataggacaaaatttatacctattctgaacgatttttgcagcatcggaacaagattgtttcgtaactttgcccaagtcgaaataattcggaatactataaaaacataaaatagctgcttatgaagacaaattatgaaatccgttatgccgcgcatcccgaagatgccaaaggctatgacacccaaaggatacgacgggatttcttaatggaaaaagtattttcggacaatgaggtgaacatggtttattccatgtatgaccgcatgattgtaggaggagccagacccgtaggggaggtattgaagctggaggctatcgatccgttgaaagcgccttatttccttacccgccgtgaaatggggatcttcaatgtgggcggtcccggtgtggtcaaagccggagatgccgtgttcgaactggattataaagaagcgctttatctgggttcgggagaccgggaagtgacttttgaaagtaaagatgtcaagaaccctgccaaattctattttaactctgttaccgctcatcgtaactatcccgataaaaaagtgaccaaggcagatgccatcgttgctgaaatgggttcattggaagggtccaaccatcgttgcatcaacaagatgctggtcagtcaggtattgcctacctgccagttgcagatgggaatgaccgaactgaaaccgggaagtgtgtggaacaccatgccggcgcacgtgcacagccgccgtatggaagcctacttctatttcgaagtgcccgatgaacacgctgtttgccattttatgggagaagtggatgaaacccgtcatatatggatgaaaggcgatcaggcagtcttgtctcccgaatggtctatccatagtgcggcggcaacacacaactatacctttatctggggtatgggtggagagaatctggattacggtgatcaggacttctcattgattacagacttgaaataaatcatataacttcattaatttaataatataagtatcatgaatcagtatttgaatttttctttggaaggtaaagtagctcttgtaacaggcgcttcttatggtatcggttttgctattgcatctgcttttgcagaacagggcgcaaccatctgtttcaacgacatcaatcaggaattggtggataaaggtctggcttcttacgctgaaaaaggaatcaaggcacacggatatgtatgcgatgttactgacgaacctgccgtacaggctatggttgccactattgcaaaagaagtaggtaccatcgatattcttgtaaacaatgccggtattatccgtcgcgttccgatgcacgagatggaagctgccgatttccgccgtgttattgatattgacttgaatgctccgttcattgtttctaaagcggttttgcctgcgatgatggaaaaaggacacggaaaaatcatcaatatctgctctatgatgtctgagttgggtcgtgaaaccgtttctgcatacgctgccgctaaaggtggtttgaagatgttgacccgtaacatctgttctgaatacggagaatacaacattcagtgtaatggtatcggtccgggctatatcgctactccgcaaacagctccgttacgtgaaatccagcccgatggaagtcgtcatccgtttgatacattcatctgtgccaagactccggccggccgttggttggatccgcaggaattgaccggtcctgccgtattccttgcatccgaagcatctaatgccgtcaatggccatattctctatgtagatggcggtattctggcctacattggtaagcagcctaaataattagtagatataaatagaaagaatctgcttgtgtctttgttgatacttgcagattctttgtatttttgtctttcagttcgacaaacaataaatagtatgaaaaaaatctttttagcagtcgcaacggcgttagcaatgttttcctgttcgcaaaaggagccggtgactgtcactataaccaatccgctttccattgacagaaatggggaaatggtggaaatctctatggctgaaataacaggcaaactacaattacccgatacggcacaggttatcgtattggacgagaacgggcttgaagtaccttatcagataacatacgatgatatgcttatctttcctgcttcggtgaaaggggatgcctcggctgtttatacaattgcagaaggaactccgcagccggtggatgtggttgcttgcgggcgtcaatatcccgaacgtctggatgatgtggcatgggagaatgaccgtgccgcttatcgtgcatacggtcctgctttgcaggagaagggcgagcgtgcctttggttatgatatctggactaaaagtgtgtccgaaccggtagtggaggatcgttatgacggtgacttgaaccggggtatttcttatcatgtagatcatggaaacggaatggactgctatgcagtgggcccgactctgggtggaggaacagctgctttattccctgatagtaccattgtttatccctattgttacaaggattgtgaaatcttggataacggtccgctccgattcacagctaagttggtctataatccgttggttgtaaaaggggattcaagtgtgatagaaacgcgtatcatttctttggacaaggggtcgcagttgaacaagactgtggtttcttttgacaatttgcaggaaatcactccggtggtgaccggcattgtattgcacaaacagaatcctatgggatatagttttgatgcagacgcaggctatatagcttatgcagactctacggagaatgctgccaataacaatggagtgatttacataggagccgtattcccggctaccgtcaaaggagcgtttgcccaagtgttctccgaaaaggaacggaaggaacgtggggatgctttgggccatgtgttggcggttaatgattatgaaccgggagccgagtatatttattattggggatcaggctggagcaaatatggtttcgaagccgataccgattggaataaatatttggaagaatatgcccggaagatacgtaatccattggcagttgccataaaataatacatatacaagagggtatgcgtatacgccacgaaaaaaacaaggtatttggctttatcagtcaaataccttgaattcatagccttgttccaacagccattctatggcccggggcaaggcgtatttcatgtttttctctgccttgatggagtcatggaaagtaatgatggagccattcctcacataatgttttaccttcctcagtacctgtcttccattcagcttgttgctatagtcacgggtaaccaagtcccacattacaatctggtatttatgccgcagcaccatgtactgcatccagcgcatgtggccatgtggcggacggaacaggttggtatggatcagctcgtttgctttgtccgtattggccagatagttcttgcttcggtattcgaatccccggatatggttaaaagtatgatttcccaaacgatgtccccgttctacaatcatctggaattccttgggatgcttgcgcacattgtcgcccaccaaaaagaaggtagccttgatattgtacttgtctaataaatcgagtacccacggtgtgatttcgggaatcggcccgtcatcgaaagtcagatagaccgctttttcattcttgtccattcgccagaaggcgcgtggataaagccagcggagtatcagcgggggttgttctataaacatgaatgtgtgtgcttttgttggttatacaaatataaaggtgtggattcaccgcagaatccacaccttttatttactttctgcctgctccgccgcctacacgtttgttgaacacctcatagaggtcttcaaacttcttggcatagtggcttgccatatctgattttttctgttgttcaccttcaccttgtacaccgccggcagcatttgcgcgggcaaggctcttgttgatctcatccaggatatagaaattgcgcagacagtcctcgtatgaaccttgcaggcgttggtcatccagattcaggtaccaggtgatgtattccaccgatttgtttgccagatcattcagaatggcttctcccttttctttttcacctaacgccagataatcgtcggccatttcttttgaactgctcatgatgtaatcgtggggcacggtggtgcttgggattacttccgaacagtagtcaagggctttcaacgccttgtctttcttgccttcttttatcaactgggtagccagctgtataaacatacggcggtgggtctggcacatacgcatcacagtctcgtcgatatagatatccgggttgttgattcctccgaacttgaacttgttcatcaggttatcgtacattttctcgctgtcgatgcgtgcgttcagccgggtggtgttgaacggggtgatgcggtaggcaagaccttcctgcatgaagttgttgcccaaattcagatgattgtcgctacccaccgtaatagccatatacaacggacgttcccagttggtatttgccagcatctcaagcatcatcagctcgctcttgtacagcatacgtttgcctttcagggagatactcatgtaatcggggatttcaccatgcagggagtcgggaatcatcatgcccgagcgtttcactgcctccttgtccagcttgatgacgatgctgtccgtcggtatcagctgtaaaccttctttgggtgagcgtacccagtatttcagaatatttttcaattcatacgggttgtctccgaattccttggcggcttcttccgggttctgcttgtagaagttattgatgctttccatcacttccggacgtacagccactccttcattatgcccctgtacatattccagacggctccattcgataggcactgccggggagtcgtatgcctgacgcttcatttggtcgatgtaccagtccgtttgcaggtaactcaggttacatacacgtacatcggtacggaaaccttccgtttcctggttgtaccacaaggggaaagtatcgttgtcaccattggtaaagataatcgggttaccttcttcctgtacggtgctcaggtagttttgtccgaagtcgcgtgccacataacggttgctgcggtcgtggtcgtcccacgtctggctcaccatttggatgggtacgaacagacaaactacagttgcaatgacggaagccggtttctcacccagtttgccttgcagccattgggcaatacccgccacacccatgcctatccagatggcaaatgcatagaacgaacctgcgtatgcatagtcacgttcgcggggctgcatcggggtctggttcaaataaagcacgatggccagaccggtcatgaagaacaggaagaatacgatccagaattgctggatacctaccggttcttctatctcttccccattcggagtcgtgatacgttttgtcttgtaagcctgccagaacagaccgataagtcccagaatcaacggcaggcaatagaatacattgtgccctttgttgtttttcaggtcggaggggagcaggctttggtcgcccaccaggaacttgtccacaaacggtattccggtaatccagttgccatgttctatttcaccctgtccctgtatgtcattctggcgtccggcaaagttccacatgaaatatctccagtacatgtagttcaactggtagataaagaagaacttgatgttatcccattgggtcgggactttcaccatcaccatctgtccgcactggtcgtaaggaacctgcacgcctttgatgccgcccagccagtcttcgtaggcctgtgcgtgtgcatcgctgtacatgcgcgggaagagcatattttgtgcatacttgtaatcggtcttatgacgcactacttcgtagctgtccttttcatcgggagtcgctttctccttccgttgatacacgggagcgccttctgtcacgtcatatacacatcctccgtccacttctttcagtgccggtttggaggcgtatgtctgtccgtagaacaaaggacgggttccatattgctcgcggcccaggtattctcctaaagtgaagatgtcttccggagagttctggtccatcggagtattggcggtagagcggatcacaatcaaggcgtatgaggagtatcctaccataatcatcatgatgcacagcaaagaggtgtttaaagtacgtgcgctaatctgatatttcttgttcaaatcagcaaacagataaacgcccaagattcctagtatgataatgcctatcaaggcgctgctccatccgtagccatagaaggggatgcccagcatggcgatagttaccatgaaggaaatattcatgcgtttgcggctcttttccgtatagctttcgtaaacaccccagataatggatgcggcgagtagaatgatgtagactatcagaccgctgttgaaaggcataccgaaactgttgacgaacagcagttcgaaccatcctcccacttttactacgcccggcacgataccgtacagcactgctgcaaccaacaccatggagcctgtaagtgccaacaggctgcctttgaggttggcatcgggattctttttataatagtacaccagtacaatggccggaatacacaataagttcagcaagtgcacaccgatggaaagtccggtcaggtaagcaatcagaaccagccagcggtcgctgtgaggctcgttggcaacggattcccattttaaaatcaaccagaatacgactgcggtgaagaggctggagtaagcgtatacctcgccttctacggcactgaaccagaaggtgtcgctccatgtataagccaaggctcccaccagtcctgaccccataatggtaatgagtttgcccaaggtcatctccttgtcatcggggcatatcagttttttcaccagatgggttatactccagaaaaggaacaggatacaagccgcactcatcagagcgctcatggtattgaccattctggctacttgactggggtcgcttgtaaattggctgaataagttggcggtaagcataaagaagggtgcaccgggcgggtggcctacctctaatttatagccggtggtgatgaactccggacaatcccagaaactggctgtcggttctatagtcatacagtaagtaaaagctgcgatgacaaaagctaaccaacctaccaggttgttgactaatttgtactgtttcatgaatatattattgtttcgttaacgttcaatgggcgcaaagatacgaaagaaagttggaatagggaggcaatggtctgttatttagtgttatccttagggaatgcggcagaaaatgtttctttcagtccttaacggaatttctatgttttattgctggtttgtatactgtgttctgaaatttcagtttgtacagatgaaggaaacctttggattcctaacctttttctactctatggttaagcttgattgatggttaggttaaggtcttttatacggtaaaccagtatagaccgctacagtggactgtacagtctgctatggtagtccgtacggtctgttgcagtggactgtacggagcactgccggcgactgtagaagtctgccgtaagaaaatgcttaatgataaggtggatagggcttaacctgccgcatgaaaaggtttaggtcacgataatcggatttattcgtcgtgatgatggcatttcaagatgcggtgagggaagttcccatgtcctaacagttcgatggggcatccgaaatgctcttccagccattcggtgggtacttccgtatcgggatgataatccagcgtttcgttgacgcacgctatggtttttacattttgcagcacagtgcctatgtcatggcttaccaggatgatggcccgttccttgttgatttcttccagcagggagtagagtttggcctcaaaccgtttgtcaatgtaggtattgggttcgtccagaatgacaacctcagggtttgaaaccaaggcgcgtcccaagagcgcgcgttgcagttgtcctccgctcagttcgccgatggcacggctttccaaaccttccagacccatgcgggcaataatccggctcaccagttcgcgctgttcgggggtgtagcggtggaacagggatttctgtttgttgagccccgataataccacctcatatacggagatggggaatttcttgtcaatactgttgtattgtggtaagtatcccatggctatttcgggtacttccttttcgttcttatagaaacggacactgcccgaagcgggcttcagtaaccctagtatgatcttgatcagtgtggtttttccgccaccattggggccgattacaccaaggaagtcacgttcatataccgtgagattgacgtgactcagtactgtcttctcatcgtaagaagcggaaatatctgtaagttgtataatgggattcgtcataaggctctgttatttggcaagtgcatttgctacattgatcatctcttcccgccattcataacttagcggattaatgggaacaacggtgactcccagttcatctgctatcagccgggcattgcgggtatcgaattcctgttggacaaaaataacccgggcattgtcccggcggcaggtttctatcagttctttcagatgggcgggtgagggttcctttcctccttcttctatgctgatttgctttaatccgtagtccctagcaaaataactgagtgccggatgatagataaggaaagtggtatcggcattccgtagccggtcacgaacgtccgtatctgtctgtgcgataattttttgcagactgtccagccgatgcttgaaataaggttcgtttgcactgtccagttcactcagggcggagtagatattacgggcgattactgaggcattgcgtgcggagttccatatatgaggctctatacccccttcgtgatgatggtcaccgtggttgtgtcctgtttcgtgtatgacgtctattccttttgaggtatcgaatactttcagatgaggggcattcgtggtcagtttatccatccaggcttgttcgaaaccgatatagccgatgcgcaggtaggcggtgcttttatccagattgaccagttgttggggggtagggtcgtaggtttcggggctgcttcctttcggaaccatgctgactatcttgaatttatcgcctgcaatggtttctgtgaaatagcgcaagggctccagggtgacagtcagggtcggttttgtggaagtggactgtttactgtcacaggcggtaaacaggcacactatcagtaccatgcagcacgaacaaaggatacttttgccgggatgcaatggggaaaatatgtgatgtctggttctcatgaatgttatcttttctgtttaacaacaacaaatatacgcaaattgctcattaatcgagtacaaatactccccaaattgctcaattgataagcaatttcagtctggttagggcttttcatacggctattctgtggctgtatgagaagccttggtttcaggtaaaagattctatatggcattctatgtactctttatcgttctctataaatatgcgctttatatttggtgggaagtgtcttgtcgtttgttaatctttttaagatgccatataaggctcttgtattcgtgaagaataagatttgtaaaaaaatcctttcaatctttgttcatgtatttatcttactatatgttaatagaaggaataggaactgattgtggatgattgaaaatcaatgggttattgtatgtatggaagatgaaaaaagtataaatctcttagtaagagatcgacatttcacgtgcaaaaataaggaaagttttgataactagtacacttttcgcggaaaaaatatggaatattgtgaaaaaaagtatttcttctggttctaccggctctgatttaatcttgtatttgtatagttaatattttgatttaaagcctgttatcgtctgtttgtagatctcttactaagagatctgcataaaaggccaataagaacgaataacgagtttagatggaatacctgtttctgagacgtaaaaagacgagcagcacttctgtaaggcagaagacattgctctatcgtgccgccggtcgcgaatggacagcgcggttctcgtcactgtcggatgtccgtccggcagacagccttatatataaaggtatattgtatcagttggagatacgccgggcgttcctcgattcctctctttcgttaaagaaactgagtatgatgctcgaaacaaaccagacttacctgagcaatgcggtgaaccgctacttcggttgtcatctgaaggagttgcttaaccgctaccgggtggaatacgctaaggagctgcttcgcaacggcggttgtccgctgggcgaggttccgtcacggagcggtttcggttcgaagagtcctttctatctggctttcgtccgtcagacgggtatgactccgaaacggtatgcggcgcgcgagaggaacctggtgaacttggaaatagagaatgaagtccttttataacagtatatgtataaccaatttttagttttttaaatttataaatttaaatctttatttatgaacaaaaagtttttaagtgcagttctgttcggagccttgatggtttcgtcaacaggaacatttgtgtcttgtaaagactatgatgaggacattgaccgcatcgacaaggaactggttgatatcaagtcggctctttcagctttacaggcaaaagttgatgctggtaagtatgttaccaacgtagtgaagaacggtgacggtatcactgtaacctggagtgacaattctacaagtaccattgaaactatcaaaggtgacaagggtgaagacggtaagaatggtacagttgtgaccatcattgacggttactgggcatttgacggtgtgaaatctgaatatcctgcaaaaggagataagggtgacaagggtgaccagggcgaaccgggtgatgctgccgctgccggacatgatgcaaagattagcgaaaacggttactggatggtatgggataccgaaaaggctgcatacgttgaaacagaatatattgccggtggtgcggtagctgcacaagtaaaaggtggctggaacattactgtaaaggatgaaaatggtgatgaacagactatttttattccgagcagtgctactatgggttatatggatgtcttgaatggtgctaatccgatgcatgcactttatggaattaatgagaaggatgttgagtacggaccagccaaaaaaactttgaagaaaggtttgtacaccactcttgatcgcgacttggaagttgtggttaatcctcagggaacagatgcttctgcttattcattcaacttgatgaactctgccaatgtggatacagaattgccgtttaaggatgctgttccgtttaagggtgtattgactagagccacttctgaaaatgcagtatgggtattgcctcatgactttgtccgttatgaaaatattgatgatgccagaacgaagaactatctgttgttcaaggctaatgacggtgcaaaacacgctttgtctctgactgctactttgaatgaaacaataattaaaactccgtatgatttgagtgctcagttgaagaagattggcgaagttaatgtaggtttgcgcaacttggaaaattgtgcagttaatgtagattatactcctattgtttcttatatttctccgtctgtagatgcagctgctgtatatgactactggattactttggaacaatctgccaagaacttgaagaacgcacagttgtatggtgtggaaatagataaagaaggtcatagcttcaagttcacaagagaaacaggagtaaataactacattgagtttgtttacaactacattttgatggacggtactatcgtacaaggcgataaagatgcgcctcacttctttgcttatcagcgtgaagaaatggcaaatgctcatgaaattactttggaacgtctgtatactccgatggatgctaagttaattgttgaaaacgacaaggatcctaattataatcctgaactgagacctactactggttcttggtctgctaatgagaagcaagtatttgctcttaatactaaggcttattcattggataaaataatcaatgaaatgagtgctatagaaaaggctgtatggaagagtgccgttgaagctggacgcattgatttcgaattgattggtggtgaaggcgaaaacaatgaatattgggataactggacaaaagggtataatgttcgttatgctattgtggacaacaccataacattccagttcgttgtatctgaaggatatccgtataacttcactttgaagaacgcttatcagttgactttgacagtgaaagatgaagacaccaacacacctgttgcttcgatcatcttgccattcgaattcactcagccgactttggatattactcgtgtaaacggtgagaaggctatctggaatgacaagaagaatgtattgagcatttatggtgacttggtaaaagaaggcgatgtagaaattatgagtgttccattctatgaagcatttactactgcatatgctaaacaatatactgtatttggttctacagctcagtactatactttgagccataatgaaaatgtagataattggtttacttattccggttatgaagtgttaggtcaagattatgctacgagacttcagaatattcctttgactaatatcgtatattcaagtcttgcaaaagaatggaatacacgtactcttgttggaaatgtaactactggagaagctaatcttccgatagttgccaactacaggttctacggagtatatccggcaactaaggaacaagtatcagactttactctgagattcgctagcttgatgggtgacgctaagaaggtagaagctaagaaagaatttacttctaacaatgtaactcgtgaagtggttctgacagatgctgactttactttggtggatgctttggatgatacattctatctgttcgacggtgttaaggctgacggcaatgtggataagcgttctgatatgaacctccgtcaaggatttgaagaaggtactgaaggattcgctacaaacttcacgctggctaatgctaatgcatctgcatactattacaagaacggtaacaaagttgctatccctgtttctgtaggtacggttaacactaatgctaaattcgtaactaatgctaataccaagaccagagcttgggaaccaggcactatcagtgcaacagatgttatcgttacagatcttggtgctaacgaagctgtgaagagtgaaggctatgctgctgttcctggtggtatcatgatccagttgccttctagcattggtactacagaacctgttactatcgaattcaaactgaaagatgtattcggtgtaactaagactctgaaagtagttgttaaagctgcaaaataaacttggttaaaaaactgcttccctctcgtgggggagcggttccttctaaacaaatgaatttatcaggaaacgatacaatcccaattcggataaagttcattttttcagcaagataagactttctccgacaggagaatcttatataataaaaactttagatttataaaacagaatctctggcttgtgacaagccggagattttttatgtatataacggcaatcatctcagcgtggagaaagaatatgaagaatctatgacggattcagcgatgaatgtttcatggtaatttgctgataaatatgcagttatgcgtatatgacggatttgaaggattttacaacggttttactgttttaggtgaaacttgaccattcatcagtttcggtcctagaagtttaatcagacttggttgcccgcagtatctcgcgttttccccccggagggccgggaaggcgttctactgtgaatccggctgtttgcagcatccttcttaccacccctttagcacagtaagttgtcaggatacctccttcattcaataccttgtataaagtatcgaaaagagattgttcccacatttcgggttgtttttcgggagcgaaggcatcaaagtagatgatatcgtataagggaacggcgggacggctgccttccttcgggttgaaaagccgggtaaaatcatcttcaattttatgtaatgtgaaccaaggggatacctctgtttctgtgttccagggcgcccggtgaatggcgtaataatcctcctcatgctgtttgccgatcaggcgggggtagtccagttgcttcaaggtttcttcggctaacggatagcgttcgataccggtataatgtactttccgtcgggtctcttctgctgaaagcagtgtcagaaaggcattcagccctgttcctagtcctatctccagaatgtggggctcggaaacgggagaatgctttaatcccatttcgataaaaatatgttgtgactccgtcagtgcccctttcaccgaatgataatgttcgtccagttcgggtacatagagggtataacttccatctgctgtttgttccagtttcataattttaatgcattaaagcggaggcttccaatactccccataccaataaggcgtagcggagtatctttccgatggtcatagcgagaatgacaatccatatattggcacgcatcatgcccaatacaatggatatggcacttcccaaaatagggataaaggcgaagaaagccatccaggcaccccgtccgtgtacaaaccgctccgcacggtccatcttctctttttttacatgaaaatatttctcgatccattccatattgcccaaatgtcccatccagtagcaggtcatgcctccggcaacattgccggcggtggcggcggttatactgatcaccgggtctaagcccaacggacctacacaggctgccaatacggcctccgaactgaaggggagaacacttccggctataaaagagcctagaaaaagaccccaatatccccagtcgatcaggaattgaagaattgcatccataaattgtatatagttagaactattaatagaacaaatgtaatgatgaaaaagatgccggtaaagcggttgtgggttaaagtaaataaatgtcctgttaaaatggatcctacaatgacctgcatctgcaacaggatgtcgaaatgctgtggctgtaagatacccagtaaataaatccaggcttcaacggcgatcaggaaaaaaaggaatatacgcgtgcgtaccttgtctaaataagaaacatggaaataatgcacgctgctgaccagtgatatcaaggtgatgattccacaggatatgattctgtccatccctaatgtcccataactgatgggttgaaaatgaataagctcctgtaaagggtgatagaagagattcattttgtcgtaatagaacgcatagccgaaaaagagccagtagggcacacagagtcctgtaagtccggcaaagaaacttttgagtgacagggatctgaaactgatcatccccaaatagaacagaggtacaaaataaagcaactgtggaaacaacaggcttcccagtccgatgaaaaagaaagcgtggaatatacttcccgccggatagggagattcgtagctgctgaataattgggaaatagcgatcagaaaagtgagtggcgcaaaaacggcatactggaaggaatgcagaaacaggcaggccgtggacaggaatacgtaaaagctgacatgcaaggtactgcgtgtccgtatcagcgtgaaggcggtgtttatctcgatcagcagataggcagtcaaagcacagaccagcaaattgattacatcctgccattcattgcccgtgatgatccggagaagcaggcatataaggatggcaacagggaaggtgaatcttccctttgccatatctatttggaatttgtcatagcctgccatgggttgatagtccgctgattacaggtcgaatccaatatctgaacggaaatatttcttgtcgaaattgattttcttcgcattggcgaatgattgtgccaaggcttcttctttattggcaccgtaggagctgactgcaatgacacgtccgccgctagtgactacctgtccgtctttcagtgctgttcctgcatggaatacaatgctgttttcaatctcttctactccgctgatggcaaatcccttgtcataatgttccggatatccgccggataccagcatgacgcatactgccgaacgggggtctatctccaggactttttcattcagattgcctgttgccactccttcaagcagttccaccaagtcactcttgatgcgcagcatgacactttccgtttccgggtcgcccatgcgtacattgtattcaatgaccatcggttcgccttttacattaatcaggccgaagaagataaagcctttatagtcgatgccttctgctgccagtccttctactgtggggcggatgatacgttcttccactttttccatccatgctttgtcggcaaacggaacaggagatacactacccataccaccggtgttcagccctttgtcgccttcgccgatgcgtttgtagtcttttgcttcgggcagaatcttgtagttctttccatcggtcagaacgaatacggaacattctataccgctcaggaattcttcaatcactacggtggcggaagcgtcaccgaacattccgctcagcatttctttcaattctttcttggcttcttccagggtggacagaatcagtacgccttttccggcgcaaagaccgtcggctttcagtacgtatggagctttcaatgtttccagaaaggctaatccttcttccagatttgcggcagtgatacttttgtaaccggctgtcgggatattatggcgttgcatgaagcctttggcgaactccttgctgccttccagtaccgcacccgcttttgaaggcccgataacaggaatgtttttcagcgcttcatcttttttgaaatagtcatagattcctttgactaacgggtcttcgggacctaccactaccatatctatattattctttactacaaactctctgattgctgtaaagtcatctgctttaatcgctacattctcgcctacattacttgtgccggcatttcccggggcgatatagagtttctcgattttgggactttgagcaatcttccatgccagggcgtgttcacgtccgcctgagcctaatagcaacagtttcataatcttatcttttgtttattttaagtggtcttcaaaatagcgtgtaatgcgttcatacaagtgcacacggtcgcgtccgaacatattatgaccgtcgcccggatacataaagaaatcgggttgggttccggcatcaatgcaggcacggaggaaactgatgctgtgctggggaacacaagtggggtcattggcgccaatgatcacttccagacgtcctttcaggtttccggctctcagcttcaggttggcgttcttgtagccttcggggttggtttgcggagtatccatgtaacgttcgccgtacattacttcgtagtaagcccagtcgatgacaggaccgccggctactcctactttgaatagttcggggtaagtcagcatcaagttggtggtcatgaaaccaccgaagctccaaccatgtacgccaatgcggttattgtccacataacccaatgattttaagaaatccactccttttacctggtctttcatctcttcggttcctaattggcggaacgtacagttctcaaattccagtccccggttgtcactgccccggttgtcaacggtcagcatgacgtaacccagttgtgccatgtaaatatcccatccgcgggcgtcatagttgcggttgttgtggattagttgggcatgtggtccgccatacacgtagactacggccgggtattttttgttggggtcaaaattcaccggctttatcaggcggtagtataagtcggtcttgccgtcggctgccttgagggtaccgacagtgatttcgggcatattgtatgcttccaacggattggtggcagtcaacaggctgatagtctttccctttccggaagtgggaacgatctcgatattccggggaatggtgaaagaagtataattgtctatcacatagttgccgttaccggacagttgtacatgatgcataccgtctttattgccgatgaggcggcgtttgcctgtctttacattcacagcgtatgcgttgctctgcaaaggggaaacctctgtgctcatgatgatgacttccttggtcttttcattgaatccgaggatgttttgtactacccagttgccttgggtaagctgtctggtcttgtagctttcccggtaagaacctccggccgcggctccatgtgattccggatatacggaagtcttggtgtccatcaggtaaagatggttgtagccgtcgcgctggctctgatagataaacttcgtgtggtcccatggcagaaagacgatgggatgttggggttctacatatttagtatgctcctcttcgtaaagggggttatttttcagtggctctcctgtttccgcgtcatagcagcatagcagggcatggttctggtcacggttcagttcaatgacataaacgcttttctcgtcaggactccagctgatattggtgaaataacggtcggtagggtctccggctttcagataaactgttttttgggtctccggattgtagatgccgacagtcactttgtggctggtcattcctgccatcggatacttgtccggctccagtgtcgctatgcgggtggaggtatttacttgtggataatcggttaccatgctttcgtccatgcggtagaaagcaagcagatttcctttcggactccagaaagtacctttcgagataccaaattcctgacggtgtacactttgtccgcatacgatgcctttcggttcgtcggtgacttgttgcgttttcccgtcggcagtcgttacaaacagattgttgtcaagggtataagccaatgaacggctttccttgttccagtcctggttggcggctttaggagagagaggctgactccatattatttcctttttagttaaatcgatcagcactttattggatgtggtatttaccagcatcatcttttcagcgtatgggaaagatgcattcctgaagtggttgattttccctaattccttgtttgccaacagttcattcacttcctgcaaagtgataagtacgttttccttcccatttgccggctggatggtttttacctcttctatgtcggcgttgatgcatacatctccccaccattgcaaaccatacaggttttgtggaagcaggttataataattgtttcctcccggcatcaagtcttccagtgtgaaacttttcttgtcttgtgcccatgttacagatgaagccatgattaataaggcaatcagattgattaattttctcataactgtttattcttctgtcttttccttattgtcgtcaaatttacggggactgcttttgaaattgtcgcggccttcacgtctgtcaccaaagttgcggtgttctcctcttttgaaatcgccacgtccctcacgtttgtcatcaaaagagcgtctttctctgcgctctcctcctttgtactctccgtgtccttcacgtctgttgtcaaaactacgacgttctctgcgttctccatattctaccttttccgtgttacggcgcgggcggatttcttcccggcggggcttgaattcccgatcggcgttctcactacggaattctttgaatttgccgttgaataattggtatttgcggaattcacattccaacgaaccgttgaacagggggatttttatagaaggctttaaaccaatctggtcgaaacattcttcacggtaacttagtacccatgcatcattgccggtgaaagagtgtttcagacgttcgcctatcatttgatacaggcccagcaaatcattggttgagatacgttctccataaggagggttggtgatgatgatgcttttttctttgggttgctcaaattgctggaacggttggatttttaagataatctccttgctcagtccggctgctttcacattgtgagtggcaatttcatttgctttcggattattgtcatatccaaaaatcttatgtgtgaactcacgttcctgtgagtcgtcattgtagatgcggtcaaatagttcctgatcaaaatcgttccacttttcaaaagcgaactccttgcggaatacgccgggagcgatgttacgtgctatcagggcggcttcgataggtattgttcctgaaccgcacatcgggtctatcaaatcacattcgcctttccatccggtcatcaggatcataccggctgccagtacctcattcaaaggagcttctacagcttcctggcgataaccccggcggtggagtgactcgcccgaactatccagtgacagagtgcatttattttcggctatatggatgttcagtgccacatcgggatggttgatgcgtaccgaggggcgctctcctgtcttttcacggaaatagtccacaatggcgtcttttactttgtaggctacgaacttggagtgacggaactcgttcgagaaaaccacagcgtctacggcaaaacttttatctttatccaagaagtcttcccacgcaatggccttgatagcttcgtaaacttcatcggcattcttcgcctcaaaatgtttgatgggtttcaggatgcggatggcagtacgcaggcagaagtttgccctatacatcatttctttatcgcccgtaaaggctaccatgcgtcttcctacttctatattgctggctcccagctcggtgagttcttttgccagtacttcttccagtccctggaaagtcttggcgattagctcgaattcttccttcatcttaaatgataattacgtaatttcaattgatgggacaaatttaatgattttctgtttgctaatcaattatttagagaattaatctgtttgatgaagcaaaaaagaggatgaaatcggggcgtccacgctccttgccggggtctttatttacctttgattataaaaattctttgaaaacggaattgggtatatctgtggaataaattgacaaaatatgtatccggcaatgtaattgttatcctatagaaataaattctacacaggaatttgccatttttgctgaatcaagaaacttaaatagaaatcagaatgaaaatggaattgacggatgagaaacgtaagggatatgtggtttgtgctttaatgatactggtctcttgtttgtatttggtttatttggggtacagtctctaccgtatggggcatgcttaggacaaaatgaaaccatatctgtatcacacaggtatggtttctgtaagagaaattctatgattaataggttgagtgacttttatgcgaattcttctgccagatagacttcgtttatttcgcagaaaaactcatcggcgatatctgacagggtttccaatgcttcttcggcagtttcgccgtaagtgcagcattggtggtagtctgttaaaaaggcgtaatattccccgtagggtgtacattctatctgatattcattgcttttaagttccatatatacctccttttttatcgtactgcaaatatcttgtttatctgttacaagaaggtgtacaggaagttactgttttattaaaaagtttgctgccatactactttttagaccattttgtgatgtcagcatttctatgatggcaaaggggttttattcgtctttgttttttcgctgtacgatacgtgatccggcaggtacattttctgttacccaaatattacctcctacggtagcacccttgccaatagtaacacgccctaaaatggttgcattggaatatacaatgacatcgtcttctaaaataggatggcgtggaatgcctttaatgggatttccattattgtctagcggaaagcttttagctcctaatgttaccccttgatagagtttcacattatttccgatgatgctggtcgctccgattactacacctgtaccgtggtcgatagtgaaatggtgtcctatttgtgcccccggatgaatatcgataccggtttccgaatgtgccatttctgtaatgaagcgggggattaaaggtacacccagtattaacagctcatgtgcgatgcggtaattgctgatagcgcggatagccggatagcaactgatgatttcaccaaagcatgtggcggcgggatcaccataatatgcggcttctacatcggtagccagaatgcggcggagttcgggcagtttactgatgaaacgagctgccagcaaagaggctgtttctctgcacggttcattgtcatcggttgcatttttactgttttcctgtccgaagcaaagtcctgccagaatttgttcggtcagcaggccgaacagggtttctacatttacaccgatatggtagttgatggtatggctgttaacggtggaattaccaaagtagccggggaagataatggcgcgtgccaattctactatcttgtatagggatttggcagatggtaaaggatctccatctttgtgttggtggaataatcctttataggactggctttcagataattcatctactgcctgcgttaatatgttcgtgtaattgaatgtagtcatgaactgaatgctttagaaggacaaaagtaagtaaattctatattattgccaataaatagaatgaatattgatgttaatcctttatttttgcagaaaaaagggaatatttatggtaaataagaaaaatccatttgcttttaaggcaaaacaggaaactaaaaagaagtccggtggtaaacggatcggcaaatcgaagccggataaagcgaataatcagttgaatagaagagtgaagtaaatgaaactattgtcttgttgcaggggaagaaccagtctgcccctacaacaggatgttaatctttatttctcgaccaaagcgaaatcaagttgctttttctccagattggcgcgggccactttaatggtaaccggatctcccaaactgaattttttgtgatgccggcgtcccgtcagacaatagttcttttcatcgaaatcataatagtcatcaccaaggtcacgcatgggaatcataccttcgcacttgttttcgttcagttccacataaagtccccattcggtaactccggaaatgactccatcgaactccatgcctaggcgttcacccataaactctacttgtttgtattttacagaggcacgttccgcattggcggcgatttgttccatttcagagctatggtcacacaattcttcgtatttcgcttcctgtaccgtacgtcctcctgccagatagcgggtgagcagacgatgaaccatcatatccggaaaacggcggataggtgaggtaaagtgagtataatagtcaaatgccagaccatagtggccaatattatgtgtggaataacgggccttttgcatggcacgcaaggatacggtttccaccagattttgttctttcttgttctttatgtcgtccagtaaacgattgatggatttggatatctcagttttgctacccgatgtacgtatcttatatccgaagcgattgataaaccaattcaagttctccagtttatcggggtccggaaggtcgtggatacgataagggaatactttggctttcttgtttttaggtactttaccgattttttcggcaaccgtgcggttggccaacaacataaattcctctatcaacttattggcctctttggattctttgaagtagacactgagcggtttgccggtttcgtctatctcaaatttcacttctacgcggtcaaagtcaatagcaccggcagccaatctttgtttacgcaggatttgtgccagtttgttcagttccagaatttcttctttgtagtcgccttcacccgtttcaatcactttttgcgcctcctcataggtgaaacggcggtcgctctttataatggtgtgcacgatgcgcgagtctttcacctctcccttttcattcatattgaaaatgacggagaatgccagtttctcttcgtcggggcggagggaacagatgaagttacacagccgttcgggcaacatggggatggtacggtctaccagataaacggaagtagcgcgtttttcagcttctttgtcgataacgcctccttcttttacataatgagtaacatcggcaatgtgtacgcctacttcccatagtcccggtttgatgagacggatggagagcgcgtcatcaaagtcctttgcatctttagggtcaatggtgaaagttgttacattgcggaaatcttcacgttctgcatagtccgcctcggaaatctctgccggaatcttttcggcagcggtttctacattcttgggatatacgtaaggtaagccgaattcggccagaatggcatgcatttcagttgtgttttctcctgcttttcccaaaatatcaatgacttgtcctatcgggttttttgcctcttcgggccattctacaattttcacgactgctttgtccccattctttccacctttcagcttatctttcgggataaaaatatcatttgccagagtgcggttctcggtcagcagaaaggcgtagaatttctctactttcagtgtgccgacaaaagtatcgttggcacgttccagaatctctatcacttcaccttccgggttccggttcttacgtttggcaaagagggctattttaactttgtcattattcatggcatgtgccgaattacgttcggctatgaaaatggtttctccaccatcatcggggatgaaggagttcttgccgttgcttttacgctgaaagacgccagtcataatcaggccgtggtcgttcagcttgtagtgtcctttttctacttcttgcagaaaatcatcctcaatcatttcagtaatgatgtcggcacaaagcattttaagaggatgtgtagtaaggttcagactgcttgataattgtttcagactgaatgtttcgttcggttttgtgtggaataagcttatcagtcgttcagacatttcgctttttttcatgcgtttccctgcttttttttctttctttttagccataaggggatatatttatgtattatgtgctacaaagtaaacaaaataattggaatagcggttcaatagatacattaaatttggttgaatctaaatgaaacgtgctatctttgtccgttctaaaacaattgttatgactgaacttgataagaaaatcagggaaaaagaaatttatagagttacactagtggggagtttcgttaatttcttgctggttatttttaaattccttgccggaattgcagggcatagtgctgctatgttggcagatgcagttcattctctatctgacttcattacggacgtagtagtgattctttttgtacgtatatccaataaaccagtggacaagagccatgattatggccatgggaaatatgaaacattggctactgctttcattggtatggcattattgggggtaggatttggaatattgtggaatggagcaacagatatattggttttcctacgaggtggggaacttcgtcaaccgggaatgttggcattggttgctgccattatttctattctgttgaaggaaatactttatcaatatacagtcagagtggggaaaagatgccactcacaggttgttgtggcgaatgcgtggcatcataggagtgatgcattatcatccattggtacggctgccggtattggcggagcgattttacttggtcctcattgggcggtactcgatcctattgccgctgtgacagtcagtttctttattatgcgggtttccatcaggctgctggttccttgcctggatgaattgctggaaaagtctttgccggatagtgtggaacgtgagatagaggggattgtgttatcttttgatggagtcagcgaaccgcatcatttacgcacgcggcgcatcggaaacaattatgctatagagattcatatacgcatggatgggaacatttctctgcataaagcgcacgagacggcaactggtattgaacatagattgaaagaaaagtttggagaggatactcatgtgggtattcatgtggaaccggtgaaataacatacgaagaatgaataacgaagaatttgcacaaaagaacacttgttgcttaaagaaagtattggtaaccggagcaagcggatttattggcagtttcctggtggaaggaggattggagagagagatgcaggtatgggctggtgtacgtaaaagcagtagccgtacctatttgaaagatcctcgcattcaatttgccgaattggattttgctcatcccggaagattgacggagcaattggctgttcataaacaattgcatgggggatgggattatatcattcattgtgccggtgtaactaaatgccgccataaggacgaatttgacaaaggcaattatgtctatacccgtaattttgtagaagctttgagaaccttggacatggttccccggcaatttgtctatatcagttcacttagtattttcggtcctattcatgaagataattatgcacccatcagtgagcgtgatacggcaatgcccaatactgcatatggggtcagtaagctaaagtcggaacattacctgcaatcattgaatgattttccgacagtgattttccgtcctactggagtttatggtcctcgtgaacgcgattattttctgatggcgaagtctatcaagcagcatatagactttgctcctggttttaaaagacaggatcttacttttatttatgtgagggatttggtacaagctgtttatttggcaatagaacatggagtgcggcagcgcgcctattttgttagtgacggaaatgtctattccagccgtactttttctgatttgatacaaaaagaacttggtaatccgtgggttatacacattaaatgcccattatttattttaaaagttgtatctttgctcgctgaattttcagcgcgttgcctgggaaaggtaagtacgctgaatgctgacaaatataaaataatgaaacaacgtaattggcaatgtgatatttcacccttggtggaagaactgggatatcgtcctgagtaccctttagacaagggagtaaaggaaatcattgcatggtataagaaagaaggatggctttaaatttattcaaacgggtagacagtgtgaaaggattgtttgccgttgagagcattagtctgatatataatgccctcacgaccataatggttttaatattatttcctcgtatggaccaccctgtaattatgcttttggagcgtgcaggcattgtggccattacgtttgcattaatatatttgtatcgcaagtatccgtgtaaacttacggcatttatacgaatggctgtgcagatggcatttttagcgtattggtatcccgatacctttgaatttaatcgtctttttcccaatctggataacttcttcgcttcggcggagcagtttttgttccgttgccagccttcggtagaatttagtgaacattttccttccatgtggttcagtgaaccatttaatatggggtatttcgcttattatccaatgattgggattgtgactatttattatttcttgtttcgttttgagtggtttgaaaaggtttcttttgtgctggtcacttcgttttttatctattatcttatttatatattggttccggttgccggtccgcaattctatttccctgctatcggaatggacaatgtgatggcgcagcatttccctgctatcggtgattatttcaataataatgatattctgctgcccggtcccggttttgatcatggtttcttctttaatttggtagaggcctcacaggaagtgggggaacgccctactgctgcttttcctagttcgcatgtcggtatatctaccattgtgatgattatggcctatcgcgttaataagaaactatgttatttcttggcaccgttctacgtacttctatgctgtgctacggtctatattcaggcgcattatttggtggatgttattgccggctggatttcggcggtatgtatttatattgtggctacttatatgtataagcgttggtttgcttctgtagtcttccaacttgtgctgaaatagttttaaaaagtatataaaagcgtacagggtgtccattttcggacaccctgttttgtttataccttgttgattttcagtgataaatgttgctggcatgaatgttgctttaaaaataatggctaaacgttgcaacgtttggcatagaaataacgtctaatgaataaaacaaaaatagtatgagaaaattagtatcaactttaatggcggtgacccttatgttagtgtctgccacagcatgtgcagagagaataactcctagtaagaactatgttaccaaaaaagtgaatgtgggtagttttaatgctatctctaccagttcttcggtggatgtaatctatactcaaagttccggtgggcagaatgtggaaatatatgctccggacaatttggtggactatattgatgtccgtgtagagggtggagtacttaaggttggttttaaatcaccaagaaacaatttttcaataaacggaaaacataaaaaggaagtaagagtttctgctccggctgtgaacagcttgaaagcttccagttccggtgatattattataaagaatggactgaaaacgagtgggaaagttactgttaaggctagcagtagcggtgatgtaacaggaagcactatttcttgtgatgattttgcggctaccgctaatagttcgggtgatgtgattctggaaaaggtatcttgtacgaatttctctgctgatgccagtagctcgggtgatgtatctgtcaagaatctgaacgctgctgatgtatctgctgatgccagctcttccggagatgtgattttggcaggtatttgtgagaacgcttcttacagagccagtagtagtggggatgtaaaggcaaaaggtatgaaggcggtcaatgtaactgccagtgccacttcctctggtgatgtggaatgttatgtgaccggttcgctgactgcgaaagcatccagtagtggtgaggtggcttataaaggcaatcctaaagatattgatttctctcccaaaagaggtttgcgtaaaatggaatagataatgtgttaatgctacaatatattaatgtgccaattggctgtgctgtattccgcatggcaattggcacattagcatattagcacattgtagcattaagaattcattccgtaattccccctgatataatccaagatactgaaaagttctttcacggtttcggcacggagcatggcgatacgtgtctctttaaagttggggatgcctttaaataagggagaagcagccagatggcggcgtacatgaagaataccgcggcgttcgtcaagcagattcacactgtccaacacttcctgacggagtacattcagccgccactcaaaagaaagggcagggagttccttaccggtttctatataatgttttacttccttgaatatccacgggcgtccaaagctggctcggccaatcataatagcgtctactccatactggtcaaaacactctttggcacgttgtggcgtagttatatccccgtttccaatgataggtatatgcatacggggattcttttttacttcacctattaaactccagtccgcttcaccagtgtacatttgtgcacgggtgcgtccatgaatggtcagtgcttcaatgccgcaatcttgtaattgttctgccaaatctactataattttatgctcattgtcccagcctagacgtgtttttacagtaacgggaatttttacagtgtccacaacagcacgggtaatttccaacatcagcgggatattttgcagcatacctgcaccggctcctttaccggcaacgcgttttacaggacagccaaaattaatatccaggatgtcaggatgcgcctcttccactattttcgccgcttctaccattgtttccgtgtctctgccgtaaatctggatggctacggggcgttcctcatcgttgatattcagcttctgcatcgttttacctaccgagcgtatcaatgcatctgccgatacaaattcggtatataccatatcagcaccgaacttcttgcacatcaggcgaaaagcggggtctgttacatcttccatcggagccaggaaaatagggtatctgcccaggtctatatttctaatcttcattgttgtatgtttatctttgggttacagaaaagtcagattcatttgagtattaatttataatctgtgtgaatctgtgtaatctgtggtgaaatcaggctgcaaaaatacggaaaaaagcctacctttgcacatatattaatcaaaagaataatgaaagcttctataaaagactttgaaataatggctcctgtaggttcacgtgagtcgctggcggcagccatacaggcaggtgcggattctatttacttcggaattgagagtctgaatatgcgtgcacgttctgccagtacatttactgtcaatgatttacgcgagatagcacagatctgtgataaacatggcatcaagagctatcttacgatcaataccattatttatgatgaagatattgctttgatgcgtaccattgtggatgcggctaaggaggcaggcatcagtgccgtgattgctgcggatgtggcggtaatggcttattgttgcgaggtggggcaggaagtacacctttccacccaattaaatatcagtaatgccggagcgttgaaattttatgctcgctttgctgatgtagtggtattggcacgtgaattgaatttgaagcaggtgcgggtgatttatgatactatccagaaggaacaaattaaaggtccgaatggagaattggtccgtattgagatgttctgccacggggcactctgtatggcagtgtcgggcaagtgttatctcagtttgcatgagatgaatgcttctgctaaccggggggcttgtatgcagatatgtcgccgtgcatacgatgtgaaggataaagagagtgatattgaactggaggtggacaataaatacatcatgtctcctaaagatttgaaaactattcattttatggatgagatgatagaggctggcgtgcgtgtcttcaagatcgaagggcgtgcccgaggacctgagtatgtacgtaccgtggtggaatgttacaaagaagctatttgttcttatctggagggcacttttaccgaggagaagaagcaggcttgggatgaacggttgaagaccgtattcaatcggggattctggaatggatattatttaggacagcgtttgggtgaatggagtaagaactatggttcggaggctactgagcgtaaagtgtatgtgggtaagggaatcaagtacttttctaatattggcgttgcagagtttctggtggaagctgctgagatgaaagtaggggataagcttctgatcacaggacctactacaggagcggtatttctgacgttggatgaggcgcgtgtggatttgaaaccggtggatgtggtaagaaaaggtcaacatgtatcctttaaagtacccgataaggtacgtcctagtgacaagctttataagttggtttctcctgaggatttgaagaagaaataaaacagaaagaatgtgtttctaaagagatattgaaatttaaatctcttatgattaaaatccgaagagaagctcccttttcttattttatgtagcaatgaataaagtaagaaagggtaggatatcatgatgatacagattattataaagctgtttcattaatctattttgagttatcctttggaactataaatttattaatgaatactctcttttgatttgtttgagaacaataaaaaacccgtaacagttcattttgctacgggtttttactttgttagagtttgctgttatttggtataaattgagagtttaggatgatccttgtaaaggtttttgttcgccagctcttccgaatccgtaattcggtacaaataatatttactgtttggacagaatgcacttttatcggggaaattgaagaaacgatgtccttgagtctttttcttcaaggtgtgagtttgtccgttttcatcagtgtaaatatagtcaatgggaccttcgggatatgcttttcgaactacagcctgttggttgcggataatgtctatcaaactgaatccttcaccccataattctttacggcgttctaaccaaattgtttccaataggtcttgttgtgaaagatttgtattaatggtttttgctcctctggctgtttttaaatcatttaatttgttaatagcatctgggtcattcagatgtgcctttgcctctgcatttatcaaatcaatttcggcaacgcgcatcaatacgatatcaccaagttggttttcgatatcgcggaatctgaatttagagttacgcatccatacataggctgctgattcaacgtcagctcccggatctgtagcccagaacagcatttctttacgataatcaccatcttcgaacaaatcacggaagtaagggtctacattgaagctataatagtatgatcctttagttgtagtatctaaataatgaaactgataactggcattactttgatcgttggtttgagcatgcccccaaatccattctttattgtctacagaattgaatccggctttatattcactctcggtcattagataattgtttttagctaacaatttgtctgagtaagttttagctttctcccattgacgagcataaagacaggcacgtgagagaatacctaggacaacttcattgtcaattttgtgtttggcatcacgtacataagtttcaggaataagttctaatgcttcttctaaatcgttgatggattgcgcatatacttcactgacacttgatgcgggttttccttctgctgcaattgtttcatctgttgattgtgtatagataggtgcacatacagcatctggatctttatcaatggcaaaagaataacaagaagctagatgtaaatatagaaaaccacgtaaggctaacgcttgtcccttgattcgatttctgtcaatttgtgcaccttcagcagcgtcaatattatctaatacaccattgcagtcattaataacacggtatgctaaaagccagcttagggtgtttgtgcccccttttccataaatagcggtaaattcattgtgtgctctaaaaccatatttggtgtttagtactacgtcagaacccattgcatcatttgcacgtaacattgctccatagccagggttggcgtaggaattgaaagtttccatcaggtagttccaaccaccattaagtactttttcggcatctcctgttttaccgaaaacagaaccggcatctacataagttgtaggaattgtatccaaatcgcaggaagtgagcattatacttcccagtgcgactgaaaatatatatttaaaaatagttttcatattcttctttctgtattaaagtttcacattgataccgaatgaaattgttttcattgccggatagcgatagtaagtagagcctccgaaagtttgctctgggtctagaccttgttgtttggctaatgtcagcatattttctgcttgaaaaaatatgcttgcatctttcagtgtcaatgtgttcagcaatgacttcggcagattgtaagagaatgtaatattcttcaaacgtaagtatgaacggtcaactaagaaccggtttgaagagtttgtccatgaacttttgggagaagtagtcagacgcggtacatcggtatagggattttcaggagtccaacgatctaacatatctacgctccaaccggtgcctgtaggtccttggctcatcaatgaaactttatccccattatagattttaccaccaatggaataagagaataaaaatgataatgtaaaatccttgaatgagagatctgattgaagaccgccggtccaatctggtagtgaattgccgcattttactttgtcgtccggggtggttgatgaatagtcttctgtggttatcttttctccgttggtattgtaacgataccacgtaggattaccattttcaggattgacaccagcccattctactaaatagaagtcatataacgatcctcctttcacccatttcttgttgccactccacatttcttcggcaggcaatgaggttattttgtttttataggtagtagcattaaaagaaagtttccatttccaatctttagtcatgataggatatcctgagatttggaattcccatccataattcttgatagcaccaatattttcgtccatacttgagaagcctgaagatggaactaagtctttagagaataataaatctttggaacgacgttcaaaatattctattgtaccatttagacgattgttccagaaaccaaaatccaagccgatattagtatttagattggtttcccatgataaattaggagttgccagacgataagcgtgcaaaccggattcaccgaggttattgcgtatggaatagagcgcctgatacgcataataacctacctggtcattaccttgtgctccgtagctggcacgcaatgacaaattggatagccagtctgatgtgtccttcataaactcttcctgcatgattttccaagatgcgccgactgaccagaaagtaccccaacgatgatccggatggaaacgggaagaaccgtcagaacggacagaagccgataagaagtatttttgattgtacgagtattcagcacttccaaagaaacttaacagcttgtattggtcactgtttccgccaaaatcacctaaagaggaagctgcgtcgggctcataaaatccatccatgatgactttgctgcggcttccgccgaaattggaagtgttatattcataatactcctgaccggccatcacacggatatcatgtacatcattgaacgtgtgttgataattaatgacattattaaaagtcatgcctgtagtgcggtagttgtatttgcttacactgccaccactgatagaacctgtgccgtaagtaggattggtgtagtcatgatttgttttgttgttatagtcaatgttcaaagacatcttgtaagcaagccctttgataggagttatttggataaaaccacgtaaagaggcagcatcacgttttatctcgcttttatcgtgtggcatggaagccagcagattatattttgcatacgagttcgggcgatactcaccataatcgaacatacggttaccattttcgtccaataaatatgctccggttgtcaagtcgcgttgatataccggatagaaagatggtaccgaacgggcaaacatgaccacattggaaatggtagagtcatcttgcttgggatagtcttgaacagaatgagttcctgatacgttcaatccgatctgtaaccatttgcggatatctgaagtcacgttggcgcggagagtatagcgtttgaaaccagagcagatataagcaccttggtcatccatgtaacctgctgaaacaaagtacttggaggttttgctaccaccacttacgcgtacatttaaatctgtatagtgcgcatcttgtgaaagggcgtcgtcccagctgtcgtcccataatggtttggcgcctgctaccagttttccgtcatggccgattggttcagggtaagcactgccataagggttgatgcctagattacctgtaacattgcttgatgcccatgctgcagcttcttcggcagagtaaccgttgtccatacgatagttacgcatggcttcccaatataattcataatattggtttgtattcaactggtcgtagtctgcccgtgcacggcttgaaaaaccatatttggcagataattcaacggtgggtgcgctatctttatttccttgtttggtggtgatcataattacgccgtttgctgcacgtgagccatataatgcagcggaagctgcatctttcaatacagtgattgacgcaatatctgaagatgctatggaggaaagagcaccatcgtaaggaacaccatcaaccacatagaggggattggttgaagcgtttacagaaccaactccacgaatcaggatcgtggcgtctgatccaggctgaccgctggaggaaaaagactgtaagccagctacagttccttgcagtgcttttgatacactactgacctgtgctttttcaatagtaccggcggcaatatagcttgcagaccctgtaaatgtggattttttggcagtaccgtaaggaacagttatcactacctcatctaccatttgggctgcttcctttaattctacgttaatcactttgcgtctgtttaccggtatggttactgtttcataacctacaaaagagaagatcaggctttcgttaccattaacctgaatctgatagctgccatcaatggaagtgatggtaccgcgagtttgtccttttacagctactgtgacaccaggcatctcttcgcctcctgcggtgactttaccagttactgtaatttcttgtgcatatgtaatcatgcagaatagcaagctacataataatgaagaaaatctgttcatataaacttggcttttattaggggtttgtacattgccatttttcaggcattatatattgaactctctttctaaaattgtgatactaccttttttatcattatcatatttcctaatagtggttttatggccatccaaacctcattagggtctctttttgcttgtgtattttataattgttatattcaataaggatcgcaaatatatgtattttgatttaaataggataatatattttaatatttttttatggtgaacctgttgaaagtcaaaactatacggaattttattaacgtagttaaaataggaattgtcttatttaaatattgggcggatagatcaaatctatttgtttatcgcattactgtgtgttgatttgtttaatttgatttcaacagtaaatctacttgaatatcaaaatgaataaaaatattttttagacatattttattgcttgttgtatgtttattcgtttgtggactattcgtttttcagtcggaaaagtatcgtttgcagagaggagatatagtaaattaaggtaagataggaaggatttcgcctaaaatgtctatctttgcaatccaataacaaataagtgtacgtacatattatgaatatagaagaaaaactcaccacgtccattatcagcgctatcaaaacgttgtacggacaggatgtacccggaaaaatggtacaactgcaaaagactaagaaagagtttgaaggacatcttactttggttgttttcccttttctgaaaatgtctaagaaggggcctgaacagaccgcacaggaaataggcggatacctgaaagagcatgctcccgaattggtttcagcctacaatgcagtgaagggctttcttaatttgacaattgcttcggattgttggattgaacttttgaattctattcaggctgctcccgaatacggtattgaaaaggctacggaaaactctccgttggtgatgattgagtattcttctcccaatacaaacaagccgcttcatctgggtcacgtccgtaacaacctgttgggaaatgccttggcaaatgtcatggcggcaaatggcaataaggtggtcaagaccaatattgtgaatgaccgtggtatccatatctgtaagtccatgctggcctggttgaaatatggtaacggtgaaacacctgaatcatcgggtaagaagggggaccatttgattggtgactattatgtagcttttgacaagcattacaaggctgaggtaaaggaactgacagttcagtatcaggctgaaggcttgaatgaagaagaagctaaggctaaggcagaggcaaactctcctctgatgctggaagctcgcgagatgctccgtaagtgggaggcgaatgaccctgagatccgtgccttgtggaagaagatgaatgactgggtatatgccggattcgatgaaacgtataagatgatgggagttagtttcgataaaatttattatgaatcgaatacctatctggaaggtaaggagaaagtgatggaaggactggaaaaaggtttcttctaccggaaagaggataactctgtatgggctgatttgactgccgaaggactggaccataagttacttcttcgcggtgacggtacttctgtttatatgacccaggatatcggtactgccaaattacgttttcaggattaccccatcaacaagatgatttatgtagtgggtaatgaacaaaactatcatttccaggtactttctatcttgctcgacaaattgggttttgaatggggcaaaggattggttcatttctcatacggtatggtagagctgcccgagggcaaaatgaaaagtcgtgaaggtacagtagtggatgcggatgatttgatggaagcaatgattgaaactgctaaggaaacttctgctgaattaggtaaattggacggcctgacccaagaagaagccgacaatattgcccgtattgttggtttgggtgctttgaaatattttatcctgaaggtggacgcacgtaagaatatgactttcaacccgaaagaatcgatagatttcaatggcaatacaggacctttcattcagtatacgtatgcccgtatccagtctgtattacgcaaagcggctgaagcaggtatcgttattcccgaaatcattccagcaggtttggaactgagcgcaaaagaagaaggtttgattcagatgctggctgattttaaatcggttgtcaagcaggcaggctcagactataatccttccattatagcaaactatgcatacgatttggtgaaagaatacaaccagttctatcatgatttcagtattctgcgtgaagaaaacgaagcgttgaaagtcttccgtctggcattgagtgccaatgtgggcaagattgtgaagacagcaatgggcttgctgggtattgaagtgcctgaacgtatgtaaatggcaaagaaacagaaatattatgtagtatggaaaggtgtcaatccgggagtttatgactcctggactgactgccagctacagataaaaggttatgatggcgcacaatacaagtcattcgagaccaaagaggaggcggaacacgccttggcttcttccgcttttcattatataggcaagaatactgttaaaaaagaagatactcctaaacaacttcccgagaactttgatatgaactgcctggctgtggatgccgcttgcagtggaaatcccggaccgatggaatatcggggcgtttatttgcttacgggacaggaggtttttcatttcggtcctgtttatggaacgaataatattggagagtttcttgccattgtccatgccttggcattgatgaagcagaagaatatcagtatgcctgtttactcggacagccgtaatgcgttgagctgggtgaaacagaagaaatgtaaaactaaactagagcggactcctcagacggagaaactttttcaaatgatagaacgagccgaaatttggctgaaagaaaataaatataccacacctttattgaagtgggaaaccgaccgatggggagaggtcccggctgatttcggacggaaataataaagaactgaagatatgaaaaagaggattgcttatatcagcttgtacttttttacggtcttactgatatttattctacagaaaccattattcatgctctataatggttccattgaaaaaggattcgggtttgccgattatatgcaggtaatggttcatggcgccagtcttgatgccgctacggcgggatatcttactgcatttccattcttgttggtactgataagtatttggtttaggaaattccctttgaaaaaaatactttacgggtattatattttggctgccgcgcttatttctatcatttttgtggtagatatggcattatacacattctggggatttaaactggacgcatctgtttttctttatatcgattcaccgaaggaagctttggcgagtgtttccgtcggatttatcttgctgagggttcttgccatcttgttactcatagccctgaatagttgggtcttgctgaaaatcacgccttccgttttgaccgccacccggaaacggatagcgggaactgcgggaatgctgttattaggaggtgtgcttttcatcattatacgtggtggtgtaacggaatccacttctaatatagggcaagtatatttcagcaacgaacctttcttgaatcattcggcggtcaatcccgatttcagtttgttgtcttctatgggtaaatcccaggattttgcatcagagttcaatttctttgatgaagagaagcgggctgcattgtttgacggactttatcctacaacagatggggatagtattattcaagtcctgaataccaagcgtcccaatattcttattattttgatggaaggttttggaggtgcttttgtagaacctttaggcggtcttcctgatgtgacaccccactttaaccgtctgtcaaaggaagggatcttttttacaaactgttatgccaatagtttccgtaccgaccgtggaacagtctgtactttcagcggttaccttggattgcctacggcatcggtaatgaaaattcctgccaagagccgtacgctgcctgctatagctgaaggattgtccaaggcgggttataaaacagatttcctgtatggaggtgatatcaactttaccaatatgaagagttatctgctgagtaccggttatcagcgtcttacagccaatacagatttctcattggccgaacagaccagtaatgcctggggagtgaatgatgatattacttttgaatatttatataatcagttaagaaaccggaaggaagaagggccttggcatactgcgtttctgacacttagcagtcatgaacctttcgaagttccttatcaccggctggaagataaaattcccaatgcctttgcttatacagatgaatgcttggggaaatttatagacaagttgaagcagactctggtttggaagaacctgctggtcgtttgtctgtccgatcatggcttctattatccgcgtgtaggattgaacacggctcctgagttttatcatattccgatgctctggctgggaggagcggtgaagcaacccatgaaaatagacaagataatgaatcagaccgatctggccgccactttgctggggcagttgggcattgatcattcttcctttattttcagccgcaatgtgctgggcagtgattacacatatccttttgctttttatagtttcaataatggtttctctttccgcgacagcaccggtgtaacggtatttgataataattcggaaagtatcttgttggaagagcccgtcggcagcgagcaacgtataaataaggggaaagctattttgcagagtgtgtatgatgacttgggcagacgataggaataagacctgaaacgaaaataatcagctaaaagcattcatatacacaaaaaatgtgcttactttgcactttaataaaaagcaatctcaatggaacaagaactgatatttctggataggaacgaatttaattattcaccttcggaagaagtaatacaagcactaaaagattttgacataaagaaactttgtttttacactcgtatttatgatgaaggaaagaagagcatattttctgttttcctttctgaactgtatggagttgatgaatcacaggtattgttaggctatggtggggaagatatcctgaaacagtctgttcattattttctgactcaggcggatggtaataaaactatgttgattcctaagttctcgtggtggtattataagtccattgctgatgaagtagaggggcgtaccttgcaatatccattgtacgaatccgggaatacattcaagtatgatatagccgctattaaaaaaatggtggagaatgagtgtccgaagatttttttgttggcttctcccaataatccgactggtaatggattgacaccggaggaattggatgagttgctatcctttattcccaaagaaatcattgtacttatagatgaggcctacgcttcttttgtaactgaagacaattcgtatatcagtaaattagtgaatgagtatgataatctgattatttcccgtactctttccaaattttatggcttgccagggctgcgtatgggattcgggtttatcagtaaaggacttgagaaattcattcgttacagcaacaaatatttgggatataaccgcttgtcggaagatatcgccattgccgcattgaaatcggatgcgcattatcgtgaagtagcacgtatgatgaatgaaagccggaagatgtacgaagaagaaataggtgcgttgcccggatttaaagtatatgattctgttgctaattttattttgataaaatatcctattgagttgaaacctgctctgcaggctgcttttgctgaagaaaactataaggtgaagtttatgaatgaacctgatatcaatacccatttgcgtattacgctgggtcgtcctgaacagaaccgtattgtagctgacaccatcaaacgaatcgccagacaatgaaagccattattttagccgcagggattgcttcccgccttcgcccgttgaccgatacaatgcctaaatgcctcttgcaaataggacagagatgtttgttgcaacgtgcttttgacggactgattgccaatggaatcagtgagtttgttgtagtgacaggctatcgtcatgaacagatagaggattttcttggtgcgcattatcccgatcagaacattcattttatatataatgaggtattcgcttcaaccaataacatttattcgttgtggctcacccgttccgagacggaagggcaggacatccttttgttggacagtgacatcttgttcgatccgcggattgtatcccgtgtactggcatcagaaaagccggatgtgctggctttgaacaatcattctctcagcgaggaggaaataaaggtgatagtggacgagaagggaaatgtaaaagaaatcagcaaagtttgttctatcgaacactctaaaggtgagtctattggtatagagaaaatgtcatcagcctatacagccgccctttttaaagaactggagcagatgatagagaaggaaggcttggacaatatcttttatgaacgtgcttttgagcgcctgattccgcaagggcatacttttggagttattgataccacagacttgtattctgtagaactggatacagtagaggatttcaggcaggcgcagcaattaattccttcatctttattttgatcctatggcaacatacgatatacgtcctttgcagctgagaatcctcgatattctgatggctgtcgataaagtctgcaaggagcacaaccttcgttattacattatagccggcacgttgctgggagcagtccgtcataaaggttttattccttgggacgatgatttggatatcggtatgccccgtacggattatgacctcttgatggctcatgcagccgagtggcttcccgctccgttcgaagctgcctgttttgagaatgatacgacctatccgttgccttttgctaaaatccaggatggaagtactactttgattgagcgtatgcatctgaaatatttgggcggcatctatctggatgtttttcctttagacggtatgccagatagtaaactggcccagcgtcttcacttcatacaatatttcttttataagaagatactgtatttcatttaccgtgatccctaccggcatggaaagggcatgtcctcatggatacctttgctgtgccggaagttttttacattgaaaggagtgcaggaaacgatgcgccgcatgatgaagagttatgattttgaccggtgcgactgggtggtggatcatgacgacggcttcaagggggtgatgcccaaacacattctgggaattccggctcctatcttgttcgagggaaaggaagtatggggtgtggagcatccgcatctttatttaaaacagaaatacggcgaatatatggttgttccgccccattcgggacagcgtcagcataatttccattatcttaatctggataaaccctatagagaatatgaaaaatagactgtttgtctttttagtcttgatttgtgtcgtcactcttcttccttttttggggctgacggattttcacaccaaaggagagcctcgtgaagctgtagtagcttattcaatgttggagaccggtaactggattctgcccgtaaacaatggaggggatattgcttataagccacctttctttcattggtgcatcgcggcggtttcatctgttgcaggtgaagtgactgaatatacatcccgtatgccgtccgctttgtcgctgatagctatggtgttggcgggctttctgttttatgccaagcgtaaaggtgcttctctcgcttttctgacgtccgtcatcactttatccaatttcgaggtacaccgtgcaggtatgaactgtcgtgtcgatatgatgctaactgcttttattgtaatggcactttatcagctctatacatggtgtgaaaaggagcagcagggttttccgtggatggctacgttgttcatggggtgcgctactttaactaagggtcctgttggcattattctgccttgtttggttaccggagtctatttattgattcgtggtacaaagttttatgaggcatttctttccatgctactggtcgctgttgtttcgtgcattttaccggctatctggtatgttgcagcttatcagcagggaggagataactttatcgctttagtgatggaagagaactttggtcgttttatgggtaaaatgacttacgaatcgcacgagaatcctgcctattataatgtattgaccgtattggccggatatgcaccttatactttgttggtattattttctttgttcagtttgaaatacaaaaagatttccggcaaaccacgtgagtggtggaacaagttcatcacctatatgcgtgagatggatgatgcccggttgttttcattattgagtattgttttaatctttgttttctattgtattcccaagagtaaacgaagtgtatatctgcttcctgtatatccgtttatcgcctattttctagcagaatatattgtgtatttggtcaggattagttcaaaagccattaaaatatatagtggtttcttgtccgtagccggaatcttgctactttttacttttatagcagtgagatgtggctgggttcccgatagcatttttcaaggcaggcatgccgctcagaatattctctatttggatgcgttggaaaatatgtctcttactcttgttcattttttgcttatcttattgccattgtgcatggctctgttttattttatccggattaaccaaaccagacattgtgattctgctatttattgtgccattgccataacatttgcattatttatgtctttggacggagtttatcagcctgccgttctcaatgtcaagtctgataaggatttggctaaagatatccgtgagattgttcctgaagggaaaatatactcttatatcagtgtagaaatgctgcgcttttatgtggtcaatttctataataatgaccgtgtggcgttgtttgagcgagatatgccgcaagaaggatatctattggttggtgctaatgattttaatggatttaaaccccgatatgagaacgaatatacttttaatgaagtatatagaagtaaaaaacggggatgtgatattcacgatactatttatttgtatcattttgctaagaagtaaacccgttaaaggtttacttctttttctatgaaataacgtgggcggcgtttcacttctttataaatcttgcctacatattcacctatgattccgattgcagttagaatagctccaccgataaaccatacagaaattaataaggaagtccatcccggaaatacatgaccgctggcaaaggcagataaagcataaataatggcgataatggatgacaacataaataccagtccggcagcggttatcaatcgtagcggtttaacggaaaacgaggtgataccatccaatgcgaagttaagcattttggtgaatggatacttggattctcccgcaaaacgttctttacggtcataataaaccgcagccgaaggataacccatcatgggaactatcccccgcaggaaaagattacgttcaggataagaaatgagcgcccgcaaggcccgtttgctcatcagtcggaaatcggcatggttatagataatatcccctcccattgttttcatcagtttataaaaaagctgtgcggtatgttttttgaagaaagtatctgttttccgttcctttcttacgccatatatggtgtctatacctttattataatagtccaccatctgaggtattgcatttatatcatcctgcaaatccgcatcaatggatacggcagcatcgtatctgctgtccgctacccattccagtccggcccataacgcttgttggtgtcccacattatgagccagttttaatcccattacacgagggttgacatcagccagttgctctatcagagtccaggttgtatctttgctaccgtcgtctacatagattatttttccctcttttatctttccctcattctccatcagggcaaggatatcagacagttggcgggtcgtttccttcagcacctcttcctcattgtaacaaggaacgacaatgataagtttaacggtgttcatagctttttatgtttaaataccaatcggactaataaaaagttgataggaattgcaatggcaaatatcggaacgggtgcccatgctttggcgattcctataaacaagaataaattgagtagagccatatgcagcaagtagttgactatatgtgctcctcccattcccattaactttttccaagagggttttgtcccgaaagtaaaataggaagttaaatagaaattggcgatgaagcttagtacatatcctgttgtataggctatatttacattgatgtaaggttgtaataaataatagatgccataatgcaatgctgtggcagctatccccactataccgaaacgtacaaactcattgacaactggtctggtattcataaggcgttataaattagtgggtttatttatagttttatgttcctttactaaatattctgtactttgcaacatggagaagcagtacctcttcaattgttcgaaaactgggtcattttctgcaagatgaagttcattctctatctgtttgtaccggaattcctgttggttctcaggagagtatatgtacagatggctgctatccttggctgcgattaagttatctgctgtatagaatatacaagggcgttgctctttcaataggttaatgccgaaattattttgtatataaccgatattcaataatccgagtagggtaggagccacgtcaatttgtccgccgaattgggctcttatttcgggttggataccttttccgtaaatcattaaaggaatatgattataagattgtggaatctcactttcgggagaatccaccagcttgccatggtctcctaaaagaacaaaaatcgtattatcaaaccaaggttgtttttcggcttctgttataaactgcttgatggaccagtcagcatattctacaatctggtcttcgggcttgtcactatgaggcttgaagtaatcaggtattatatagggaggatgattactgatagaaagcagtaccgtaaagaaaggacgtccgctcgtcgctttcttgtttagaataggtagggcatattggtataaaaagtcatcctgtactccaaagctgtttaccactttctcagccggataattttcttgtgcataaatttcgtcaaatccgtttgtacggaagaaagcgttcatgttatcgtattgggattcatgcgtcatgaagaatagattctggtagccattatctttcaatatggtaggtagtcctgaatagacaggtattacagagcctttcatggcattccgcttcataatggcaggaaatgaatacagagtagagtacatgccatgattgatgtggatgcccgatgaataaaaatggctgaagctcagtgattgatgatagaggctgtctagaaaaggggtgagacttttgttggaaccaaaactttccattaggttagcagacatggattccataaaaatcaatactacatttctgaaggtagtggtatccgcggactgctttatttcacgggcaatgggagagatttgggtaattccttttcttcctaacagttgttgtacttcttcaatagcttcttgctcaggcatcagatgcagataacggttctctttccggttgtcatccaatgtgctggtcaacaagttgaatacagggtttactcctaattgatttaaaaaagggtcttcgcagtaataagcctgactcactttgattggattatatcccatacgtcctcgtattccgaaaaggcagagtccgatacaggctactccggttataaaaacggagatacgctgaatactgctgactgtgtttggaacctttatactcaaacggtaaaaataagcggatgatgcagttataccccaaccagagataagtatcgagactaatcccagaaaaataggaaaataaaaagaggtttcaccgaaaatcattcctgccgtggtggctccatagccgaaccaattataaatggacgagttgatcgttttgaaaaaatagctgaaataaggaatattggctgccgagatgatgaacgccagagaatagagtgtaataaagtaagcggctgtagatcggtataaccatttggcggtatagttacatataccggctacccataatacaaccaatggcagaagtaatacgtagcaggcaatcacattatcaaaccatactcctttgatgaatgcgatagcttgtaaggctatgttattctgaatatttccggaaaactgatggcctgttgaaacgaacaggatgaaccggaacaagaagaagaataataaagcccctatatgtattgtcaataaatacagtaaagataaaccaaagcgttttgccagtatccttttcattgatgtctataaaaaagttatttgtaatatgtttgcaaatatatatattctaagcgcataaaccttattttaagcaaggtacttttctttttagcttattctttgtataagagaagggaaatctctacctttgtgatagataaataaaggaatatgagaataggatttgatggtaaacgtgctgttcagaacttcaccggtttagggaattatagtcggtatgtcatagatattttgtatcgttttgctcctgagaatgaatatgtgctttatgctcctcgcaggcggttgagccgagtctttgatgagttgctatatcgttgccctcttctgaaaaccatctatccggagggcatgtggaggcatttcaagtcattgtggcgtgcctgggggatgacttcgcgtctggacaaggagggtatcgatctgtttcacgggctcagtaatgagttgcctttaactatcagaaaagcccggcatacccggagtgtggtcactatacacgatttaatattcttgcgctatccggagtattatcagtggattgatcggaaaatctatgcttataagttccgcaaggcttgtgaatatgctgatttggtcatagcaatcagtgaatgtaccaaacgtgatatcatttcttattttcatatccccgaagagaaaataaaagtggtgtatcaaggttgtgatgtatcatttaccataccggccactgatgaaaaaaaacaggaagtgcgtgagaaatatagtttgcctgagcattatatccttaatgtaggaagtatagaagagcgtaagaatgtgcttctggctgtgaagtccctccttcgtctgcctgaagagatgcatttggttattttgggacggcggactgcctatacagaccggatagatgaattcatacacgcccatcatttagaggagcgtgtgaaaatattaaatggagttccttttgccgatttacctgctatttatcagcaagccaaggtatttgtttatccttctcgttttgaaggctttggtattcctatcattgaagctatttattccggtattcccgtagtggcggctactggctcttgtctagaagaagcgggaggtcctgcttctatctatgtccatccgaatgatgtggaaggaatggccgaggccttgaagcaagtatccggtaaccagattgttcgcgcaaggatgattaaagaagggaaaaactacgtgcgccgcttttcggaagaagagcaggcgcgtcaattgatgcgtatttattccgaattatgccagtgattgcatgtcattcaatcgcttgtagtagccgtttttcgccaataattcatcgtgcttgccacgttctacaattttaccttcataaaggacacaaatttcgtctgcattcttgatggtggaaagacggtgggctatagcgatagtggtacgtgtcttcatcagacgttccaaagcctcctgaaccaaacgttcactttccgtatcaagagcggaagtcgcttcgtcaaggattaatataggtgggttcttcaagatggcacgtgcgatgctgacacgttgacgttgtccgccggacagcttgcctccgcggtcaccgatatttgtgtcatatcctttctctgtttccatgatgaagtcatgtgcattcgcaatcttggcggcagctattacttgttccaaggttgcattttctacaccgaaggcgatgttgttgaagaaagagtcgttgaacagaatagcttcctggttcacattccctatcaggctgcgcagattggctatgcgtagctctttgatattgattccgtctatcaagatctctccttcctgtatgtcatggtaacgtggcaacaagtccactaatgttgattttcctgaacccgattgacccactaaagcaatggtcttccctttagggatcgtaatattgatattcttcaatacctgatgtgttccgtcatagctgaaagatatatttttcagctcaattttatcattcaggttatccagtactttcggattggctatttcttttatcgggttctccgctttcagaatcttgtccacacgttccatagaggctaaccctttagggatgttgtaaccggccttggagaattctttcagtggattgataacactgtaaagaatcaccatatagaagatgaaagtcggtgcgtcaatggaagattgctctcctagaataagtgaacctccgaaccacaagactagaacaatcagtaaagttcctaaaaattcactcatcggatgtgccaatgcttggcgggtagcaacacggtttgtggcgtcacgtagctcgttactgcattgggtaaaacggcctatcattttctgttcggcaatgaaagccttgataatgcggaggccgcctagcgtttcttccagttgggtcattgtatcactccacttgccttgtgcttccaatgactgacgtttcagcttcttacctacttttcccatcacccatcccattcccggaactaccaaaaaggtaaacagtgtcagctgccagctggtggctagcaaagtaccaaagtacatgacaatcagaatcggatttttgataagcatatccagcgaactggtgatggagttttccacttctcccacgtcaccactcatgcgggcaatgatatctccttttcgttcttccgaaaagaatcgtaacggcaggcgcatcactttgctatacaccatgatacggatgtcacgaacaactcctgttcgtaggggaatcatgacggcagatgaagcaaaatagcaggaagtttttagcatggtcatgaaagcgagaaacaagcctaagaagagaaggctgtttgacgagccgtagctttcaatcatctggctcaccgagtaatagaaattattgatagctacttcttttatccccatatcgctgttccaagggataaagctgtaggttcgttgatctattttaaacaaaatctgcaaaatagggatcaataaggtgaatgagaatatattaaaaacagccgaaagtaggtttaacaggacagcccaacctaaatattttttgtaaggtgatacgaatcgtcgcatcatttggaagaattctttcatctatctgagtcttttttagtgacaaggggaactatgactttaaggtggcaaaaatagacagatttttgctataatcaaagaaataggcggttaaatatggataattcggagaagtttgattctgggcttgcttggaatgccgctattacaacagcggttactgtaaccgtggttgcgataagggcaaagttcgtgatttttttaggaaacaaataaaagataagaaataatgttatgccgtcggggctaaatttataggaactaaagtgggtgtcgcttcgtccggacggcttgttcacaatatgcaaaggaatattgggaagaatggtcgtattcagatgaaaatatattatggcttaataatgtatcggtaaataaagggggatttagattttcttcttttgagatgttatcgactttaatagaatgagccatattagaaagaagttcttgggcatcctttcctgcgcagttaatggattcggagaaagtggaatttatgtgaaatatacggttgtcagataccttttccaaatcaataattggggccttgaccgcattaaaatctaaatagccagctgcaacatcatatctggcacccaaaatttgctttttattgaattgaaagtctttatatttatatattatttctttgtcagaaatagattttagtttataaaaatcagaacttgttttcatgtcttcctctatatcagagtcggaacaagcaagtatggtgtatgctataaaagttaggcagaatagttttttcattgttgttttatgttttaatatggtgattgccactatgtttttagcgctcggagttagtgaaaattattatttagcaaatgatttctatacgaaatttgccctgaatggatatgaagagttcattgtgatattttgtcttattttgcagacttctcatattattccaatattttataatgtttgtggatatttttctatcataattttattatatacttcttcggtttgttgtgctgctttatcccaagaatataaatagagccgttttttacctgccgctataagttgtgtgcgcatctctttatcttttattacttgcaataaagtatttgctatactttcaacagagtaaggatcgaaataagctgctgctttttctgctatttcaggaaaacaactggcttggcttagagctataggacattgacaggcaaatgcttctaaaataggaatgccgaaaccctcatataacgatggatagacaaataccaaagctctgcgatataattcacaaagaagttggtcattaactgatatttgtactactttgtctctaactttcagttcttccattaattgtaattcattccgttcaagtggtttccctgtacagataaggaataaatgaggattggtttggctgatggatgaaaatgctctcaacagatttaagaaatttttataggtgactctgtctccaacaaacaatatgtatttttctggcaaatagagtttgttttgttggccaattgcttgcatgtttgtaccatgataaatgacatctatcttttgcggattgatatttagcaacttaatgatgtcttttttagtattctcactgatggcaataattcgtgtggctttagttatgatttcttttttggcggcaatgatttcttctgaatctggaaaataatggggaaataattcataaatcatatcgtgtacggtaatcacgtaaggatgagagcctatgtgattcaaaaaataaggatcatagtaggtgggatgaaaaatatagggagtaggttgttctaacaacttttttgttagtttatggttctgtctatataatagctcgctatatttcttgaaaaagaaatgcggaataggtaaataatatttgctgagtttagagtgtgataaataatagttttctgtataacgtacagagattgtgtaatctaggtgaagcctaggtataatttcgcaaaaatatctagagatgcctccgaacttttggaggtcaaacatttgcgaatcgtataagatgtgtattggattcattatttttcttaatttttatagagtaagtattattgatatttagatctatgtctagtgtatctgtgccgaaaatacatgataaataaacttggaaagtatgtatatagaaaattataaattcttttgtttttatgcaatgtcggatttaaatgtttcagcttcatctgtttaatcatttcagattgtatggtactttcaaaaaggaagctgtttcttaagttcatcaagagtttggaggatatctgttttgccaatgcttgttgggtcggtatttctttgatgtacttacttgcaaattgttgcagactgtccatggctttgatataatcaaagaatcctgtttctttatagttttgtatgaaggatgtttcgctttgaatgtaatgatatgctgttagatttatatgtttcacttgattggcgaaatagaaacatctagggataaattcttcatcttcatgtctgatggggataaaatgcagttctttctttttgatgaatgaggttcgataggccaatgtccaaacggtggatggtaaggcgttgacttggatatagacctgtccggatactatttctacaggcatattatttctttctctccaatcaaattctcttagtattttcccttgtttgtcatgataacaatagttgaatacaagaaggtctaattggtctgcttccatagtatgatggatggtggataaaacattttcagccatgtagtcgtctgcatccacaaaaagtagtgttttaccttgggcagtttttatacctaagtttctggctgcgcttactccttggttcttggtcgtaagaatatgtatattaggatattccttagatagcctttctagtatggacaatgtactgtcagtagagccgtcatttacaactaatatttcataattgtcttgtggtaaatcttgtcgggcgagtgatataatacattgttggatatatttttctgcattatatgccggaatgataatagatataagtatagaatggatcattataataagtttttgggtggataatatatgattttctttatatcttctggattcttcttatgtcgagagaagaaggaatggactttgagccagatttttactatattaaaagctcttttttgaaaatgcattctcagattcatcataggtatcagtaacttaaagtaggaggcattgtactctatggaatcgacaatactttgatataatggttcggaaagattctctttgaaccattttaaacgttcagattgtacatgaagatagatagagcttataccacttccgtcacatttggaaatgatgaaaggcaaatgcttataactacagttttccatgattatggactggaagctatgtgcccagtccgaaataattttgtattgggtgtcatatagtctatggacaaataaggagcggtgtatgaaacaagattgatgagataatgaatcatagaaaaaaaactgtacggtagggtaatcgggagctactctcttacgttcgcttttttcttcaacaagtaacatatctccatatatatactgtatgttttcattgaatggtatgcgtttgaggatatctccttgtaggcaatcccctgagttgagaaagtatatatattctcctttagcttgttttatgcctttgttcataccatcataaattcccttgtctgattctgatatccagtatgttaaatgagagctttctttctcatatttttcgattgtagttttactaccatcagaggaaccggcgtctataatgatatgttcgtaatctgtaaatgattgcagtttgatactttctaatgtactctttaaaccgcagttattattgaaatttattgtgatgatgctaagtttgggtatttccatttatggttattttttagaaatttaggttgattcatgtggctcttctaaaatccttttaaaaaagaattgtcattattagctacatgaagtgtttcttttagctaattgtctatatatattcattctctgaactagcatttttgagggattatataaattttgtagctgttctgcagcttgtttcgctaatttttcttgttcttgagggttttgggctagatgtataattgctgttgataattttttaggtgtatcagctatcaagcattcttgcttatggcaaaaatcaataccttctacccccttcgtagttgttataaaggggattccagccagcactgcatctagaatcttcattctcattccactgccaatgcgaataggtactagaaatatgcttccttgaagaaaactatgcaaatcttttacatagccagtcagttccatttctggacaaatattttgtaatttattaatatatttattatgccaatgacctaccacttggaaagtgaaacggaattctttctctcttaaaataggagcgatttccatgcaaaaccagtgtacagcatcaagattcggtaagtgatcttcacttccaacaaaagtgagtcgttgtatgattgtttcatttcttttgaaagaacattgttgtgctttgataatggcgggagaggtataaatacattcttgtcttcctataaattgggagagtatctttcgatctatttctgttaaggttataatatgcttaaattgttgtaaagctgatcgctcaaaatctttggctatttgaaatagcattttttcctggtgtgttattttatccaggagggatatttcattttcattatggatatatcttaattcatggtgtacaaaaatggtttccgctttatgtggaagtatgtatcctaatgaaatcagttcatagaattctacttggatgatgtcaaatccttggttggagatattggctacatactctatgtattgagcgggaagtgggtagaatatggaagaggaaaaagttccttttcttcgaatcaagtcattttcatctactagttggcgttttattttgcgggtagcagattccttgattttctttagtagtttataataccaaaggtgctttgcctttacttcctctgttttctcttcaaaaatataaaaattcacgttggtccatatttggcataaattatctatatttcctttttctgattttgattgagggaaaagcaatatagatacttccatttcatatcggatatattctatcatgtgatagaaagcttgatttccacccgatacaagtgggtatggaatgtatggaattatgaaaagaatttttttcatgggcattggttatattatagttttttgggtcatcttgttaatgtggaatgattataaaagcttatgactataatacttcgttagaaagtctagttcgtatttagaatgcataaagctgtgaaacttaattcggttcttgtatactttatgttatatattgctctatcccttttggacatttaataattcctttttggttattctcattaaatattttttcattggtgctcatatcttttttagtggcagccgctttatggtggatatggtattctattgccttgaatttgatgaatctttttttaatacctaagcgacgtaaacgtgcaggtaggtcaatatcttcaaaaccatatccgataaaccgttcgtcgtatccgttaacttctaaaagatcttttttccaaaatgagatattgcatccacgttcttttttattttgtttgtaggaatgaaataaagaggaaatccaagggagtcgtaatgcgttgaactttctatataccccctttgttaaaaaagataattgatagtttccctcttgtaacaatcggcaagatagcttctcgtttattttgctacggcttcctaccaaaaagtatccttgtcgtgcttcagatatatggtcttgtatgaaatgggagtgcatgatgatatctccgtcaatttctataatatagtcaccttcacaaatggcaaatgctttattcataatgacacattttttccagccgtcatcttcatgccagacatgtttgatggggcatgggaagtgatgttggaaatcttcaataagaagtcgggtgtccatccgagaaccatcatcagctatgattacttcagtgggaattaaagtttgttttgttacacttagtaaacataattttaatgcttctttccaattatacgtagaaatgactaggcttactttcattattttgttgtgttaaaaaagtttgtaatccagtggtttatttcgtattgttcctttatttcatttggaataatatgtaaaggagcactcatgaatgccggtatatcttcttctttgtcctcacccataataaaaatattattagaatgataaaatggataatttctgatattcggattgttggttatcagtttcttgttaaagaatagggcttccagtgggcgtaatgaaagccctgtctgttcgtccgtatttatgatatctaccagacatttactgttcatggtgtatttcaggttatcttgataggttatttctgtctctcctttcttcaaaatcagaaactgacagataagcccgtggctttctagtttttgttggcattgttccagcaattctgcacggtcttttttataaccgatgaaatagcaatccacttgttttttgggggagggcaaaagtgaagtgacattatcaggatatctgaagaaagaacctttataaatcagttggtactgatgggcatcaggataattgaaagtactcagaataaagtcatgttgcaataatttgataattttattccttgatgatggatcatatcgtttatagacctgataaataggagtccaataaaataaatatttggttgcctttgaagtgattacatgattaatgattatcagttcacgcaggcggaatatgtccatgacaatgacattagcttccggttcgatggaggctaaggcttgtaatgactcaagggtaaaatatttccgcttttggaggagtaagaaaccacatttttgcatgatttttctaacccgacgttgcaaaaatgtaagtttggtactttctaaacgtataatttttatatggtcattgtatactccttgcaaaatataatctaaaggaggatatgccaaataaataatataggtcatttattttcagtcttctctttgttttaatgtatttaccgcttccagcaaagcttttttcgcaaattctccttcactcaaaagtttacctatctgggctgttttctctttcatctctaggtattgcttttcactcagtgaatttagaatcccctctaaatcctccaatgaatcaatacatatccctatgccgttgttttgtacaaaatcagctaatgccgctttcttccaaatgataacaggcaattcgcatcggatatacaaggaagttttgtgcggattgttatattgaagatactccccaaaattaccagtgcaggcagaagcggaaaatccgtcccatactagaccgaaatcaccttgggtagtggctatcagatcgtctgatttcacaaaccccatgtatttaaaatgttcttttcctttagctttgtcaatctcaaatccattaccatagagattgaaactgaaagaatggatatattcgcctacttcatacaggaaggtattcttgcgcacgtttagtgcgccggcatataatacactgtacggcttcttgacatttggtttgggagttgccttggactcagataaatagtcaaaaatctcaagtacacccagtttcgccttgcatccattatcttccagccattttttcatcttttcattatgtgcaatgatataatcggcatgattcaaacgtttgatttcctgtgctactgtcaacgctttacgtcggaaacttcccaaatcatgaatgagtacaatcactttcgcacctctcagatgggccatgttgcaaacaaaggaaaaatattttttcaatgggtattgaagtaccagtttgtctcccttgtgcagacaaaaaggtgattttaatacaccggttaatgtggtgagaaatgataacacctcattagtgtaggtggtttgtcttaaacctacatttctgaaggacatcttttccataatctgttcaatatccgtctttgccttattaccggcactggacagtcctttgtaattacgtgacaagtagcagttcatagtttattctttagtttgttttctccataaagtaagggcggcagccactgtgtcgtccatatcggcgtaggcatattgtgccagacggccaccgaacagcacttcttttctttctgccgccagttctttgtattttcttaccatttccgtgtttcgtttgtcgtttaccggatagtaaggctctttgcccggtgcaaaatcatcgggatattcataggtgattactgtggtaggttgcgtaccatactcaaaatgtttgtgctcgatgactcgggtataaggaacgttgcgttcggtatagttcactacggcattaccctgaaaatcttccatatccaattgtcgggtatcgaaacgaaggctccggtattccagatgaccacattgatagtcaaagaattgatccagacagccggtaaagagaatcttgtcggccaatgcattcaattcctgacgattgttaaaataattagtgtccagacggacttcggttccttccaatagcgcatcgatcaatacgttataaccgcctttcggaatgccttggtaagcatcgttaaagtagttattgtcataaatgaaacggaaagggatgcgtttgatgatgaatgcaggtagttctttggcagaacggccccactgtttttcggtatatccttttatcaggtaacgataaatatcttttccacaaagcttaagtgcctgctcctccaggttggcaggttccgttatatgttcgtattctttacgttgctcttctatcttggcttttgcctctgagggggtcttcactccccacagctggtagaaagtattcatattgaaaggaaggttgtacagctttccttcaaaagaagctaaaggagagttggtatagcggttgaactcaacaaaactgttcacataatcccatacttccttgttgtctgtgtggaaaatgtgtgctccgtatttgtgcacatggatacctgctatatcctcacaatagatatttcctcctcggtggtcacgtttgtcaatgaccaggcaacgcttgcccacttttttagcctcatgggcaaacactgctccgaataaaccagctcctactattaaataatcatatttctccatagctatttttttcttcttgttgtcttctctcaaattcttctttcgtacgtttccagcggttatggctccataaccaatattgtggaacggcggttatcatctgttccagcttctttgtatatttatcagtcagtccgtaatcgggaacagacttggcattgtctgtcagttgcctgaactcgcagtgataatatcctcttttgatccgttttacatcagcataataaatcagtgcgtctacttgtttgccgattcgttctgtaccgatgaagaccggagtttcccgatggaagaactctgtccagtggtggatgctattccatttgggcgtttggtcggatatgaaaccgataattgtcttttgctttgctcgtctcaattctataatccggcggagcgtttctttcatggagatacattcaccaccgaactgattgcgcagacgcaggaaaagcttgttgaatgccctgttgtacaagggatgatagatttgtccgcaaaggatatcgtcaggaatccaataaggcaaagaagctatccattcccagttgcaatagtgtcccaaatatacaaaacaaaaatttttctcctctgtttccattttcttcactatttcttccacccctccgaaagtcatccgtcttttcaattgtttcttcgatatggagaacaatttaagagtctctattatataatcgcaaaaaaagtgataatactgcttttctatgcgaattattttttcttttgacagttccgggaatgattctgtgaggtttttccttacaatacggcgacggtaacggacacagtagtatataggaaaatagagcaggtcagagaaaacatacagaaccgacagtggtaagagcgaaagcagataccagaagaaaaagataatatagtatataatcttcattagcaattattttttattcctatccacgactgaagcttacgtttcttttttcgtttctgttcgaacagcagcagatagcggaaaacttcaagagtacattcccgagggttccattctcgcaaagtggcgtattgtatcacaatatagcgcaaaagagctttactgtgcgttaagcgtttcaagttctccaaacactcttgtctgtcaggagccggtttgaacttggaacggttggtgtctatcagggtgaactcatattgccctttcttgtctgtgtgatacagaatattggtcaggttcaagtcgccatgaagcactccttttttatgtaattcaaccatgtaggcagccagttcatcagcaggatgtcggtcaaaatcccgtttccgcaataattccgataacgggggatagctacagttgagtgacacaaagtagccgtctagaaacaaaccattcttcctctgttctatataagctacttcatggggggtgtcaaaacctctttcccgcaacatcccggcaaaaagataagctctttcagtcttgcttttcttgaaaaaggtataaacgattctttgtatcatattaggtcgcttgtatcttttgacaaccatatctttaccattcaccttatatcgtttcaccttattccggctgtcgtacaataattcaccttcctgttcaaagaactggggaagttgcttgatgaaactggctgcatcagcgaattcgggatgaatcactattttcatacacagttatgttctttaatcaattacactttcaatgcgttgtactaccatttcgggagtgattccctgaaggcaggcataatccttccttaagcaaggcttgttcccgaaaacggaacagggacggcagggaagatctacctggacagcatgggtagacagctgcttccagcccatgaatccggcgtatggatgggttgccccccaaatggagataacgggaatatttaccaaagaggccagatgcatattggcagagtccatagacagcatgacatctagatgactcatcaacgccagttccgagttcagtgtcagtttgccggctgtagaaatgacattagtgaattttttcgcccatttctccaatacctctatctctttccgtcctccgccaaacaggaatactctggtgtctttccgtgtggaaagctgttctattacttgctcttgtttggacaggggatagatttttcctacatgtgcggcgaaaggtgcgattcctatccatttgtcttttcccttatttccggttagtggattcatgcattgaatatctcccttcttgtttccgaacaaagatacgaaattcaattgtacggggtaacctatatcccttaatacatctgcataacgctgaaaagaggatttctggcattgcatcactttatgtttggggcgtaccagctttcgtttcccactgcgccctttgtctagatgcgctactttgacgcccgacagtttgaaacgccagcgcaggtatttgctgcgaagaacgtcatgaaaatcggctacagcgtcaaactgttcttccttcagatcattgtacagccatcccaatcccatcactcctgcatgttcccctctcaggtccacaccacggaaaaggacattgtcgggcagttccttgaacaggggggcaagtgtatcccggctcaacaccataatttggtgttgagggtattgggtggctaaagaatagatgaccggaatggtcattgccacatcgccgattgctgagaaacgaattaccagaattttggccataaaattactgtttatttctttccgtatagtatggggttcagagcagggtcgttatacattttcatttgtttatacactttcatgtatttgtatccggctttaatatcagcgatcagctggtctatggcagaggacaaatccttttgctgctccagcaggatgctcagtttcttttcgcattgtgtgtgatgttcgggagttgtgtcggtacgttccacttcctggcgcatgtggtatattttcagtgccagaatggaaagacggtcaatggcccatgcggggctttcggtattgattgtggcgtcagcgttgatctttacttctttgtatttgtcaaggaagtaactgtctatcagttccaccaggtcggtacggtcctgatttgatttgtcaatgcgtcttttcaaagccagggcttccaccggatcgatattcggatcacggataatatcttcgaagtgccattgcactgtgtcaatccaatttttcagataaagataatactctatacttttcaactcgtatgggttgttgatgggagtatccacattatcagttttgtgatagtcattgatgacttgaacaaaaatagggttgcaaagttctgtaaatgtcatagctgcgtatttttattattatcgttataataattgagaagacaaatctatgcaaagttttctaatcaaccaattattattcggtaaaagtgcttacctttgttcccaagcaagtttttgaaagatgaaaataattgtagataataaaataccttatatacatgaagctgtcgaacagatagccgatgaagtggtgtatttgcccggcagtggttttaccgccggggatgtacgggatgctgacgcattggtgatccgtacccgtacccgttgtaaccgtgaactgctggaaggaagcaaggtgaaattcattgctactgcgaccatcggttttgatcatattgatgtggactattgtgatgaggcgggaattgtatggaaaaattgtcccggttgtaatgccggcagtgtggagcagtacctgcattcggtattattattgttgaaacgccggaagggggtgagattggaagaaagctgtctggggattgttggggtaggacatgtgggaagccgtatccaacgtatggcggaggcattggggatgcgggtcttgctgaatgatcctccacgtgcggaccggggggaaacgggatttgtggatttgtctgtactggcaagggaatgtgatataataacctttcatactccgctgaacaggaatgggaaatataaaacgttccatctggcggatgcggatttctttgccggtttgcaacggaaaccttttattgtgaatacttctcgtggagaagtaatagagacattggctttgcttgatgcgctgaagacaggccggatacgtgatgcggttattgatacgtgggaaaatgaaccggatattcacccggatttgttgcagaaagtttttttgggaacccctcatatagcagggtattcagctgacggaaagtcgaatgctacacggatggcattggaggaactttgtaacttcttccatatacaggctgattttaaaatagtaccgcccgctttgccgtatatggattattcttctgatccggaagaggcttttctacaggtgtatgatccgactcgtgacagtgatgcattgaaacggcatcccgaagaatttgaacatttgcgggggaattatccattgaggcgtgaaatttcttttttaccgtagggggacatttcaatgtacccctacggtggccagaacttttagtctgcttttgctgtttgcatctcttctgctacaatctgttcgcaatcttcaatgctgtatcccgatgcgggttcgctccaataccataaggcgggagcttgttgtaatgtatccataatcaattattttttagatgggttattcaatgttatagttgtttccgaatgttggttgccgcccagaatacctgttcctccctccacattgctgtaaacccgtagaggttcggccagtccaatgttacccaagcctccttctaacgtgcttccggcaattttttgtaaggacaacaggtataaaaagtaggattcggaaagggaatagatggaaatgattctttgttctgtttcgtctaactctgccgttgtctcttttatttgtaaagtataggtttgtccgttaatgctttggtcggtaaagagagctcctcctcttttttccaatccgttgaatgccatactttcgtccaatatggcatcctgttccttgaatacaggatctatataatctatttctgtttcgtagtaaccgtaatagcccgtttttatttgtgtgattttggccagataataattgttcttttccggaaattcatcaaacgtgacttcatagtatatttcaaaatagtcggaaattgttccttgataaactccgttaccttttttaattgtatgactggcgttttttataggtactttctttggtatgatatcttctgccgttaccgtaccatattcgggggtggatgcaacaatttttatccggtctccttctgccgggattgtatttgaaaggaataaggtatccggctggtctgggttccggggattattcagtgttttccattgcatggtttctatgtattgattgttgatatagagctccacatgggcgtgagggagattgacataaggcttcttgtctggatagaaccaggtccgggtgatggaggccattaccactgtgtcgggggatactacactgtttattaccattttgggcgtagtgcgatattcgttcaaatctatttttcgataacaggaggtaaggaacactcctagaagtaatgtatatagcagatgtttcataatcatttaaaatttataagtgtaagaaactgatggtataatgggaactatgcccagggtatagaagcagtcgttattataccaccatcctttgcgtatgctgacgggtgccatgtaggaatagacattgtagatgctgatattccatattcccatccggttctttttctttggccggtaaatattgatgcccaagtcgagtctgtgataggcgggaagttggaaattattacgttccgtataatagtctaatccgcctggatctatataaggaggaaccaggctgcctcccggaaacggatgttggggagaaacggcctggtagttttcgaaagaaaccgtgagccggttaccggttgcgtaggtccagcttccggtcaactccagtttgggcttgattttccaattggctattatattgaatttatgccggttgtcgaatttggcaggaaaacgcttgcctttatttatctcagtgaactgtctgtcattccagcttagagtatagcctgcccatccggttattttccctttttctttgcgggcaataagttctacgccgtaagaacgtccttttccttgagtcagtttgtcttcccagctggtggaaggagggagaaactggtagttgtctttatagtccatcagatgtttcatccatttataatatccttctatggagaaagagtagattttgttgccggtggtgtaataagctcctacagccagttggtcgctctgcatcggtttcagcttgcggctgaccggtatccatgtgtctgtgggcaggttgatgtagctttcattgacttgatgtacatattggctcatccgggtataagaggctttgaggctgagttgcggattgatcaggaaacgactggaaaaacggggttccagggaagtgtacgttttcccgtcaatggtgtatagtccgaggtgaaccccagcgttcaaacgtattcttttgttcattttccagtcttcttccatatatatgcctaattcatgtgcaggcagggcagtgtcgttgttttgtctggtctgggtggtcatgccattggaaaaatgcgatttttcgtctacgggatgaaaacggtggtaaatataatgagtgccgaaatgcaactggtgggaagcattggggcggaaatcgaaattggctcgtatgctgaggtcgtcaatgcggttccgggttgaactttcctgtgatacgtagttagcttctgttccttggtagtagtctcctttcaaggtggaagaatagtgggtaaaggcggcattcacattaccgaagagttggttgttgaatacgtatgaccagccggtaaatgccatgatgtttccccatcgcagtctgccggtgtttctgctttcatatccgttgtcaccttctcttttttctcctcccttcaaaaaatcgtttccccagtaaagaccggcatatccgcggctgcggtcattgaactggtggttgagtttaaagttcatgtcggtaaaagcgtatcgtgccactatttgggtttctcctttatttctggtagcgttccagatggcgatggttggggccgaaagcgcgtcaatccatgaacggcgtaatgcaaagttgaatgaggtccggtctttgaccaacggaccttccagattcaggctgcctgaggtcagtcccagcatggcgcttccgtgatattctttcatgttgccatcctttgtatggatatcgactacgctggacagtcttcctccgtaacgggcggggaaggcggacttaaagaattctacatcctttacggcttcggcgttgaaggaggaaaacagaccgcccacatggttgatctggtataacggattcccttctatcatataaagattgtcgtctccattaccaccccgcacatacattcctgccaatccggctgtgcctgccgatacacccggcaaggtctgtagggtttttataatatcagcttctccgaataataccggggtttgttggatcaggtctttgttgagacgggtatgtcccatatcggatgtttggactaatggagaagaggtatattctccggtcactaccacttcggctaattgctggtggctgttcagcagaaccggaagcagcgtgtcttgttccaattgtgtgaatgaacggtggaaactgtcataacctacataggagatgttcaggtatacatcgtttccggcttccagagtcagactgaaaaagccgtcggcgttgctggttgttccttgatggcttttggcatcatagatggaggcgcctataagggactctgaggaggatttgtctcgtatgaagccgctgattacaatgtttttctgttttttcttgaggatgatgtatttgcctgattgtatatattctacgggcagtttttgaaacagaatgcgcaaacagtgggataacggctgggcggttattgttatatctatcggtaacagatgttttgttaaggaggactcatacgaaaaggttacacctgtctgccgggtgatttctgccaaaactttacggatgggggtttgtttcatatctaatgttacgaggggctcatcatgttctgttccttttgcctcaatacaaatgtgcatgaggcaaaggagcagaagaaaagaaaatttagaatggaattgcatcattgggttatgtctagtttcgtatctagtgtttggtttatgatttcaattatgtcttctatcggagtattgtcaaaggtcgtggtcagatagtactctttttgtggaattccgccgatatggaccttatagacttcttctaattcttttactacctttttcaagggggcttcattataaacaaacacgtgggtcttccatgcaaaagtgttggggtcactttgtttgtttatttgcatttgtcctttttggttaatgaaggcatacatgccttttgtcaggatagcctctttttgttctttgttataaaaacggacttttccagactctacggttgccgaagtctgatttgcatttgccgttacttggaattgtgtacctagtacttgtatgtttgccagttcggtctgtaccctgaaaggacattgttcttgatgtgtgactgaaaaatatgcttttccatttaaagtgacgttcctgttttttttgccgtatgccaagcggtcatactgtaaggccgaattctctgccagcgtaatatggctgttatccggaagcgtgacttctttgacagcgtgtgcggatgaggcaatgacaatccagtcttgcctgtcgtatatccaccaccaactgaatccggctatcaggaaagtgacagcagcgatagttatcagtctatataataagatagagttatttctttgtttgccgatacctagtttttgccaggcttgtgttgtgtccagcctgttttcccgatagaaccgggctacaaaacgaatatctttctcttctttctccatgcgatcttctttctttttattgttaagacagggaaaagacaaaatccccctattcgcttgccgatttttttatccgaagaaaaaagtatatattttaatggctgtttctcgtaatgttttcagtgccttactgatttgatgttcgacagtttttatagaaatacccagttcggtggcaatttcctgataagtaaggccgtcacgtttggaaagcagaaagatctttttccgttcggtaggaaggtggtcgatggctgtccataaacgcgcatcacgttctgaccggatgatgcgttcttcttctgttaaatcttccaagtctgtcagttcggttgtttcacagtgtgtttgtcggttggttatcagtgtgagtgagcggttacgtacagtttggtacatataagctttcaggttttgaatagatgtgcctccgacaagcttctcccatacatcagagaaggcttgttggacgatgtcttctgcgtcatccagattttcagtatagcgcagggcatacatattcagcggacggtaaagacagcgaaattggtattcaaattccttgggtgataattgcatcctgtgttttattcttttttggaaggcaaacttacggcttttcttttatttgccaagcaacaagagatgaaaaagtctttaatttcatttagtaatgataacaattcgggtgcgggaggttattgtatcggcttttcggaggtagtcataaaatagggcaaacctcacggtctgccctatccgaaactttaatatggaatacctattgaaacaaaaatcacagtctttaccttaaaatattgcctttaaaagtttcctttatcagcattatcccaccaaagatgtgtaccgcctttgtcgccggaaataccgaatttgctggaattttcttcgtccagaagcttgattccgccttctactcccttagcgttggcatcataagcctggctgctataaattacgcggcgcacaccttcttctgtgtttacggctccattactttcattgacgaatgcagggaagaagcgtggatagccggtgcggcgttgttctgcccagccttcggtggatagagggaatagggcgagccatttttgggtgatgattctttccagcttttcttcgttgcttgcgctctcatcccattttacacttaatttatttacagccggagtgcttaattcggctttgatgggatctgtatagtctatttgggtgcttgttccgttgatgtaggcatctactgctccttccggatattctttgattccggcataagccccccgataagctaattcattagtcatggaaacacggattccattttcatataggttctttacactttcactgccgatatcccatcttaattttgcttcagccagtaggaaataggcttccgctgctttcatgatgggcagtggcatggaataagaggaaccgttgtttccttgaatccaaccggagaagttaccccaactgtttggtttggcaggcaggccactggcaaaacggatacccaggtattgactattggcagctactgtggtagtaccggcttcgtttttgatatctccggtattcagggtcatatataacggttggcgcggatctttggttccactcataatagttaccagattggcattgaatccacaatcaccccaattgaacatcagccacatttcattctcaagacttttatcgatcagaatatccttgttgactgttgccaaagtgttttgggcagcctcggtagcgattgccttaaggttcattccggcgttgccggcttcggtttcccgtttggacaggcgtaacgccatgcgtagtttcatcgtattggctatttttacccataggtctttgtcgccgttgcaccaacagtcaaaggatttcaatttggctatttcatctgctcccatggcactgatgtcagtaatggctgtactcagatcttcaagcatggctttatacaggtctttctggctgtcgaactcgaaatacacttcgttttctcccgataggatggagctgtaaggtatcggtccgtaggcatctgtggtcatcaatgttccgtaagcctgtacgatacgcatcacgcctgacaggcctctttcaccactggcgtcacattgtgcgatgatgcggcgggtgttattgaaaatatggagataatagttttcgtacataccaccgctatgtccccggttctctcccatatcaccgttggtgaagttaccgttgggagtcataaaataacctccataaaggtcaatagtcaggttggtccaaaactggaacatattttgctgaggaggataacagtaggtcatcggttcggtacattgtgcggcaaaaggaaggtctgccggatctacctgtatgttactggtattcaatttctcgaagtcgtctgtacaggaagaaaagatgtttcctgtagtcatggggattgccattaagaaggcgtatgttaatatcttattccgtttcatagtttcaagcattagaagttaagttttaaattaagaccaaagctgcgtgaggtaggcagtgcaaacatatctacaccttgtattccattacctgtacctgccgatacatccggatccatcggggcgtctttatggaagaaaaacaggttgcggccgatgatggctgctgtcaggttcttgcctgcacccagcaagttacggaaggtataaccgaaagtcacttcacgaagacgtatattggtagcatcataaacatagttttccacagcgtatggactgttgaagttgttgttaccggtggtacgatagtacttgtcggcatcaaattttactccgtccactgtaataccgccggcatcacgggcttcacctgaacgtttcgatacgccccatccgtccaaggcggcttcggtcatactaatcacttttccaccgaatttagcatcaatcaggaacgatagtgagaagtctttgtagcggaatgtatttgtccatcccatatttactttggcattcatattgcctgcgtattccagttcgtccatagaatcaccacttacgataggctctcctttttcgttttgcaagggtttgccgttttcatcacgcatcagatgacgtacatacagatctccgtagtgaccgccttctttcaatataacttttgcacctccgaaatcggtcaatgtcagtccgttgggaaggtcatctaccaattctttgattttattatcattataagagaagttcaggttggtactccagctgaagttgtcagtgaactgctcgtaccatccgatattgaattcaaagcctttgttttctacattaccggcgtttacataacggtttctcaagcctgattcgtaaggagccgcaacggagaagaactgatttttggtgttggttttataataagtcaggttgatattcagtcggttctgtaagaatgtaccgtcaaaaccaatttctaaagaatgggttttttccggcttcaatgttctgaacggagctttgtcggggggagtgatggcaccttgagaacctagagaatagagcagattactcatgaatacaggtacgtcattacctacgatagaatagcttgcacggaatttgaacaaatcaatgttcttacccatatctacaaatttgttcagcaggacactacctccaaaagagggataaaagaatgaacagctttctgtgaaagccaatgccgaagaccagtcattacgtgctgatatatcaaggaatatgccttcacggtaaccgagttgtgcggtggcgaatactgagttcagccgtttttgggtcatccagttgtcatctttgcccacggtggacatattgccataatagttgttcggagtaaagatgttcggataaaaaatgtttccggaaccgggctgtgagaactgggaaccctcgccccataggtctacatgagaggttttggtttttgtaaaactggaacctgcggtagcggatagagaaaaatcattgaatgtatggttgtagcttactaaaacatcgccataaagttggtcgctgaaatagcggttgtctttcatgcgtcccatcggataaaggtttcctacgctggatgcgtaagcattgtgtacccagtgttcttctcctctttcgtaacgcatacgtccttggatattcagatccggagtaatgttccatttgatgcttccgccgaattcatagcggttacggtcggtgataggggtctgtctgttcaacatccaatatggattaccgaattgctgttgttgtgtatttgtccagttttggacatagcagcctcttgcgggatcatatacctcgaagttctctttatagccattccagtcttctcctctagggaagagataaacaccggtcagcggattccataagtaaccggcagctgcctgattggtgatgtgctggttggtaaacttggccgtgaaatcaatatgaatgtctttcagaatattgaaacctacttttgaattcaaattgtggcttcggtagtcattctggggagtgatgccttgtgaatagacattggcataggaaaaataagattggatattttcattgcctccgcttaaggagatggagttattcgttgtaaatccggtacggaagaatttttttgcatagtttggagctttgctgcttagtttctcaccccagctgaaagtaccgttgtcgctcattccataagtagtctggaattcgggtagcaccattgggctctccatcgtggtgttgctggatacattaacggaaactttacccgactgtgctgatttggtggtaatcataatggcgccattggctgctaccgcaccataaagcgctgctgccgatgcacctttcagcaaagtgatttgggcgatgtcgtccggattgattgtagacatggcgtcaccaccgtctcgctggcctccgtagttgctgtctacttgtgagttggtgatattcatcatgacaggaactccgtctactactactaacggttggttgttaccgctgatggacttattgccacggaacagaatcttggaagaaccgccggctccggttgagttcggtgtgatcatcataccggcacttttaccttgcagggagttaatcatattgacgctcttgatgtcattaacgtctttacctcctactgtttgcgcagaataggtcagtgtttcggattggcgtttaatacccattgccgttactacgacttcacccagtgtttctgtatccgatgccatttttacgttgattactgtacgtccgtttacaggttcctctatggttttcatacttaaataggagaataccagaatgtctttgtcaccggcttgcagggtatactttccgtcgaggtcggtcactgttccgatagttgtacctttaattaatacgtttgcgccgatcagaggttcgttagcgtctttatctattacagtaccgctgactgtatgcgtttgtgcatacaatgctgttacaaacattcccaataggaatgtcaggaaaaaagtaaaaattcgtctcataaggttagattttgaggttcgttctttattagatttttgttttcagattaaataataggtttgttgataattgggcatgtttacccaatgggtttgatttgatagtttttcgcataggcattcagtttaaggttaacttatcaaggtttatttattaaggtttctgttaatctctctttaagtcggtcaacattattaatacaaatatcataaccgggttactaaacaaaaacttatattttttgtattttatctcattcttgttttcttattttgaaataaatacttatgtttgtgtaaccttaaattaaaaatgacctatgaaccttaatgataaccgcttaattattaaaaccttgaagtcgggagatcaaaaagtattttccctggtttatgcttcttattacaagccgctatgtttgttttgttcctcgtatgtttctcttgaagaggctgaagagatagtgcaggatttgatgatgtatgtgtgggaaaaacgtgagttgctggtagaggacttgtcgctgaaatctttcttatttaccagtgtcaggaacagggctttgaattcaatcacccgttcccatattacccgtcaggtatatgaagaatatcagagccaacagttgaaatctctgccggcattggattcttgttatggcacggagttgtttaatacctatatggaagcccttcattctcttcctaaagaactgcaaagagtatatgttatgagtcggtataaacaactgacccataaagaaattgctgacaagctggaggtgtcggtgcagactgtcaattatcggataggcaaagctcttcagttttttcgtattagattgaaagatttttgcctagaatagtcgcttcaatcacccgagggaaatattcgtattccaactggtgcacccgtattgccaatgtatctggcgtgtcagtgggcaataccggacaggtggcttggaaaatggtatttccttcatcatattgttcatttatataatggatggtgatgccgctttccttttcatgggaagctatgacagcttggtgcacgcgggaaccgtacatacctttaccaccgaacttgggaaggagggccggatgaatatttactattttattcggataatcatgcaaaatggcatcaggtacttttaagaggaagcctgccagtacaataaagtcaatatgatattggtgcagtatttccagtgctttcccgtcggcaaagtcttgggctgtgaggataagtgacggaacactcagtctttcagctcgcttgagtacaccggcctgtgctttgttgacgataaccaatgctacttcagctgttcttttctctaaaaaataccgaataattctttcagcattcgtgccttctcctgaagctaaaattgcgattttcttcatgatgttctctattttggtgcacataaaacaaaaaaatgtgcaaaattctgcatttatttgcctgaatatttgctcagcccaagaaatatttattcctttgcaaccgcaaagaaaataaaataattcaatttattaactaaaaaattaaagttatgtctgaaattgcatcaagagtaaaagctattatcgttgataaattaggtgtagaagaatcagaagttacaacagaagcaagcttcactaacgatctgggcgcagattcactggatactgtagagctgattatggaattcgaaaaagaattcggtatttctattcctgatgatcaggctgagaaaattggtacagtaggtgacgccgtttcttatatcgaagctaacgctaagtaattatccttattttataatatggaattaaaaagagtagtagtaacaggtcttggtgctcttactcctgtaggtaacaatgttgcagaaacatgggacaacctggtgaagggggtaagcggggcaggacctattactcatttcgatgcgtctaaattcaagactcattttgcatgcgaagtgaaaaatttcaatggaactgattacattgaccgtaaagaacttcgcaaaatggatctgtatacacagtatgccattgcagctgctaaagaagcggtggaggattctggaatggacctcgaaaaagaagatttgaatagaataggtgtaatttacggtgtaggtatcggaggtattcatacttttgaagaggaagtagctaattatacactgaataaagatactgtcggaccgaaattcaacccattcttcatccccaaaatgatagctgatattgcatcgggacagatctctatcatgtatggtttccacggtcctaacttcacaacaacttctgcctgtgcatcttcatcaaatgctattgccgatgcatttaactatatccgtttgggtaaagcaaatgtaattgtggcaggtggtgcggaagctgctatttttgaagccggtttgggcggttttaacgctatgcatgctttgtctacccgtaatgatgatccggaacgtgcatcccgcccgtttagtgcaagccgtgatggctttgtgatgggtgaaggcgcaggctgtctgattttggaagaattggaacatgcaaaagcacgtggtgccaagatttatgcggaacttgccggtgtaggcgcttctgccgacgcttatcacttgacagcttctcatccggaaggattaggcgctaaactggtgatgttgaacgcattggaagatgcggaattgaaaccggaagatattgattatatcaatgtacatggaacttcaactcctgtaggtgatgtttcagaagtgaaagctatcaaggatgtatttggagatcacgcttataaactgaatatcagctctactaagtctatgacaggacacttgttgggtgctgccggtgcggtagaagctattgccagcgtattggctgtgaagaatgacattgttccgcccactatcaaccatgaggaaggtgataatgatgaaaacattgattataacttgaacttcacgttcaacgaagctcagaaacgtacagtaaacgctgcattgagcaataccttcggttttggtggacataatgcatgtgtaatcgtaaaaaaatatgctgaataatcgtgtttagcaatataaaggataggataagacttctttttcgtaaggatagggagtcttatcttcgtttttataagatgcttggattctatcccaaagacattagcatctacgaacaggctttgcttcacaaatctttatcagtgaagtctgaaaaggggcgtttgcttaataatgagcgtttggaattcttgggggatgctattctggatgctgtggtggcagatattgtttacaaaaggtttgaaggaaagcgtgagggttttctcacgaatacccgctctaaaatagtgcagcgtgaaacattgaatcgtttggctatagagattggtttggataagctgatcaagtatacggcccgccagtcttctcataacagctatatgtgcggcaatgcattcgaagcattggtaggtgctatttatctagacaggggatatcgtgcctgtaaatatttcatggagcatcgtattattgggccttatataaatttggagaagatttcccgtaaggaggtaaactttaaatccaagttgatagaatggagccagaaaaatcgttttgaggttacctttgagctgataacccaatcacacgatcagggatatagtccgactttcgagagtgaagttttggtggaaggtatttcgggaggaaaaggaaccggttattctaaaaaagagtctcagcaaatggctgcgcgtgtggctttgggaaaaataaagaatgattccggctttattgaatgtatttttgcggctaagactgcccgtgagctgcctcaggaggaggtaacggtttctgatagtaagccttcagacagtggggccgttactccggatctttctttggaggagattaagaaaacggatgtggtcgagcagataatcagtgaagcggaagaaaaggcttttaaggaaaacgcttagcggattttattgatattgtttataatttattaattagctattccggtggtttgggatatgtccggcaggaatacataatacattggaatatgcccgattacatcaagaaaatgtagtcgggcatatttcatatactgacgggaattagatttcatcaggccacgggcagggttttcctgtggctttgaatgtgggacgttgtcctcctgttgctcgcaaatagttccctaattccttggagagccgttttacgatgccgggatgttgctttgctacatcatttttttcactgatatcatttggtatgttgaaaagttcttttttaccggtttcataataatagattagtttccattcgtctttgcggatagagcagtccagattgatgcctggtccgtcattcccccagatattagggaaattccataccagtgcgcgtcctttggacgggtctcctgtacctttcagcaggggcataaagctgataccgtctatagggttgactgtcttatagtttgtgatacccgccatttcaagtatggtaggataaaaatcttcaattataagatatttgtcacaacgagtattcggggtgactactccgggccagcttacaatcattggttcgcgtattcctccttcatataaggagcctttaccactgttgagaggagcgttttgagtgtgaatttgtccgtcgcgccatccgggttcggcagctagccctccgttgtcactcataaaaataataacggtattatttgcttcatcatttttttccaaccagttcatcaaatcccccagacttttatccattccttcaattaaggatgcatatgcggcttctttgtcactaagtccttttttaatatacttggggaagaagcgcatatctttgtcaacaggaacgtggatggcataatgtgccatatatagataaaaaggttgattgtatttttttgctttgtccaatgctttgatagcttctcgtgtcagggcttctgtagcaaatatacctgttccccaataatcttccaagccggggatagccattagtgaatagggttttccatcgcgggtgtgcccgtagttctgttcgctcagataagtagccagaccaccggcggcatgtccggctatatttacttcaaacccccaatgggtagggttctctcccggtgtgtcaatagaaccgaaatgagcttttccgcagtggatggtatgataaccgttctgtctgagtaactcaacgaaagaagtgccgacaaaggtattggacgttcctgttacttggctgactccgttgtagttccagtctggtaattgtattgtattgcttggtctgtcggtagctttgtttttttcaagcgtccagtttgttacacgatgtcgggtgttgttggcacccgttatcagactgcaacgggtagcggaactgatattgcaggcgtatgcctgtgtgaacatcatcccttttttggccagacgttccatattgggggtttcataggtttcgttatagtgggttttctgtgtccagaaaggtaaggatgtatcttgccaacccatgtcgtccaccataaataagatgatattgggacgttgttgggttgtttctgaagacattttttcttttgcttgcgtcgagattcctgttaaggaagcgagagcgaaagatacaagtagttttttattcatatcggctggttttataagttatttttcgattacaattttttggggggtatctatggaaatacttctcagttcttgcttgctggaattttctatccatacttttagtgtacctgtacatagtacgttcagctccaaccgattctctgttaaagagatagtttggacggtgctcggggatagatatttttcctgtacgccaatgactgcccatcctttccgtatggggcagagatgaaacagtttgtctgtaaatccgatgagttcgaatgtactgctgtctgatagttcttctgccttttgtgattcccaattataaagcagcacgcgttcttcggaggtggcagacattttttcaaaactgttccgaagagaataatcttctttttttataatggcttggacttgctgatgccggggggaaacattcaggttgtaacagattaatgtcattgctccgttgcctgagggagctgctactcgatacgcttttccactccataatggattggtcagtatagattctggcataggtacggcgggagcttcgggacggaacagtttgccttgttcgtcaattaaggggaaaatgttttccttgataaagtcccgaggggcgtccgacaggtagaccggacctccggaaatagccttggaacgtgccatcaaggtgccgcaaacggtatcgcaggaatgaaacatatcatggtcgggccatacggtttgtcctagtagcaaggtattggtataagactggaatagatgtgattttgccatatcctcatcatatttcttatagtctatgctgacacgggtgctgttactgtatgacgtatggtcagtattgatgacgttctgtgccatacagttcattagtcccatattttgccggtgggtctcggcttctaggcttcggttacagtcggttgcctggcggatactttcatggcctcccatgtagagtggtagtgtaaaagcttggttatctactttcagaaaatcgaatccttgttcttttaaggtgctgacgtagtagcgatagaaggaacggatgcgggtgctgtccgttcctggcagaaggctgccggcgtgtgggtatagggcttgtcggacgacttgtggaaatccgttttcgggggataatcccatccagtatcccgaaaggctgtaccacagtccgatccatttgattttattttcttttttgtatgacatgatttttttccatcccgacgggaaacgttgtttatccggtatgaaatcggtcagttgcctgttcttgtgggcgagatgaccgtcgtcaatcagtacataccggataggaataccggatgcctctatcgttttcatatcgtttattaccttggattcgtttatatcatcatgataatgttcccatgtacaccaaccgagatagcggaaagcttcgaaatattccttggctgtgcggctttttaagtcggcggcttctgtatttttcatcagcgcttgataggcttgccgaatggttgaataaatatcttttccttgtcggatgagtagaagagggacttccggtttcagatagtcttttcctaaagtggatacatatagggtgacagagccgttatcgtttacttgcagccagcttaaactgttacggccggcaatggctttggcaaacaagtattctccgtttgtcagttccagcagtaatgcatctcccaacgtagatggggctgcattggaaggtattcccggatagcgggtgtcggttaattcttttaaatcgttgaacacccaaggtaggagccggttggtattgttgggccattcaaaatctcccggacgggagtctcggctgaagaaaatacctcggacgtacccgggtaaccgtaccggacaggcaatagtctgggtttgtccgggtatggatttcttatagggtatgggagaagaaatggaagttaaatcaatcgtatctgtcattgacaaagcgtttgtgttcttgaaagactttcctttttcatatgtgtaatctgtttgcccgaaggatttcggacaaacaaatacattgcaaatcaggatacaaatgaatattgctttatattctctcatgattttttatttgagggttacgttataggcactgaaatgtctgatttcgggtaaggcaacggattgggttacggtgaggcgcaaggcggtggtttctaccggttcgaagtgtgcaatgcgtttgtgtcccacagactcgccggagcacactgtctgccattttccgttgactttcgcttctatcttgtattggcgtattctttcgcctttggcaatgtcttcttggatgatgcagtagttgaccggttgtttttcattcagattcagcgtaagccgttgcctccggccttgggtttccgccaatggtgtaccaaagcgccggtttatttcttctccccattcttttaaacgctgttcgtcacctgccggcaatagcccatcaggatcgggggtcagcccgatgattaacgtagcgttgcggcccactgatttttcgtacatatccatcaacgttgtcaatggatagatattattctcgtcatcgggttcccaaaaccattcgtggcggccgttggcaccacgcagggggctgtctgccatagccggtacccagtatttgccttcgggatcaccttgttttaataaggctatttggtctttttggctttcaatacgtttatgatgtgaacagggggccggaaaagtggaccagcaggggtatcccactgtgccggtttctgaacctccccagcggaaatcagcacggtctatgttgtggtagaacaggcagttgggttggtatttattgacgatgggttccacatcaggaccgtcacctcgtgggtcatcggctccgccatcaaaccaaatcatatataaatctccatagcgggtacaaagttcttccaccattttctcgcagaagcgtttataccacgcctgtcggttggcggcaaattctccgtcatcggctaccttgaaattatggatacccagaagtgaattccaccggatgcctacatagatgcccggctggataccatacttacggcaggagttgacaaagtcgcggacaatgtctcctttgccgtcacgccattttacagctttcaggcagtatgggtttacgtcactttgccacaatccgaagccggtttcatgcgtggctgtgagtacggcgaatttgcagcctgcggctttggctgcctgaatccattggtcagtatccagttgggtaggattaaatatattataatcttcaatggggctgatacggttattgccttgtccgtagcggatgccgtcgaatacgtggaggtcataatgaaatacggctcccatttccgcttcgtgccatttcaattgatgcggtttgggtacaatgatttccggttgtgcaacactcagtacacagttcataaggaagagaaggaatgtatatagtatcttcatgggttataaataatttaaaaatggatcttctgttttttgcagccatgtttttaattggcttttcagtcggtttaccagtttgggatgctgcatagctatattattcatttgataagggtctgatctcctgtcgaatagaataatcttatctacctttccatcggttgcatggatagtaaacgtatgtgtgtcggtgcgtaatccccggtagcctgttgccggattggatgactgtatgtaataatagggttggacaatgcggttgttttcttttccgcagaggagaacggaagcgaggtcgaatgtttgtacttcttccggtatttgttgctgaaagcccatgatggaaagcagggtcggatacaagtcggcaaaagctatcatggttgttcggtcggttttcggctttattttttccggccatgagataaggacgggaattcgcatggattcctcataaaagatatcttttccggcttgttcatgagcccccatgcagatgccgtggtcagaagtgaatactacaatagtatttttaaataaacccaaacgtttcaattcgttgattatccgacctatattttcatcgactccggtcatgcaggcatagtaattgcggatattgtttcggaaatagtcacccatttcagtgcctttggcgggaatgtcgggacggttggcacataatgcctctacattcaggtttttatacatctccttgtatcggtcgggcaccaactcgtaaccggtgtgtggagggttcatggatacgactaaggcaaatggctgcgttttatctatatgcccgttgaggtactcaatcgctttgtcggcttcatactccggtccccattgattgacataataaaaactgtcccggggagcgtcagtgtcccagtacatgggttttaaatggtagtcgtaagtgccataagcggtccaatagtcaaaaccgtgtcggcgttcttttggacaccattcgttccaagcaactgcaccatggttgttgtaagtatctatgtatggttcataaggagcatccagatgccatttgccgatatatcctgtttggtatccattggctttaagtatatcactccagcagcgtgcatcttgtggaagttctactccataaggagcgttggcagaattgcaattgcctgttactttgttcttatgcggatacatgcctgtcatcaacatgcctcgtgctggtgaagatacgggatagctgctgacagcattggtgaaattcacaccttcacgggccagttggtccaggcaaggtgttttgacaggttcttttccgagacaacctaaagcatctcctctccattgatctgccatgatgaagaccaggttaggtttttcttgagcttgtaaatagatagaagtcaagaacggaaagatgaaaaatgtttttttagagaaaaatttcatattaattcggtatgatattggtaaagggtgtgttcaaaggtacaataagaatacattgtaacgaattaaactacaccctttttgagttattttatctaaacctattgcagagcatattgattggcaccgacaggccagcctggattttgataaacaacggaagtggaaatatcgcctcctttctcaggggttgaaagacggaatacgtcataagagataggggtcaggtaattcgcttcttcaaagttgtagccattgttggtaatgatcagttcgttggcaaaatgcggacgtaaatatttagaattactaaccactaagccggcagccaattgtttcacatagtaaggctctttttgatactcttgccaattgaatccttctgtttgatagtttttcattttatctagtgaacgccagcgtaaaagatcatctttacgcatgccttctgctataaattcgcaacgtcgttcacggcggatattatataaagttttgtctatcatctgacttccggaccaaacagccagatcgttttctttacttagatctgttgcatcgatagttttttggaagttttctgatacgccggcacgctttctcaaagctctccagtattttttgctataatcatctagatttttgtttttcatatagtcagcttccatatagttgagatatgcttcgctggcgcggaatatcatataagccaaaggtgaattatccgctggagctacattgctgtctctccatcctttacgaactaaatatcctgtagctgttctgcttaagttttgataagcttgtagtagatttgcatagaccattcttccgtcttggtccatattaccacctctccaaaccatatcacccggtttgaaagttgattctacaaggcgtaaatcacgattctccattacatcggggatactcttgtcgcctttgtattctgtattttctggtgcataaataggcaggccattggtagttaggaaagtttcaaccatggatcgtgtataacctccaccttgtcccacacagccttcaccgttttcattgtatatgctatgataattgccttctactaagctattcactttggcatccgcactatacatacgccataataatacctctttgttggaagaaagatcatattgattgaacatattcatataatcttctattttatcagagatttgtattgcttctgccacttctttggcagatgccatcgcttcagtcaggaagaaatctatttcagtattaaggttgccattgaaagtaccgcccggccagcccggaccacctggtactcgtgcggttccttgatggtaggtttcccaacttgcttcatacagggctacacgtgatttaaatagataggcacactctctgttcagacggtgattggtcagattattactgcgcggtaataatcgggcaatggcttcgttcaggtcttctagaataaatcgggccacttcattacgtggcttacgtttgtttgcttccacattggcggcataatcatctgcgctaagttctgatttgataatgggaaaatctccgaatttcctcaaatattcgaaatagatgtaagctctgaagaagtaaatctcaccgatatattgctgagtttcgcgggtatcttccagttcccctttttggatattttccaaagcgtaatataacaatcggttacagtcgcgcaaatgtccttgccgattataacttcctgtggcggcaactttgatacgttgcggtagaaagaaatctacaggatctgttcctgcttggttatcactggtttgatcgttggtaaaaagattggtgtctttgaaatcgggcaatagttcgtatttcttgttacaataagcctgcaattggcttggttctgtgaaaaaaccttcattcacattgtctgtcaatggttctctatctagaaaattgttacatgagcttatagcgaatgaagttgctattatagggagtatgatgtattttaatttcatgattatgatttatttaaagtttataatgtaatattaattccacatgatagagtatagcttaacggataactcataccgttttggtaaattagttctggatcaaaatttttactcatcttggtaccagtccataaattatctccggagaagaatagtcgtactttctccaggttagctttttgtatccatgctttaggcaacgtgtaacctatttgtatgtttttcaagcggatgtaagctgcattctgcaagtaacgactttgtacctgctggttttgtttacttccaataatggggcgcggataataagcattgagatttgctcccatttcatctccttcaggacggaagtaatccatgtgttcttcgtatccggtggaatcccattgccccccgttgataccccagaaaatcatacctttagaataagcggttctgtcgtcgcctcctacccaaacgtcacgtttggctacgccctggaacattagattgatatcaaatcctttatagtcagctcctaatgagaagccaaaacgaaagcggggtgtgtaatttccaataatggttaaatctttcggatcagtggcagacgtacctttttctatggcaggattgtcatccaggttagcgtacatgatatcaccggctttccaaatattgtttcctacattgggtaatttgctttggtcatgttgggctatccatgattgcatttcttcatcggtttttgctatgcctactgttttgaatccccatatttcgcctaattttttccctttccaataattttcaatggtgtttccgtcttcatctttggtgtaaaatgttttatcaggattgggatattctgttacttctgtttgagcatcagatagattgaaagaagcatgataccctactttaccaattctgtcctgccaagttagttgtaattcccagcctttggttcgtaaagaggtattattcattttgggagctgatgctcctactaatggagttatttcttcggcaggtcctaccatgtctttggtatcacgaatgtagtattcaacgtatccgttcagacgattgttaaatgcaccaaagtcaagtcctgcattatagctggtgacacgttcccatgtgagcaaggaactgacgagaccgggggaagatgctatattggacttgttggctaagtcaagcagccagcgtccgccggcatctacgctacctacagttatattttgaatagaataagtaggataataattatctgtattctgattgcctaggctaccgtaagaaaaacgtagttttaacaggttgacatatgcttctgccggactccagaatgcttcgcgggcgatgttccaacctatagaaacagagggaaatgtgccccatcgttggttaccgcggaagcgtgaagtcccatcgcgacgaatgtttccttctaataggtatcgtccttcgtagtcataatttaaacgggcaaaatatcccattgtagcccattcttttgaggagcctttcaaatcacttgtaccagtggccgtattgatactggggacattttcgttgatgacatcatagcgtttgccgattaattcgttgatgtaataatattcggtattcatacctgctgtaactttgaaattgtgcttgttccaggaatattcataatctgcatatagtgaagttgtcatcatggaagtttgctgtgtttgactttgcacaaatgtctttcctgctgctaaatcggggtctcctcctaaccatgcttcttccacgggttggttgtcacgggtatagagatagactttatttacattatattggtggcggtagctttctgtccgtagagtcgcctgtccgtgaatacctaatccttttaatggagtcagatggaaacctccggaagtgaagtaggtgtctttactgctgtttgaacgccctccagaagttaattgcattaatttaggattacgtgtatagtgtccgttgttgtcatagagaggcatcatgggatataatttggtcgtttctgcaaagaaacggtcgccatagagtttcacaaaagttggcatttctatatctgaacgtataaaacgagcgttaaaatctaaacttagccatttggtgacttgtcctgttacctttccactgatgttataacgttttttgttttcgtcagagtaattcatctgtccgttttgagaaaggaaagctcccgatagatagtatttaactttctcacctcctccggagatacttagattatgttcttgtccgaaagatgttttgtcaatgaagtttcttggccagttttgattatcattggaagcgacgttgaaagggaaaaaattgtttccttgtgaaccattggggtctgaggtgtatgggtattcacccgccatgtatttctgaatgcggtctatcgtatcatcagtgaaaataaaagtggtgccgcttcctgaatttttttgtgctgcattgaaatacttggcaaagcggtaggagtcgagcatgtcaggaatgttggtggggcgtgaccatctgaaattgtttgaatactgaatggtggcttttcctgcttctcctgatttggttgtaaccaagattacgccaaatggagcgcgtgaaccgtaaatggcagatgcggcagcatcttttaacacggaaatgttagcgatatcctgcggatttaacgagtttatgtctccttcggctccatcaattaaaactaaaggtgaggcactggatccggtattcaaatttcctgttccacgaatatttatggtgggattatagtctaatcgtccacctttgtcattcatgtcaatgttcaatcctggcatcactccttgaagagcttgtgaaactgaagtgacaggacgtgattccagtgtttttttatccacggtagcaactgctcctgttaagttcactttcttttgcgtaccaaagcctactaccacaacttcgtccagcgtttgcgtatcttccgctaaagagatttgataaaaagtttggttgccattgattgtaaattcttggggggtatacccgataaaggaaacaattagcacactgctttttgaggcttggattgtgaattttccatccagatcagtaaccgttccgttggtagtacctttgacaactacactagcaccgataatgggctcattgagctttttatccgtgactacaccggtgatgctgaattgctgggcgtacaggaatgtacagttgcaaagcaatatcaaaaatagaattgagatttttttcatgcttctctgttttttaattagacattaggttaatacattgcaaatgtatgttaatcagtgatgtggcttaatacacgttcatttcattcagcatgcatgtttaatgcatctctatattttttggtgaatctttgttgttatctcttttttattttattcctttgctacaggtaatgaattaaatatgaaccttaaaatcttatcactggttataattggagtatgtatattgctgccggatgtgtgctatgcttttttaagcaaagatgtgcatctgctcaatatgcaaaacggattggccgacaataccgtatctgctgtttataaggataaagaaggcttcgtttggtttggaacccgaaacgggttgagccgttatgacggtaggcggattacaaattttgaaaggagtaggagttatcctagtatttcaaacttaaaggaggtttttgacggggtgctggcatttgtggataatggtgtcttttctgcatttgatttgaaaaaagaacggtttttgtctgtggtttcttcttcgggacagggtattccatctcgagggatgttgcagaggaatgattcgttggtttgggtgatttccgggagtgagctgcatttaatgaagcggtgcgcatcaaaagagggtgagcttcggctccgggttcaagaaaaatatacaggctggaataatcaggataatcttttggttgccatcacttattcttcggataaaaaaagtatctgtctgattgatgaaaaaggtagaattatcttgctggatgcgacaaacctgaattcctttcgggtgattgacctggggcgtatcggtagtctgtctgtaaattctgttttgtatgatgatggtcggatatggatttctacaattgctcatggggttatttattacaatgaacgaaccaagaaaatcaagcagttgacttatcatgtggctccggtatccgacagactttctcatacagatgttttcggtgttatcagattaaatgagaataaatatctggccgtaacgtggaatggatatacggtgatgacaatagataaaaataatcaggacgagatattgacagaagtttatagtaacacttcttctttgatgtaccgcaatcttgaaacgaggatgattgcggcttattacgattcacatggtattctgtggattggtacggatggtggaggagttatctggtcggatttgcgtatgcagttttataattgtttttatcaggacaggcataatgagatttgttctattgtagcggatgacgatcattatctttggttggcaacataccataaaggaattatgcggagccggacagcgtttggtacttcggaaaaaatagacttctttcaagtaggagatcaagatgtgaaaaaacaacagactgtgttgtgcagtctgaaagatgagaaagggaatttatggtttgggaattcagatggttcattgacctgttattataaaaaagaacgctcattcaagatattgcgattgatcacggaagatggtgaccttaacaaatcatctgtctgggccttatttcttgatagcaaaggtcgtttttggattggtacacataaaggactttggttattcgaccgtgaaacgaacaggggtaagaagatacatttcaaagtatccggattacagaacttgtctcctctttatattcgtgctatggctgaaaccgacgatcatacgctttggctgggcactgcgaattatggtatatgtaaagtgataaatgaaaaagaactgcagaccggctatgaaaagaagtatggtatggctgagaattccgttcgttcattattagcttcgtccgatggtaatttgtatgtcggatacatggccggtctggcagttttctctcccggacaggatgcgataactcatgtatatactacccgggatggattgtgcagtaactttattggttgcatgactgaggatgcggacgggcaaatctggttgggctctaattcaggtatttcccgttatagccgtcatcagcatttgttttataattattacattgcgggcagtaaccgttctgtcctgcattgggaggatgtcctgttttggggaaataataaaaatcttacttattttaaccccgatgacattaaagcgtttaccacttccgaatctgtcgtgattaccggattggaggtaaataataaacctgtagagataggaagagaggtcaatgggcagaccattctttcacaaagtattttctatacgccttttgtccggttgaatcatgcgaatcgtgactttgcgctgacgttcaataacctttcttattctgaaagccagcagaagtatagttacaggcttcgtccttatcagcctgattggcttgtggccaacggaggggaaaaagtttcgtatgctaaccttcctgccggggaatatgtttttgaggtgaaaaatatttatccggatgaaagagacagtaaaataacctcgttgagagtagagattttgcctcattggagtgaaactttctttttccgcttctgtatgatggtgctgggagggataatagtttatatggttatgcagcgtattaaattacggcaaaagaggttggagcatgagttgcgcttggaacatgagatatttgctgctactgtagagcgtgacaaggagaagcagattcggatggaacgcgagaatttctttacgaatgcagctcacgagttgcgtacacctttaactttaatcttatctcccctgcaggaattgttaggaaccgtccgcccttcagacaccgtctatactaaactggctgccatgtatcgcaatggaacctctttgcagacattggtcgatcatttgctttatgtgcagaagattgaagcaggtatgattaaactccggatttcgaaagtcgatatagtggtattggcaaagcagataaccgatccttttcatgaactggcagaaacagaagggattaactttacggttgaatcgctgaatgagccacttttgctatggatagacgtggaaaaaataagttcggctatccgtaatttattatctaatgcgtttaagtatacatctccgaatggaaaggtgatttttaagatgaaccgtatcgagatagatggatattcattttgcagtataatcatatcggatacaggtaaaggaataccggaagagttacgggggaggatttttgaatcatttattaccggagaaaatacacctttgttttctaataaggtaggtataggcttgcgtattgttaaaaatacgatggatcttcatcatggcacggtgaatttggacagtactcttggaaagggtagcactttcacattattgattcctgagggaaatgcacattttgcagaggaccggtatgagattgttggtgctccggagatggaggaatatgctcttccgttaccggtaatgcaggcggaagggcaggaagacaagccttcgaataaaaaaacatctcttcttgttattgaggacaatgaggaaatccggcattatgtctgttctttattctgtaaagattatgccgtatatgaggcggcaaacggtgaagaggggggtgatgtggcaatgagtaaaattccggatttgattatttctgatataatgatgcctgtaaaagatgggtttacctgttgccgggaattgcgtgagcagcctcggacagcacatatccctattttgatgctgacggcaaaggctgaggatgcggatgtgttgcaggcttcaaaaataggtgtggatgattatatgatgaaacccttcaatccggaggtattgaaggcaaaagtccggaacctgatactccagcgggaacgcctgaagaggatatatacaaagacgttgatgttgaagcagcaggaaagtgaaccggaagcggatgggaataatgctccggatgattttatacagcaaattattcatgtcatagaagctaatctggcgaatgagaactttaatgtaaaaatgttggcggagcaattgaatatgagtcagcctaccctttatagaaaaataaagcaacgtagcgaactggctgctattgatatgattcggagtgtacggatgagcaaggctgcctcccttattatggagaacaggtattccattcaggaaatagccgaaatggtaggatatagtgatacacgtacgctccgaaagcattttaccgagcaattcggagtgtctccatccaagtatatggaaaaggattgaatctgcttcttatccgaagcagattcccatccgtttgccttgtacaatcaggtcatggttctcattgacaagttttaatttaccagccacttcattcagagggatggagccaatttccgcaccttgcagagagaccattcgtccgaattgtccggaagcaatcagttctgtggcatgtccacccatacgagtggccagattacggtcgtagggagtaggagagccgccacgctggatatatcccagtacagtttcacgggtctcgaacccggtttcatattctatttcttgggctatatattcggcggcttttttgccgtccatggttttgatgccttctgcgacaacaacaatggaatagggcttcccttttttcaagcgttcaatgatggtattgcctatattatgaatatcataagacagttccggaataagaatcacgtcaccgcctcccgccattccggaataaagtgcaatccagccagctttatgtcccatcacttcaataaccatgacacgttggtgtgaactggctgtagaatgcagccggtcaatggcatcggtagcaatggttacggcagaatcgaatccgaatgaaacgtctgttccccaaacatcgttatctattgttttaggtacggaaacaacgttcacacctgcttgggccagtttggctgcggtcttttgggttccgtttccgccgatacatacgatacagtccagacctagatcatggatattctttaacatcaaagccggtttgtcctccgaggctgccgacaggcgtttcttgaatggcttttctctggaagtgcctagtattgtccctcccagatttaacaagcccgataatgatttttctgtcaatggttctacgtcattgtccagcagtccccggaatccgctatgaattccataaacttccataccgtaatgatttatcgctgttttgcaaactcctctaattgtggcgtttattcctggacagtctcctcctgatgtcaatattcctatcttcatagcctttgatgttaagttgtaagcgaccgtaaagataacaaaaaataaaagtaatgtagaaaactataaaaaaaataatgttatcagccattataatatagaaataagctatttttgcaagatataacgaatcgtatactaagacaaatgaattctaccagattaattagtacgctattcaagcccagacaaaaagcgacagccttgtatgcaactcaggctgaggtgctccaacataaagtgttttgccggctgatgaaggatgcggcccatacggagtggggattgaaatatggctataaagacataaagagatatcaagactttcaacgtgtacctatacagacttacgaagaaatcaagccatacgtggaacggatgcgtcatggagagaaagatgtcctgtggcgtggagaagtgcagtggtttgccaaatcttcaggaacaactaatgacaaaagtaagtttattcctgtcagcagggagggacttcatgatattcattatgcgggtggtatggatgcagtggcgctgtatctccaacaaaatcctgagagtcgttttttctctggaaaaggtctgattcttggaggaagccatgcaccaaactataatgtgaaacgaagtcttgtaggagacctttctgccatattgattgaaaatgtgaatccgttggtcaatctgattcgggtgcccgataaaaagattgcgttgctgagtgatttcgaggaaaaagtagaaaggattactcgtgccacaatgaatcagaatgtgaccaatctttcaggagtgccgtcatggatgatggctgtactgaaacatattctggaagtgaagggaacggataatttggcggaagtatggcctgatttggaagttttttttcatggaggggttgcttttactccttatcgcgaacaatataaacagcttattcgtagcgacaagatgcattatatggaaacatacaatgccagtgaaggttttttcggattacaaaatgatttcagtgatccttccatgttactgatgattgactatggggtattttatgaatttattccgatggaagatgtcggtactgaaaatcctcatattgttccgttaacagatgtggagttgaataaaaattatgcgatggtcatcagtacttcctgcggattgtggcgttatatgattggtgataccgtgaagttcaccaacaaacacccctataaatttgttataacagggcgtaccaagcactttattaatgcatttggtgaggagttgatggtggataatgcggaacaagggttggcaaaagcctgcgaggcgaccggtgcacagattattgattattctgctgctcctgttttcatggatgcacatgccaagtgccgtcatcagtggctgatagaatttgccgttatgccggattctttagagaattttagtcgggttcttgacacttctttacaacaaattaactccgattacgaagctaaacgccataaaaacattaccttgcagccgttggaaataatcgtggcgagacctaatctgttccacgattggctgaaagaaaaaggcaaattaggcggacagcacaaagtgccgagattgagcaatacgcgtgattatatagaagaaatgctaagcttgaaccaataagaacatgaattggaaaaaacataaattacctgctttgttgatgctgatgatcgtggtgtattcctgcgcaagcatgggaacaccggatggaggtccgtatgatgaggagccgcccaagtttatcagaagctctcccaagccgtatgcaacaaacaataagaataagaagattgccattgaatttgatgagttcatcaaattagagaaaacatcggagaaggtggtagtgtctcctcctcaattggaacaacctgatattaaggcaagcggcagaagagtattggttaacctcatggactcattgaagcccaataccacttataccattgatttttcggatgccattgtggataacaatgagggtaatccgctaggtaattatgctttttctttttctacgggagaagccattgatacactggaagtttccggaaatgtattggctgctgctgatttggaacctgtcaaaggtatgatggtgggattgcatgcagatctgagcgatagcgcttttgtcaagaaaccgtttgaccgtgtatcccgtactgatagccgagggcgttttaccatccgcggtatcgcacctggtaaatatcatatctttggtttgatggatggtaaccagaattatttgtatgactccaagaccgagatgattgctttttgtgattctattattattccttccatggaggctgctgtgcgtcaggatacgttgtggaaggatacagcgactatcgatacgattaaaacagtggggtatacccgttttctgccggataatattgttctaagagcatttaagggaataaataaccgccagtatctgtccaagagcgagcgtgataaagagaatcattttatattatctttcagtgcgccggccgatacgttgcctgttttgaaaggattgaactttgatgagaaggatgcgtttattatagaaacgactccacgaaacgactcaatttgttattggatcaaggattcgttggtttatcagatggatacgctggaggttcagttggattatttatatacggatacactaaaccggttggttcccaaaaccgataccatttatctggctaataaactgacaagagagcaacgggaaaaattgcagaaaaaagcgaatgaggaaaaggagaaggaacgtaaaaaaagggagaaaaaaggagataccatcagggtgaaaccaactaaattcctgactatgaacgtcgatgctccgtcagcattcgatatatacaggaatatctatctatcttttgaagaacctgtggcaagcatagacacggcggccattcatatggaagtaaaggtggatagtgtgtggcaaccggctcctttcttctttatggctgactcgttgatgccacgtcaatatcagatattggcagattggcaaccggagcaggaatatcagttgactattgattctttggcgtttattggtgtttatgggctgcatacggacaaagtccagcaaacggtgaaagtgaagaaaatggacgagtacggaactatcttgttgaatataaaaggagctgctccccatgctgttgccgagttgttggatgcgaatggaaatgtattgcgccaacaaccggtaacggaggaaggaacggcggacttctatttcttgaatccgagtacgaaatattatatacgtttgtttaacgaccataataataacggagtttgggatacgggagattatgataagaagattcagcctgaagaggttttctatttcccgaaagtttgggaaatgaaagctaactttgaatttgaagagaattgggatgtgaatgctattcctatagacaagcaaaagctggatgaaataaagaaacaaaaaccggaagagaccaaaaaggtgcaagatagaaataaagaaagagctagaaaactaggccgatgaaaaaaactattctcatattattgtgcggctggtttgccattatggcaaccagagcgcaatgtgcggcacaaaacgaagctatccaggcaggtgaagaattagtgtacgatttaaagtttaactggaaattcatttgggttgctgccggacaggcaaaaatggacatgcaggctattacttatcaggggaaaccttgttttcgtagtaacttgatttctgtcagtaacagacaagttgatttcttttttaagatgcgtgatacattgacttgtattaccagcagtcgtctggaacctgtttattttcgtaaaggagccgaagagggcgaccgctatacggtggacgaagtatggttcagttataaaaacgggaaatgtattgccgatcagcgtcgtatgaggagggaacgggatacggtgaaatcgaaagaccaaagtgatgagtgtatctttgatatgctgagcatattgatgagggcacgttcatttgatgtaagtgactataaagtcggcgataaaatattgtttgatatggctacaggtactaaagtagagcagcaaacattgatttatcgtggccggaagaattttaaggcggagaatggtgtgaaataccgttgtttggtcttttccttggtagagtataaaaaaggaaaagaaaaagaggtaataaccttttatgtaactgatgataaaaaccatttgccggtgcgtttggatttatatttgaattttggttcggcaaaagcatttctgagagagataaaggggaaccgtcatcctctaacttccattatagaaaagtagcggtttgtcttgatatagtaataccgccgggccttggcagatgccgggtcggcggttgtgttgttgtatattcattatgaatggtatgttattcatcgaacagtttggcctgtctggaaataagtttcaaggtctttccttcatttaatgcagtaagaatagtttcaccccctttgttcactttgcataaagagattttcggtcccatgatttcggtaatccgtatttcaccgattttggtttctatattatgtccttccagtatgccatcttccactacatcaaagcgtaatccttctttgataggatcatcatatcccaggttgatataaatggtttttgccttgtctcttttggtagataccactttcagtattgaaccgtatactttgaagtgattttctacaaaaagtcccatttcgtatggcacattgattaatgaattctctaaagcgctatattgggtggcatctttaccggatgctgagcctgtctcttcataattgcgtgtgctgatagttactccgtcactggtccgtattaaatcaaggcgcagggtgaatttctctttataactgttctcacggctgtggtaacgtctgtgagagcttccgtcatcggttgcttccctttgtatcaggtttccttttaacaggtactctgctctgaagcggcgtgcatcttccagcgggctcagactgagatcacttccagccgaaacggcgtccactacattgatgcggttggtgttgcggataccatcgataaatgcgagacgaatcaggttgatcgccctgttgggtattttgatctcactattgaagtcatccacataaatcgtatatttttgtccggatgcttctaaggatatgactgtcaaaattattaataataggatattacgtttcatggttatacgaatttgtaaggtttgtaatgtagttcttttacgaaaatacacagttcgctgtttatttgcaagtgaactgcgttaaaatagattgcgggcattgattatttattgccggtgtttattttttcatgtttaagtatttggtattgacagataatgattatcttggtgcataaattaaaaggtagcttgtatatggggaagattcaagagaatgatgcaaggttgcagcagcttgtatcaatggcacgcataggatggtgggaggtggactttgatgaaggagtttactattgttctgagtttgtagccgatttgttaggaatagaagggaataagatttctgctaaagatttcgcgaatctgatttgtgagaattatcgggagcgtattttggaggaatttcgctctttccggatgatggagatttatgagcaggtttttccgatacattccaaatatgggatgatgtgggtcagtaccaaggtcggtgagaagcgtattaccaaagaaggtcatgtccgcgtcatgggtatgttgcaatgtatttcccggcaacggatgaatatgcaggagcagacggtagaccggttgaactctttattatctcgtttgaacggcatttccaagtcattgcttgattttttgcattctgatgatattaccttggttatcaataagattttaaaggaggtattgcgccaatttcaagcagatcgtacttatatttttgaattggacaggaaattgcatacggaagtctgtacctatgaaatagcagtggagggtataaaagaacgtaaggttttattgtcggaatcttctattgattatgcctcctggtggacaggacagatattggctggtgatccaatcattctttttacattaaatttgcttcctgattcagccggggcggataagcgtagattagaggaatatggagtgaaatctactatggtggtgcctttgaactcaaaagacggagtgtgggggtatataggggtggatatggtgcgtgagcaccggaattggtgcaatgaggattatcaatggtttgtctctttgggtaatattatcagtatttgtatggaattgagacgctctgaatctgaagcccggctggaaaaagcttatttgcagaatatttataagaatcttcctgctggtatcgagttgtatgataaggatgggtttatgacagatttgaatgacaaggagatggaaatcttcggtctccggcataaggaggatgtgataggattgaatttatttgataatcctttgctgccgcagggattgaaagataagttgaaagcaggagcacctattgatatgtcgtttaattatgatttcgaccgtttggacggctattattctacttctcgcaccggtactatcagtttgatctcgaaattcgctccactttatgatgctttgggcaatctgataaatatattgttgatcaatattgataatacggaaacaacaaatgcatatagcaaaatacaggactttgaggagttcttcacattgattggtaactatgccaaagtaggatatgcccattttaatgccttgaaatgtgatggctatgctgtgaatagctggtatcggaatgtaggtgagaaagaaggaactccattgaatgagattatcaaagtgcattctcattttcatccggatgatcgcaggatgatgcttcgcttctttgatcaggtattgatacgggaagccagccatctgaggcgtgatgtgcgtatattacgtgaagatggcacgtatacatggacaagagtcaatgtaatggtacgcgattttcgtccggaagacgggattattgatatggtttgtgtcaattatgacataactgaactgaaagaaacggagcggaagttaatagcggcaagagataaagcggaagaactggatcgtttgaaatccgcttttctggctaatatgagtcatgagatccgcactccgctgaatgctatagtggggttttccagccttttaacggaaacggaagatatgaaggaccgcaagcagtacatggctattgtacaggagaatacggagttgcttcttcagcttatttcagatattcttgatttatcgaagatggagtcgggagcttttgaatttgtcaagagtgatacggatgtcaatctgctttgcagtgagattatccgttctttacgcatgaaagtgccggccggtgtggagctggtgtttgaagaatgcttgcccggatgtcatgtatgggcagacaagaatcgtttgaatcaagtcatttccaatttcattaataacgctttgaagttcactttttcgggcagcataacgttaggatattataggcagacagatgggtatctgcggttttatgttcgtgatacaggaatgggaatcccgaagaataagataaaaacagtatttgaccgttttgtgaaactgaacagttttgttcatggtacgggacttggcttgtctatttgtaagagtctggtggaacagatgggtggaactatcggtgtggagtcagaagaaggagaaggctcttgcttttggtttacttatccttatcaggaaatagctggtagtattctggtaccgtagaggggtttgattaataaaggtttatagctgtaggggtgaattgagttcatccggatacattgattttgtggtatcgggtgggagcatttcacccctacagtgaaccgggattatatgttagtctagtttcttcatggcgctgtgtacggaacctgcccaataattgcgtagtccgaaaccgcgtgctttgccgttagtcggtgcactatacagaatctcacgggttttcgtgttgaagaatacaatttgataggtcgctcttgcatctgccttgtttaaaagcatggcaatcataatcaatcctgttttttcttcttgagagaggataggaagtgtcttgatgacttcttctatctgtttttcatccagagtgtatccgctgttggtcgtcatgatctcatcgggattgatggtcttgttggcatcgtttactgcctccaatgaggttacttctacattgacacccagtcttttgccaatatcatacttcttcggctcagtgatgaaaagcttgttgatgtcatcaaaagtatatttgaactgcatggggccttcttttgctccgtacactttggcacgggtaaagtctatgccataaaatgtcacggaagagatgtctttcaatgcgtctttgttttgcccgaagcaagccatgctgcttacaaggaacaataaaacgagtaactgtttcatattagttcttttttaagtgttgttttgctgctgccaaaggtagaaaaatattatctcaaatcaataaatttaactatttttcgactcatgggcggcatttgtattttcgcgatatactctgccgattcaaaattgatactcggagccacccgtactttggaacggaacaggtctttgatttctttagcgaaggcttcgctgcggttttcacttccgatgcggatcagtatttcatccgttcccagttcattggtataaacctctacaatgtaattcttgatatgggggatgttatccagaatatcgaataaagcgggtgggtaaagggtcgtacctttatattttatcatttgtcctttacggcccagtatggagctgagacggatggtgttacgtccgcaggcacaaggttcggtataatggtaacagatatctccggtcttgaagcggagcagcggcattcctcttactcccaaagtcgtaatggtcacttcgcctgcttccccttcttttacaggttggttgttatcatccagaaactctacgataatcagttccggctggaggtggccaccgtgaaattcattacattcggtaaacgaggattgcatttcggtagatgcgtaggtggagtaaagttgcagggaatcccatttctcgtgtatccgtttacccagtgtgttcagggtgaaatcgggattgcggagtgcttcgcctatgcatacacatttctgcatggagcagtgatggtaatcaatatggttcttttcggcaaattcaatcagtttgatcagaaaggaagggactaccatgccgcaagtgggatggatgcgccggatagtgtcccattgcagttcgggaatgccgtttcccacacgggctacccccatgcccagctcacgggctcccatatagtaggctagacccgccatgaaacgtctgtcgatagtggtcatcagttgcagtacgtcttgtctgctgcatccggtggtggtgaatgacagatattcgttgtaggccagccggtcaaggtcctcggaagtcaatacgaaagtgacggggtcgcccaaggttcccgaagtggtgacatagtcaataatttcatcgcggctcacgcaaataaaatcttcattatgaagttgcaggtctgtcttggtcgtgacaggtatttgttgcaagtcttctatggtttttatctgttgtatatcgatgtgatgtgcttggaacagacgttggtagaatcgtgaatgattctgcaaataaagcagttcctcagctagccggctttcctgataggctttgatttcttcaggggagcggaattgtatttccggattcttattcattttagttgtttattttatgttctatacgttctgattcacttcgcttggggataggaagcaagagggctttcttccaattgcgcagggctttgtcctgctgtcctgtggcatgatagtaatctcccagcaactcgtacacataaaagaaatgagggttggcatgttggaaggcatgcagggtctgttcgtccagccgttctttctttttaatctgcttccgtagtacaggagccagtcttttgtaagtcatcagctgttggtattcctgttgttgcaggaaggagtccgcaggcactgtcaggttttcggtatagatttcatggttgaaatcgatggagtcgctgaaaatcctgttcaggtcgtatgccacgtacttgccgcattgccagggagcggtggatacccacatccgttttttctcggattggaaaatgacggagtgatgggcgatgaactggttgatggccatttcattggcaaggcccagttccgcttctcccactcctttccggttgcgcaggatagaggcggctttgggggcatctatcggtgcgttttctttcagcagttcctgcaagcgggcaaagcggtaggggctgtccgaagtttctatgttttctaggttccgtttgtcatggccgaaggtttccgactggtagtggttggtacagatgatctgctgcccgtttcctgtgaataaggctattttctccggcgatttctcgataattgcggctctgccgtccttggccgaacccaccagtatggactccgagacaaatgttttccgtttccgggcgatagcgtatgcttcctcaatggtagaagcatattgcaatatttccctggtcagaatggaaataggggtggcggatgcggcaggcagatccgatttggcggcattgatggtgacagtcagccccgtttcattcatgccggaaaggacaccggtcattccggcccatcccacggatgcgaagcgatatccgttttcgggttggtaaaacgaaacgagcttgttgcgtgcaaaggcgtcacccatgtagaaatcgaaattacggccgatgataagggaagaatcggcactgttctcaccccagcaggcaaatgaactgcatcctaccagcatatagtcctgcatggcatgtcccaagtcgtgggcggagtggtaattcaactgacgctcgtagggggtgccgatgaaatcatactcatgggtgcaggagagggagatgccataaatctcgtcccggtactcttccggcacatttttccccagattccggttgaaaaggacaatgaagaaacggaggaatttaagataactttcagaggggactatctcttttatctgatccacaaatactttttcctgaaaataaagtaagtcggaagtcagttggccgatggctttgcctctttcgtaggcaggtccgctgactttcagttcccaaagtccgctctcactgtgccgcaggtagtttccgccatactgccggagactgtctttccgtatcacacgatccgtttcaggggtagacgcaaattgcggagtcatcatatcggcagatagatagagataactcatgcctatcatgatcgccgctatcagaatcaacagggccatccccccgtactttatggttttcttcagaatcttatgcattgcctactttctttgctaaatattcctgacctacaaattccgaacaagtgagcatggctgtcagcgtcacgcccaaagcgccgtgtacattcagattctgccccgtgaggaacagattcttcagtttggtgcgtgtggaaacaaaactgatttgcggatactggtagtttttgacaatgccgtatgccgaaccgtctatggttccggtatagtcccgatagctcagcggagtcgtggtatggatcttttcaatgtaatgattccagtgaaatccgaaccgcctcaggagctgcaagatctgttccgtcttttcttctttgaactggcggtatgcctcgccacggtgttcgggggtcgtatccgtccatttgctgacctcatccatatacatgggggtcagtatggaaaccacctctgtgaatttgctgttgccgcggggtacttgcatggagatcatgcaactgggggtattccctttgtgcatctctttgtcataccatatatcctcattgccgtgcaggtatatattatggttctgataggggcaacagtcttttttcatcatcagattgagcgtgaatatcccgtaactgttttccagtgacttgatgcgagacacaaaagccggtttgatggaatggttcttatccagcagggataaggtgagttgcggatgcaggttggatatgacgtaggtactttccagtatctcttcatggttcacttccactccttgtatggcttcatccttgacaaggatacgggtcacttctttccggttcagcaccgtaccgccgttggcacgtatgatatggattaattccagactgacttgcatacttccttccgtgaaacgataggcgctctccagataagagttgttaatcatggcgtgctcatagaaggtggatttatttttgatcccgccatagagcagggaggttgcggcaagtacattctgtaaatccctgttcgtggtaacggatgctatcatcccggctgccgaggtggcaaagaaatccatgccttcttgggacaggcggccttttttcaggtggtctgtgctgatcaggtctcccaccgaccggatagctgccacataccgttttaagttctcccgttcatgggggaatgagtggcacagggtttccatgaaccgttcatgccccatggcataatcataaatggcgttcttataataaatccggtcgaacccttcttcatccatccgttggatagacagcttgtccatgatcccgaaatagcggaaatactgattcatgatttgtccttcatccagactgccgatatagtgaatgccggtatccatccggtgcccgccgcgttggtaagtctggaagcagccgccaaacagttcatttttctccagcacacagacgtgatagccctctttgcttaagatggctccgcattccagaccgcccagtccgctgcctatgatgatgatatcgtacttactcatgctccggttcgtttttttggaagatataaatcgtattcgaagtatatctgtcgttaggtaaaatttccaactgcatcccacatgcttgtgcgatacttcttatttgttcttcggatgtgaaacacagttgttctgtcgtcttgttaaagttgaaaatgccggtagacagcagttcggtgaaacgggtcagccggtgttttcctgtattggcggcattgccgtcccgcacaatcagcttccctcccggacgcaactgttccacgcatctgagtaataaagttcgttgatgctcataactcatataatgaagcacgtcattcagtatgaatacgtcactttccggtaaaggatactccaaggcgttggcacatacgaattgcaggtggggagtgcggagccaaccctgttgcgccactgctatcttgtcctcatcataatcaatccctgtaatctcccgttcctcggaaagttgggaaagcatatagcaaagcggtccgaatccgcagccgatatcagtaatctgtcctttgacgggaaccagccggttgaataaccggtagttatcctccattttcaccttgatgcgtatataccattcttctaccggtcctttatagatatagttctgtatcaggttctcgtaaaagacgggattatccgttgtgctttgctcccggcagatacgggcatattcttttttcatccgtgcggagatgcttttggtacgttcctgataagtggttccgtacgtagcatcgttggccgggatacgcggcagaatctctgtcagcatgatgcctttccgtacattgaacggctgtgccttggctatgatcttgcagttgccgtaaaggatgaccggaatgatatccagttgcagtttttccgacagatagaaagctcctttatggaaacgcttcatccgtccgtcgtaggtacgtgttccttcggggaaaatggcgatggaatatccttctttcaccttttggcgcatccgttccacgtaaagctcgtaaccgtctcctacgtaatagaaatcggcatagcggataatggctccgaagaaaggagagtgccatacccagtgattggtaaccatgaccagtttgggagtcagtgccaataataccagtatatcgatgaaagactgatgattggctatcaggatggcaggctttttaaacgtttctcctgtccggtttatcttttctttatgtacaaatgtggctatatggatcaggcctttgcaggtgacatgtatcagttggcaaagtacttgtttcttataggctttgcggataggaagcaaggtcatgacagctatcagcaagcgcaggaacaggcatccgataaagaacagcaggaacaggccgccggttcttgccagtcctgtcaatgtataaggaggcaaccctttggaagcgggtgctgtgatgaagaaccggaaaagaatgggttgcagcgtgtaggctaccagtacgacggcaatcattcccaaaatggagatgagggaaatggactgcaatgccggatggcgtgcgaagaccaacgtacccatacctatcacggtggtgaaagcggagaagaagatggctgttttgtgcgagttcagcaactgccgtcctgtgcggtatttgttctgcaatccgtccataatgaagatgctgaaatcatccccgattccaaaaataaaggtggacagaatgatgttgatgatattgaactcaatacccagtatgcccattaatcccacaatgataatccagctgaccaacatcggcaggaaactcatcagggtcagttctatgcgtccgtaggagatccataaggcaaagaaaatcaggaaagaggagatataaagaatcagatagaaatcctgattgacggctgatacccattggctggcgaaatagccgcggtcgaagataaccaccttctcttttggttggaaaagggggtacaccgcttccttgtcggtttcgttcatccgtacctgagtaatcagcatggtcagggaatcggcggaagtctgccattcgttcagaagccgggtagtgatttcattctggtagtccaaaggctggaacggacggtcgagccattggaaaaacggctcgaatgcatgttcacgaaaatgataacgggcagcctctgtccggatggtttcgcgtaaccgggctttcttttccggagtccagtagttgtgccattgtttcaaccgtgcttcctgcacctcttccggtatcagaaactgtccggcagaggcgtaatcttttatttttccttcttctttcagttgggcgagcagccggttcgtttcggcgtattgtccggtagcgtctcccatatctttgcctgtactgacaaagagaacagtcttttctttcttgtcaaagagttcggccagcttgttttccgattgtttcaagtgggcaggctcatagttcagactcatcatatcctcgttgaaacgcacgttctgcgaggtgaataaacatattatggtcagcacgagaatgccccctaccaagcctttgttcttttcgtatggataagcgttcagtttctcgataaagcgtagcaccgccccttgttttacatgcgcctgccctttcaggaaatgcggcagatagaccaggcaaaacagcgtggttcctatcaaggcaagcgaggcgaacagaccgaaatcccgtagcaggttggaactggtaaagaggaggccgaaaaaggcgccgatggtagtaaaactgcctacggtaagcggataggcgatttctctgattaattgttgtaccgatgatacatgattctgatgcgccagcatgtgtatggagtagctcaaggcaatgcccattacggcggagcccgcacctacggcaatggctgaaatgccgcctttgataaagtagatgaggcataaggcgaataaagctccgaacagcaccggggtgatgataagcggaatggatttcttatgcttgaataccagagatatgaagacaatgatgataatcagcgcgatggaagaagtgaccagcgtatctttctttatctgtcgtgcattgtacactcctacggaaggacctccgaaatattcggcaaccaattggggatattccttttccgctttttgcagctcattttcaatcagccggatgagtttgtcatttttgcccgtgcttccggtgttgaataccggggtgatgaacatcagcagggtggaaccgtcccgtgagaagatatgctcattaatcagttcgtaattagcttccaactggaagtcttgcaggtgtttcagcgtctggctgcccagtcccaacgggtcccgcataatgtagttcttcaaggcgaatcctgccggagatatcaggttggaatagttcttctgcatcagggcggcaatgtttccggcggtaagcaaggtgtccagccgttggtagtcctcgtcggaaaggaacaggggcaggttgtcgtaaacaaaatctccgacactgttgatcaggttttcgtcggcttttgagaagatctctttaatcagggttccttccgcttgttgctgtaaatcctgtttaatggtttcggcagcttcaatcagggaatccgcatccgccacaccgtccttgccggacagcatgatcataatcttatcctttatcttcagattttcaaatacgttgatggcattttgggagtccttggtatccggaaagaaactggttacgttttcctcgaatctgacttgggcggcaaaaagggccataaagaggatgcatacgctgagggacaggtaaaacaagactttatgcctttcaaaatagttatataatccaacaaagaatttagtcatatccgttttttctcctacatatagccagcaacacggtggagattactccagacagcagactgcaagccattgcaaagataatgcttcctattaaatattgctctaaaactgatttgacattttcaagagaaaggtctccgagatgcaaatcgggaggattacccagtaccatgcagcctgtccggtaactgccgtacagcaataggggaatcatgggtggaatactgatattggcggcgacaagggcaatcactttattcagtctgaacagatgcgcaagaaagagggtgatcagcatctgataaccccataacggaacgatacccataaaaatccccagcatgatggcgagtacaatcttcaggttggattcccgtgtattcagcacatggtcggtgaagaatcgcttgcagttgctccatgacagtttgcggagcaggttacggggaacaatccaaaggcaggtaatcagcaccagcaccgtgttcagcacactgatacgggtaaaatcccggaacggccggaaatgggatacccgttctgcttgcgggggataatacacgtggatggaaatgttcttcaccgctacatctccccatgcggcaaagacgatggcttccaactcaaattcgtatttggcggtgtaccagcagctttgcacatccattttgcgcagagggtaaaggcggtatcccgattgtgtatcttccagtttcagcccggtttccagtctgaaccagaaattagagaatttattggcgaaggtattcttgcccggcatattgtcggaggccaagtttcgggcgcctaccagtagcgtgtcgggctctttttcaatggcttcgataaaacagggaatatcggaagcgaaatgctgtccgtccgaatcgatggtgatggcatagcggaaaccttctttttttgcttgggaaagaccgtgcttcaaagcggttccttttcctttattgacaggatgggtaatggtgcggatagccggatattgttccagaatgttggccgtatcatccgtagagccgtcattgacgacaatgatatcgtctgcatacctgcatacctcctcaatgactgccgccagtgtcttcccgttgttgtaggtgggaataacgacgacaatctccagttcctttagtttcttccgccaaaccgatgttgtgtttgtactcatcttgtttttcagtcaaactattcagatacgtttgggatgaatgttttcgtacctgaacttatgtggtttctaatgggtgacaaagatagtatattttcggatgcgggcattctggcgttaattatttatttggagatgcatttttaattttaaagcaggtaaacaccaacttgttctcgtcgaattgcggattttccagattgttctcggatatatacagtccttcccttcccacaaaactcattttatagaaatatttctttccggggaattttgtttctccgatgatttcaaaatccgcgttcagtacaatgacggagaactcctttcctttgggttcgtcataggggctttcgttgggagccagtttgtaaggcatttcggcaaaacggtagtacacattgcggtatttgtcatacatgatatgccaatatctaggattttcattgagttttataatagcattaatgccttccatagaattacccagtttgggcttcatgcttttcagatatctgcttttggcgttataccatcggatatgtttcaagtcatctgtaaccatcaggctgtcatatccgaaaaatccacagaccaaacggctctctttgtagttgtaatcataactaaaaccgtatcctcctgcgatattgtcatattcctctttaaagatgggtggatagaaaataggaatccatttaacttctcctgttctcagatcctgtgaggcgaacatatgggttctaggccagtcttcctttttcatatcgggttttaaaatttcttggcgtagaaatatgcatgagtctttgataaaagcaggtgcattgtagtaactgccaaaagacaagggtgtaaatctgccttcaggagtttggaaattatagtttcgtattatttccccttgagagtttatggaactgagccgactgatattattctgtgcaactaatatatattgagaatcgggggaaggtctactgccgaatacagctggtagcccgttgggacctgtcttgtgaagaggtatccgtttggctatctgttgattctctatatcaaaaatgacaatgtcatataatgatttttgtgtattctcaaagtgaaggtattctttcccgttttcttcgaattggaacatggatttgcttaagtaataggtctgttcgtctaaagggaaagtcagctgtttttctgctaccagttctacttcgttctgtttgccagcttcgttttttggggaggactggcaagatacgagggtaaatatagaaaagagtgatataaaaaggagtgttcgattcataatattttcggttttatgatatttgtaatttatgtgaccggatttctaaccggccacataaattgttggttgttaattggtaggagcaccatgattcccaccttctcctgaaccttcaccgggggcacctacctctactccggtgccgcatttaccatcttcactgatacacactgtgcctgtagcagccattttgcaattttcccattcagtttcgaaagcacagtactttggtccccctcgtggcatttgcacggcaggtgctccaaacactacttcctcattagaagagtggaggttcaagcttattgcaaatgttgcaataacagccataatcattgtgaattttgttttcataggtgtcatatttataattgtctgaatataagatgtttaatgggtgttgacaactataaatggacttattgttcttgctattatggatatttaacagaaggacttgcttcattgatacttacttgccatcagtaccgctttcaatttgataaattcttttccattacaaatgccttctgcctgcaacttgaaaaggtgctcttccgttttttctaatcggataaacagctgtagtagcggagtttccagcgggttgatggcagacaggaatttggaagaagcaatctgtacatactgcaaaggttggttggcgatctgttcggcactttcttttattatctgtaaggtacagacgcccggaaccaccggctgtccggggaaatgaccttgatagagcatatggccgggattcagctctatctctattgcctgttttccgtcttctctttcctttatatgaatgattttataaaagttctccagcagcatttcaagggttgtttatgttcagtttgtccaattggattcttaaccgtagcagcggatgcttgatttgtactttctccgcctgtccgtttacgaagccggacaaggtgaataccgtctttccaaatcctttgccactgattctttgctcaaaagtactacttttctttttaatacgtgctttttcactctttagaaatagatttttgaaatcagtttccagtattttcagcatctttttcttcctcatcggttccatgcaactgttcactatgaaggtgtcgcagtgcagggagaagtcaaaaaggctgaggccaaagtaagtggatcccaggatacggatttcgttatcaggcatttggcggacaatgagcattccgctgaaatgatgtttcatgaaatccagttgcaagttgtacttttgcgactgtgcttctgcctgcaggatgggaggcagtgccgtagcttcccctgtcacccggtgtgagcaggagagcaggataaacagcaacagcagccagctagcgtatcgtaaactttgcctcatctttcaaagaattgaatttcttgtccgagaattcgtattcggtatagttggttgcggtttccgataaacgtagtttgtggacagacatgtcttttttgtctaaataaatttgaatctggttgatatatgcctgtatcgctttgctgacgggcttgatttgaatgagatagtaatgggcgtcttcaaaatattccaaagcatagccgggcgacatgttggacaggtcgcccaccatgcaggcggtaagcatatcctgcatttggttcatcatcttattggagtgaaggtccatgatgcttttctttccgtccgatactattttcagttggttgttgttgatcacgataaggtagttcatgggctgtgcgtagtccatgcatatcttattgctctttttataatagaactttcctttcgaggttattttctcatcgaatacatccagatattttatctgagtgaaattactttcgatggactctatatttttagcctcttgcagcagacgggcttcaaaatctttcagatcagtaagtttcttcatctgttgggcttgcatcggcaggactgtacagaacatcaagagcaaaagtattttcatgtaggtcatactttatagaggtttatccgtttgtaatgggaagcaaagatagtatattttgagaaaccattcatacctttatcgcttatttacgatttttacctgtttctacaatcgttcacatgggcaattataatgaataaaaaagttatatttctgcgttgcaatatttttttgttttatcacggcatgttattgttaatcaataatttatagtgacgaatcctcctgtatccccctcgaaacggtttatccgttttccctgtcggagtcagtttggcagaaagcgtcattatgcaggatgaaggtctgttggaattcttgtaaggagaacggtaggatatgattttcacttaggtgaagatgggttttcacctgtgtgaagagctgttgtcaccagtgtgaaaccaccgtttcaaactggtgaagcaacagtatatatcggaagtttacacactgacatcctattaagttgaacgaaagtacagcatatcctgtcagatttaatctgatatctgcgcttctcttgcaaataacgggtgaatgttccactccatcgcttacataccggtttgggggtattacagacttttttacacggcaagttgttggtaatgagtggaatgaagtggcggaagaattttatgttttacgtaagacgaagttatctttttatcggtttgatcatgaagggtgaaccaggtctcgtttctggaacttggtgatgttgctgttgaaaatatagaagaaatttattttgtcatgtcctttatcagcctatctaacgctactaccgtatacccctctttttctataaagtccagaacttgtaccagcagcctgtcactatcgggcatccggtcatgtagcagaaggatggagcccggaacgagccgtttcttgatgtgtttgataattttttcaggagtgggttgctgagtgtccagtgtgcggatgttccaaccaatggggatgtatcccagcctgcgcactgctttagccagggtaggattggtcactccgaaaggcggccggaaccatcggaccggttggccggtcactttttccaattcttgctggcaggtaattaaatcatggcacatccgtttgaaggtatagagaggaaaatagccggaatgggagaaggaatgattcccgatacgatgtccttctttgatgatttgccggagcagttcttcattgccttttatcttgtttccgatgcaaaaaaagcaggccggtatgtgtttttctcttaacactttcagcactttgggggtctgtatcggatcgggcccgtcatcaaaagtgatggctatgattttctcttcggttttcttgcaacagaagacacgcatgtaaatacaggcacggatgctgtaagaagcgtaaaagaaataggccatgacgcttactatgatgactacagaaactaggatgtgcattgcttgattaagatgattgagtgatactttaataaatgatcttgtagagattattctaattgtttgtcattatctgtcagtattctgaactttttttcggtatcaatcgtattcaagtgtgctaattgctctttggccatctgccgaagatgagtaaaccttttagacttgtccaccttacgcttgattaactctgcattgaaggattccatattcgataatacgactaattcatttatgcttgctacatctctgatattgatattcttatctgcgtattgtggatttgcttcacgccattgtcttgcggtacatccccataatgcgagatttaacaaatcagcttcatcggcataaacaagtttttgattgaaatcttctactttaggtataataaagtctttgattgcatccgtatgtatggaataatttactttactaagtattctttttacgttccattcacttaataaagggtgtgattctgcttctttaagtctttggtattctttgatgagatatagtttaaattcagggctgagccaagtcccgaattcaaaagctatgtctttatgggcaaaagttcccccatatcgcccgggcttggatataatccctattgctttagttttttctatccattgtttgggggttagggtgaaactgtttgttccactctccattttaaaagcatcgaattcgatgcctttaaaatttggattatttagtttttcccataaccctagaaaatcaatcgtactacgtagacgcatccagttttgtataatgtagttagtacgttctctgtctttgaaatgtgccatgtctgtcaggcagatataatcattattatcaggtcttacagatatggatatatcaatattcgtaacagttattttcttcattatttctactacttttattttatgagggataaagttaagcattattcctgttttcagtatcttaaaagcatcttttgaataggccatgacgcttactatgatgactacagaaactaggatgtgcatcgcttgattaagatgattgagtgattgataccttgatattggttataaatcaatgcgtaacgggatgaagcttcttctttcaaggcttttgccgccatccagagagcataggatgaagcagtctgatattctccgcattgttctttaaaactgctatgcagggcatgagggaacagactgtgttccagatccgtataaacggcatctgttgcttcctgcccgttcttgccactgataaaccagtcaatgtcttcgggtgcaagcccgtgagattttagaaaatgatgcatcctgttactgatttccggagcactcatccgggtgataaaagtatctacccctttcagttcggcaaaagtctgttcctctttttgtgcgcttaacaggaaaaattgtgctccctcaccggctgtcgttcctttcaacagtcctaaacgctgctgaatgatatggctggtaggggttatttcatccatagcacctgccagtacatgctgtttgccttcggcaatgcttatgatgccatctatcagagcactttcaaaacttaaaccacggtgtacatacgtaacattataagcatgtattttgagtagcaaagctagctgtgcacccaccgtattaaaggtggactgaatgaaagcggtgggattgagcatctgttcccggttgtccatcaaggcgttcataaacttttccgtatcggccagacaacccagtcctgtagcggtgataatggcatctaccttttccgacgggatatctttcagacattccagtccgcaggctactcccatcttgatcatgcggctcatgcgcctccgcagattggcgttggtgatcatttctttataatcaggttcctgtgcggagaaataaggcttttcatttctgctttccgcatggatagaggcgatacggttgatatatactgggcacatacgctattgggttagagtggaaaatacgagagatgagttgttgccgccgaatccgaaggagttggataatacatgccgtatgggaagtcccgaccggaaaaccgtttcaggaatgaggccgctttcttcatcggacagatggaagttcagattagggtaaatcagtccgtgacggatggagagtacggaatatacggcttctattccttccgaggctcccagggtgtgcccgatgaaagccttgaccgaactgaaaggaggaatacgggtatcgaagatacgccggatggctttcccttcggaagcgtcgttgctgggagtgcctgtaccatgtacattgatatagtctatggctccggctgtcagcccggcagaggctatggcctgactcatggaaaggaaaggcccgtctccgtcgggggaacttcctgtctggtggtaggcttcattggcattggcgtaaccgctgagttcgcaataaggagctttagtaagggatttatcagattgaagaacaaggtatccggctccttctcccaggtttagtccggcacgtgtgcggtcgaaaggacggcagtgctctttgtccagtatcatcaatgaattgaaaccgttgagcgtgaaacggcataaggcatccgttccgcctacaaggacagcgtccagcagaccatgccggatgaggcgtgcccctaacataatggcatttgcggcggaagaacaggcggtgctgagggtggtcaccgttcctttcactcccaaataagcggctatcatttcggtactggacccacagtcatgggagataatgtcacgtaatctcccttttcggttatcttcccggaaagaggtataaaaccgctcgcttgcatccattcctccgatggaagtggaagaaatgagcccgatacggggagaagtgaaatcgagttccgcatcacgggccgctccttgggctgcccacaagcccagcaaggctgtacgtgaatacgtcttgccggatggaagggacaggagtttctttaattcttcattgctctgttttacttcggacacgggtacgtcaagtgcggtggggaaaagggtgattttccccataccgtgtttcccggcttttaaggaatccaggttttcttccactcctttccctatgcccgaaatcactcccagaccggtgacatagatcttcctcatttctgatgggcggtgatgtagtctgccagggtacgtaccgaatagaatatttccttgcctttggcaggattctctatcttgattccataattcctttccagaatcaggataatctctaatgcgtcaatcgagtcaaggcccagaccgtcatctccgaataaaggtgcttcactgtcaatgtcctccggagtgatttcttccagattcaatgcttctattaattcaactttcagtttatcaatcaattcttccatattctttattgtttttcaatcagtttaaatactgctttataggtgttcttccataattcacaccacccgatgatacaatagttcagtttccctttttgcatgactatacgtgcgtatctttccagtttttccggctgataggcttcagtgatgaaaaaggtgttttccccttgtatcttgtggcggatgcaaatctcgccggacactacattgggtagtgtgtaaacaaatacagccggactggctgcctggtctccttcccggtctatcagttgctggtgtctgatgtccgtatgcagagaggaagcggcattggcaagtaacatccccatttccagtggagcgaatgtcttaccttccagcaagtattcggcggccacatatcccaatttgcaaaggtcatccattttatagaatttcaggttgtttccgcctgtttttttataggtatcacgtataaatgtgccgaaatccggttcttcggaatgaaaaataagttcgttgtttatgaagacagaactgttttcaatacgaacctcccgtgtacatcggatttcgggcaaggtgttgtcctcatctttgaacggagtatattccggtaaagataagacaatggctgcgttgcatccgccgaatcccgaagcggtttttacgcaatgtttcatcgggatgctccggtgggtggcatagaccggtatcggcataggaactcccggcgtttcgtaacccggagtgccgaacaggatgccttgtttcagttcgtgcatacagacaatgctttcaatgattcccgatgctcccaaggtatggccgaaatagggcttcaaactatggacgggcacttgttccagatgagccagtgtgagggctttggattccatttcgtcattgtatacggtagcagtgccgtgagcattcacaaaactgatatcctgaggggctgtccctgcttcctgcatggcttggcggatggcgaaatagagtccgtctcccgtgcgggaaggaccggagatgtggttggcatcgttactgacggctcctcccgaaaggataacatgttcttctgttccttctgaactgagcaatacggctccgcaggcctctcccaagttcaatccgtcacggctgctgtcatacggacggcatgggcgggagctgagagaccggaaagacccgaaaccgctggtgatgaaatgagagagaaggtcacctcccgctacgattacccggcggtagataccgttctctatcatgcgttttcctgctatgagggctgacactcctgaaatgcaggcattggaaatgacatgcacccgttcctcggcatggaaataaccggcaatgttttctgccattttccaaagaaagaccgcttcatcgggatgttccgtatgacgggccagtaaatcgatgttccctttggtggtggagaggatgagtccgcaggttttgtcttccaaagtttgtccggactgacggatgagttcgttgatagtcagtatgaacagttgttccatccggggatagccacttactcctatggcttccgcctgttgttgcaatctctcttgcgagagagtggctgccaataggggagtgtccgcaatccgtttgtccgtctgcagggtgataccgctgtgatagctccggatggcttccagattttcctgtgtgccgaaacccagcgcgctgatcagggtatcatgggtgatataggtagtcagatgatgttccatttctttttccactctatgtaaaaggcaggattaaccagttccagttctctatttgtattcaggaatacctgtgtagtggttcctgttgccacaatgttttggtccgatgcccggtagatggtgtattcaaaaagaattttggcggcatcactgtggataaaccgtgtctcgacaatcgcttcctcgccaaaagacagcggttgtttgaactggcaggtcaggtctacgataggaactacatatccttcccggtagatgctcatatagtccagaccgtatcgctttccgaaagcttcgcgtccgtcttcgaaataacgcacatattctccatgccatactatctgcatggaatctatctcactgaagcggactttgatggtggtccggtccgtcagtgccgcctgatgtggacttgtttttcgtttcattctttcttcagatatattttcatccggcattcggccagcaattcatcgttttcttttacctcggcggtaatcagggtgatatcaaatacttcctgaacgatggttataccggtatatagttctgctccggcagaaggaagacggaatagtttcatcttttctaccgaaccgataaaacctaatggtacaggttctttccgcagcatatagatataacctacacgtgccgccgccgactgggcgatgtgctctatgattcccgtttcctgtaatacaccgtcccggcagaacaggttgtcggtagtgacggtcagccctgaccaggatgtattttcttctatcccatagaagcggtctatcattaccatgggcgggcgttggggaatcagccggaacagctcttctccctgacagatgatttctttgctgctcatttcagtctgcattgcaggatactgtgtcccagtcctatgttatcttgaatttcttccacttccaatccggcattttcaatgcagcggatcaggtcatccgaatggaacatcttactgttgccgttggccattgctgtaaagtagaggctgatttgtgtcaggcaataagatgctgtttcataccgttggcgatcccataatgtttccataatatagactttgctgtctttgccgatggattgtgccacacgggtcaggatgctgatgacttcttcttccgagaagcagtccagaaactggctcatccatacagcgtcaaaacccgtgggaaagggcacgtcccgatccagcagattggcgccgtgaccgtgtatgcgttcactaccggacaaaccggccgtttgctttctcatcatttccagttgttgaggcaggtccacgatggttacttccacttccttattatattgtacgcattgtgtggcccatctgccggtattcccgccaatatcgagcaagcgtttcgggtgatggctgaacacgatttccaacgctttgccgaatgactggtccgaatagaaatgatcaaagccgaaccagcttttctgtacctgttccggcaattgggacagaccttcgtaaatggtaggccattctccgaatactttcaatccttccggacgcccgtttaaaagagcttcttccaaatggaacaagccttgatagttcacatcgtgattgaattccatattgacacgagccattttatcgttcagcagaaaccagcctgccttggccagtacataacggtcttcttccaacaggatggttccgatggtcagcgatgcttccagtaatacttgtgccgcatagcgtgtcagtccggtctgcccgctgatttcttgcagcgtatatccttcccgtttgccggacaataattggaaaattccgaatttcaacatcaggcgcgatacttggaataccacaggaccgaaagctatctcttgtgccagtctttgcgcttcggcagccgtacattgttcttttgtatatcttttatgcatcataccagatttatttttatgtccagaacgggtagtaattgaaccattgttccggatactgccggacaatcttttccagcgtttgtgtatattgctccaataatgcctgttcggcccgtttctctttcgtccgtactactgtctcggctataaagaaatggaaacgatacgttctttgggcttcacgcatggcaaaatagaatacgacgggtacttttaacttcgaagccagcaggaaagggcccatcggaaatttggcttcttttcccatgaaagaagtcgtgagtaatttctctttattcagatagcggtctccctgaaagcagacatactcccggcggtccagcgcttccgtgatgcggaatacatgtgtcaggctgtcttcattcaccggaattattttgtagtctcgcgtagaggcgttcttttccaaaatctcctttatccgttcgtgttcggcgtcaaacatgacgatattgatctttttgccatattcatcgaagaaaggagcgcctatttcccagttgcccacatgggcgccaatcataattactccggtgtttccgtttagtacgtctaaaaatgcctgatagttctcaaacttgaaatgatacttgccggtcattccgttgccgatggccactttgtcaatcaatatttgtcccagccggtaatagtttttcaggagcagtgcgacggatttcagccgtccgtatttcagcctgttccgtgcgtaactccaagtattgcccgttgctttcggtgcgaaaggtatgaagtagaggacgaccaatgccaggaagccgtaggccgcagttatccccagacagcggatcatgtagataaagaacatgtatccgaatatgcctcctcttgtcttacctttccatgtttcggacatcagtcttctttttgcatatgtgaaattaccagattatagaaatcctggaaggttttgataccggcaaaatctttggctgtaacggtgaaaccgaaattcttgtcaatcagtactaccatatccaccaggtcaaggctatccaattccaaggtttgcatcaaaggtgcgtccggttggatctgttctacatcaatctcaaattcttcggccagggtggttctgatcttttcgatgatttcttcgttggtcataaatttatatattggtttgaattaattgttttctttaaatttacggataatcagtgaggaattggttcctccgaatccgaatgagttggacaagaaggtgtcaaattccgtttctatcctccgggaggggatgttcagcagagcagaggcttcatcgggttcttcaaaattgagattaggagcgataaatccgttattcatcatcaagatggaataaatgacttcactggcgcctgccatccacatctcatgtccggtttgtgacttggtggatgtgacatagggccgatggtttccgaacacttccgctatggcttttgcctcattcaaatctcccacgggggtggaagtggcgtgtgcattgatatattggatttcttccaagggaatgcccgcatcgttgattgccatctgtaaagagcgtctgggaccgtccacattcggtacggaaatatgatctccgtttgatgagaaaccgtatcctatgacttctgccagaatagtagctccgcgccttacggctgattcataactttcgagtaccaggctggcgcctcctccgctgggtaccaaaccgtcccgtcccttgtcaaaggggcgcgatgccttttccggttcgtcctcacgggtggagaacgcgcccaatccgtcgaaactacccacggagtaaggatttacctcttgtgctcctccgcacagaatgcagtcctgaagtcctgatttgatgagcatatacgccatgccgatggcgtgtgaaccgctggcacaagctcccgatatggtaaaattaattcccttcaaatggaaaataaccgaaaggttcatggtaatcgtagagttcatggactggaagatagaaccggagcctaccatagccgtattcttcttggcacgaatgacatcaatggcctcgattaccggagcggcgctactgtcatttccatacaatatgcctacttcatgatccaataaaaactcctcgtctatttgtgcctgacggaatgcctccaaggtagccatataggcatattctccctgttcggcgaggctatgccgctttttgcggtccaataacttctttaaatcaggacgttcgacaagtcctgtcaatgcggaaaaataccccatctctttacgtgccggatcgatgccgatgcctgaacgcccttggaacaaagagtctttcacctcatcttggttcttgcctatgcacgaataaatacccatgcctgtaatcactactcttctcatcttctgcttatgtatagattcctccattgatggaaattacctctccggtgatataggaggcttgttccgatgccaggaagcctaccagtgcggctacttctccgggttcgccgaaccgtcctgccggtatctgttttttccattcattttcatcaatgccgttggtcatatccgtgcggataaatcccggtgctacggcgttcaccgtcacgtgttttctggccacttcctgtgccagtgctttggtggcggctatcattccgcctttggctgccgaatagttggtttgtcccggcattcctttgatacccgacagggaaacgatgttgatgatacgtccgaatcgctttaccagcatatttttcagcaagggttgggtgacgttaaagaaaccgttcaggctgatatccaacacccggctccattcatcctgttccatccacagcatcaggttgtcacggcgtataccggcattgttcaccagtacctcaatgtaggtatcgggatgcttctccatccagccgttcagtgcggcgtgtgtggctactgcgtctgtcacgtcaaatttcatcagttcgccgtccgagccttgttcccgtatctgttgcagggtggcttcggcttccgtatcgttgctttggtagtttatcagtatatgatatcccatttcggccagtttcagacatacagcctgtccgatgccccggcttcctcctgttactagtgcgtatttcatttttcttgcaacctcccttttttaagatataccatcattctttctatctctttatatttaggcgtatcttcccggaacacaggaaaaaatgctcgtatctctttatatacttgttgtgaccgggggcttagccgaccggctatttccaaacagtctacagcttgtacaatacccatcatcaggatagccatcacctgataagcattttctatgactgtttttgccagtagtgcggaattggttcccatgcttacaatatcctgattgtcattgttgttggggatgctatgcacatacatcggattggacaaagtctggcactccgctgtggtagaagtcgcggtaaattgtgacgcctgcaaaccatagttcaatcccagcactcccatattgacaaaggggggcagaatgccgttgatgcggtcgtgaaacaagtaattgatctgccgttcggcaagcatggccagtttggtgaccgctattttcagtttatccatttcaaaagaaacgtaatctccgtgaaagttaccgccatgatacacgttttgcgtgtcggggtccactatcgggttgtcacaggctgaatttatttcgtttatcaatactttttcggcattgagcaattcatcataaaccggtcctagaatctgtgggatgcagcgcaacgaataatagggttgaaccttatgggtgaagattttctcttcgtgttttccgttgtaaagttcattctctcttttgcgtacacattggctgccttccacccattggcgcatcatgcgggctatctcttgctgtccttcatgccgtttggcttcgttcagcggttcggacatgaaatcatcgtacgaggcggcaatttcattcatcatgaccgatgcgcctactgcccaatgcatcagttggcgggcataaatcaggttgacaatgcctatacctgtcattaccgaagtgccgttggtcactgaaagcccttcgcggatatgcattttgaagggttgcaatccgttttccgccaaaacggatgccgtatctcttttcttgccttggtaaaagacctctccttctccaatcagggtgagggcgatatgggcaagctgtaccaaatcgccactggcccctacactgccgtgttcgggtacgtatggagtaatcccccggttgataaactcggtaatgagcaatgccagttctttatgtacgccggattttccttgcagaaaagtatagagacgcgctatcatggcagctttgacatagagttccggaaggggttgccctgctccggtggcatggctgcggatgatattatactgtaattgtgacaaggattcatcttcaatacggtattgggccatcggtccaaagccggtattgatgccatagatgatcttgtcgttggagaatgttttcagaaaatggaaactctcttccaatttttgcatacattggtcggagagtgtcagtggctcttcttcaaacaaaatcttatacagggacgctaaagttatcttattctcagctagcattggattggtgtgataagcagttttgtataatttccgcaaaaatagttatttaaaaataagtattaccatccgaagggagatttttcagttttgatggttatctgaaaggttcaccacagattatacaaacaaacgcagatgtttcttaaatcattgattgtcaggtggataatctgtgtgaatctgtatggtctgtggtgaaaaatatagtgtcgctctatgtattctatttattcagtttccatgtgaaaccgtctttggtatctttcacttcaaagccaagagcagccagctcatcacggattttatcgcttgtagcccagtctttattggctttggctttcatacgttgttccagcagcatatctactactttgccgtatgcctcttcacgtgcctcgttattggcggcttcttctttcaggcccaggatttcgtacataaagagatggaacacacttttcagttcttccagatcttctgcggaaatagtggctttcttgtccagaaccgtattaatcatacgggcgccgtcaaacagatgggcaatgacaatcggtgagttcaagtcatcattcatggctgtataacacttttcacgcaagtcttttaccccctctatgccggtggtttgtgttgccggagtgatgcgttcaagacctttcacagcttctgtcagccgttccaatcctttttcggctgcttgtaatgcttcgttactgaagtccactgtactgcggtaatgtgcctgaaggatgaagaaacggatggtcatggggctgtaggcttgggtcagtaacttgtgggtaccgtggaagaactcatccaagttaatgaagttgccgtatgattttcccatcttctgtccattaatggtaatcatgttgttgtgcatccaatagtgaaccatgtcatcgccttgtgaagccacgctttgtgcgatctcacattcgtggtgtgggaaaattaagtccattccccctccgtgaatatcgaaatgctcgcccaggtatttcttacccattgcggtacattcacaatgccaaccggggaatccgttactccacgggctgggccagcgcatgatatgttcgggttgtgcacatttccacagggcgaaatcggcaggattgcgcttctcgctttgaccgtccagctcgcgggtggtgttcagcacatcgtccaggttgcggccggacagtttgccgtaatgatggtctttgttgtattttgctacatcgaaataaacggaaccttcactttcataagcatagccgtttttcagaatttcttctaccagttctatctgttcaatgatatggcctgatgcatgtggctcgatactgggtggaagtacattcaaggcttccattgccttgtggtagcgattgaggtaatattgcactacttccatgggttctagttgctccagacgggcctttttggcgattttatcttcgccttcgtctgcatcgtgttccagatgaccgacatcggtaatgttacggacataacgtaccttgtatcccagatgggtaagataacggagcaggatatcgaacgtgatggcggggcgtgcgtgtcctaaatgggcatcgccatatacggtaggaccgcatacatacatacctacatgaggggcatgcaagggaacgaaaagttccttttgacggcttaatgtattgtaaatggttagtttattttccataattcattctattagaattgcaaagttataaattaaagtgtgtatttggctaataattaacaaaaaatctgatgctgatgtcctctgcttgtctacaaatggtgtttgttggtttaaaggatagagatttatggtaataaataaaagtaggttgtctttgaatgtaaaagaacagaatgatgattttttgtatggagattagggaacctaactctttttccttttcatgaaataggtttctcttgtttctgtttatgatctttaatctctgctattgatttgtaaaacaggaccactgcctcataaaccttggtgttgttttacggggcagtggtggtgtttctatatgaagtttgcgtgcggagcgggaatgtttatttggacttctttccccaatacgtcttgttgttggcatagccggcatagacgatggtatgggtgcgcggactggcttcccagtcggtttcgcgttgcagataaagttccactccgttgacagtcagaatctgttgggcggcatcatagctccacgtactgcctttccagataccttcggtgatagtgtggtcggcggcgagagtcattgttgctgaagttctctgctctccatatttgtatgtaaggtcgatgtgttcccaattgccgggcaattcttcttcggtgatggctaccttgggaacggctccgtagcgttcaggcattacgagaggccaaccgtctttcgtccagcggatgctgcgtacgtgccccatcatgatggcgttgctggcattgatgcccggaacatccttaggcagacggccttgtgaggcgtagaaccagttgtctttgccatcgtcgaagatagcgcagtgggcgatgcctacccagccgtagcctttgctgaacttatagggatgagtcactatgggcagtgcatcggcaccggcggtcacgtctttgccgtcaatgcccacgtagggaccggtgatgcttttcgagcggaccacacgggtgttatagggcacgtcgagagcgtcgtaggccaggaagaggtagtagtagccatcgcggtaaatgacttcgggaccttcactggcttgccagcggttacctgtctggcgggtggcgatcaactgaccatactcggcaggtgcttggcctgtagcccaaggttggcccaaactttcggcaggcttgcctgtttcgctattgagcttgagagcggctatgccgctatgccatgaaccgtagaccaaccagtgctcgccttcgggcgtgatgacataagaggggtcgatggcattccatttataatagcaattggcccaatcatccggcttcacgttgaagttaagtcctttgtcggaagcattggtgatgacgtagcctttgtctacccatccgtcgttgttggagggatcgttgttttccatcaggccgataaaggcgcgctccgaccaggtgttggcaccgttgagtgtgccggggcagacaatggaatagtacatgcgatagaggccgttctttaccttgcgtactacgggagcccaatagccgaagtcattaacattaggattgatttcggcaagtcccatttcttttcgtatttcattgagcttgggcactacccattcgggcaggttcttcattgtaccgccgaggtattcccagttgacaaggtccttggagcgacgaccgtggaagtggccgcctgcggtgtggacgttgccgtatgaagcatccgtctgatacatgtaataataaccatcttcggccaatacaaccgaggggtcgtgtacgttggcaagattccattgagagcgtttgctccagtcacttatcgaggtatagtcatcggagtaggtgggggccacgtaattcttgagttcatcgtctaagcttaagctttctgtggtggccgtgaccacctctgaatagacataacggctgtcacagtagacgtatgcacggatatagtaggaggtaccggaggtcaaggttgagagggaagcactgaaattctcatcggcatccaccacgtggtctttgatagtcggtacggaagctgctgcactgtaacagaagcctttcttgactatttggttcagatcacctgtaaccgatgcggtgacggtcaacgaggtgggtgtggttgtagttactttcggagtacttacagttgcataatagcggtctatatcttcgctgttgtcagaacaagcggctaaaacaaggaatattggtaagaacatccacaatggtaatagttttttcatctgttgatagtttaaagaccatgccgcttcttcctgaggaaaacggcatggcttgtgtgattactgattcggattagaagacgagatggccgccttcaatcgttaaagcgaagttcaagtcgttcatatccaatttgttgatccctaaatagtattgggcataggaagtacctgaagtgcctttcattactgcttgaatgtcggctgtaccattgccgcaattggtcacgtagacggtgactttggctccgttcatatcggcaagccaagcagcccagtcgccttgtgtaccgttgtgaacgaggctggcatttccatcgtatcctgcaccccatccatagttgtcggcgcgtaccactgcatattcggcaagatcggctttgcggagaacgatagcgaagttgctccagttattagcttggctggtgtaattggtgaagctgatggatctggtttcacctgccggcacgttgaaattgtcagaaaagacagtccaccaacccgttgaattgtcttcggctcctatgataccggctgagttgctcacagcggcaaccacagattcggcaactttgacttctacggtagcggtaacttcgtcggcagtaatggttacggtctgcgtaccggctttggcaggaatggcagagaaatggagtttggcgttgtctactactcttgtgcttccgtcggcataagtagccgttacttccaatccttcgggaaggaatgccagcgtacggtcggttatcgtttccgttgctgccgaagtataatagtaatactgcgtgtgcgcaggttgagccgtcacttggatggatacaatcttttccactacttcaaacgtagcattggccaccaccggctggttgcaattctcgcctttgaaggtcttgttgtagatgactaccagtgtcttcgtgcccagttcgttcatattggggatggcagtgaactggagttcttctgcggttacggtcttagtcaccccttcttcgaagctgacgatggcagtaatcccggtcacggcttcttcgagtgaggtgccggcattgacctgatcgggtacattttgcagtaccatcgagagcggattcttgtcttcggcagaagtaaggccgccgataggaacgatgttcgattgcaagaagttgatgtaagagccttcgggtaccaggaagcagcggatgttggtattgctcgcgtctgcattcagattgggtaacttgtacggctgtttgtaggttttggttgccgaggcgttctggattttgatagagaaggcattttcattggtgcggtctacggtgagtgttactttgccgcccaatttctgtacagtttcgtccagattgtcaacgggtgacagcatcagtgtgctggaggtgtatttgaagaagagatgggaaccccattgggagttataggccaaagtatcgtttgtggtatcaaaacgataagcgccatattccgtgtatccttcacctccgcggtctgcgtcattggttatgactagggcgaagtttttataataggtattgtcggcagggttgatgttgaggttgaacactccatgccacttctgaccatcgggcacgacgtaatacttggagaaagctgtccagaaaccggaggtgtagtccgcattaccgaaggagtagacatcttcctgcatgccctccagcacttcttcttccggatctttctttgaatttgctatggagtccactttctcggaaatccagtcaggggcgttaacatcatacagctcgccaccctcgcagcttggcaatgccatcaacccgaaggcgatggaacagcaagcgtatactaatttattgagtattctcattgtcttacattttaataggtttgtttatttgcttaagtcaaccaccggatgaacagtccatccgttctcactgaaataagtagagttgtccgtgctaaagttggcagagttaccacttaggttagggttcttgttcaacaactgttgtacgatgggcagaaattcgtgcccgggtaagtaggtgtcaaaagaactttttagttcggagtcggttgcgatatcgttgtagtctacaggatctttggttccggttacagaacggcgtacgacactgtgctccttaagttgttgcaaacgatcattcttatagaagaatccccagcggataagatcgaatccgcgtccgaactcacaaccaaattctttcggacgctccacattggcaatctgctcgaagagtttgtcggctgtagggaagtcagccagttccagatcgggcaagtcagcgcggttgcgtacttcgttaatccagtcgatggcctgttgtgtggggccgttgacttcgttttcacattcggcagcacggagcagcacgtcggagtagcgcatcagacgcaagttgattccatcgtgtaaacctgtaataacggtgctatagagtccggtacggaggtttgtgaacttggcgatgggtagaccaccgtatgtgttgttggttacgatgttgtcggtggctgtaagtttgctcgtataagctacattgccatattcaaagtcttcccaatcggattcgtaagtaccgatggtccagtacagacgcgggtcgagtttgccgtcagtagtacgttctgctttgaagagatggtagagccagggggaagccgaaatgtcggcccaaccgccataattgccgggagcgaagttactctcgatggccgaaccttgggtggcattcgggctggtgttcaccggagtccactcgtcgtcggttccttgtgattctaagtcaaggaattgcacttcgaaaaggctttccttgttgttctcataggcaggaccttcacgaaagttgtcgccatagttatccatcagttcataagtaccatattttttgccgataatgtctttcagtacagtaagggcgtctttgaatttatggcgtaccatgagcgcacgggcatagtaaccggctgcggcaccacaggtggcacgtcctttttcccattcgccaccttgatctcgtgagggtaacaattccatggcttctttgaaatcactttccacttggtccagcacggcatcataggtgctgttgccggtataaagtccatccaatgaagagtaggtggcataatctgtgatgaggggcgggttctggtaataaccaaccagattgtagtatgacagaccgcgcaggaagagcacttgtcctttgatgcgtttcattttttcggaaagctggctgttgtcttcatcgcaacgggaaatggcaaaattacatacattaacggtgtagtaccattcgcgccagggccaccacgtgatgtccgaggttacttccgcattcaggtcatcgaaaggcagataccatacttgtgatgaattccaggcttcatcgccacgacacacatcaatggtgtagcctacacgggcgtaagaaccttccatacggatatggttataggcggcaataacgctctcttccaaatcatcggcattgaaaccgaatgtgtttgaggtttgctggttgggatttaacagctccaaattatcattgcaagaagtcaatgtgcctaatcccaaaaagagaaccaatgcatatttattgagtttcatattgttatgtttttagtgattagaaagtgaaatgaacgccacacatgaaggtacgtgcggtaggataagaacagaagttatatcccggtgtgaaggtacctcctgcatagtccacattgtaacctttgtagccggtaaaggtgtgcaggttctgtgccgacacgtagaaacgtacatccgatacgtatttgccaaaccattcgttggggaagttgtagcccagttctatattggcaattttccaataagctgcgttctgaattttgcggtcgctgaagagatcgttccaggccaggctggcactgttggtgacataggtacgtggtacgctggaaagataggtgctgccgtcttcgctgaagcgattggcgtcgagcatggctacgtctttgttgccccagccatagcaagagttcagagagttgtggatgtcgtcgctaacatgatagttgagtgcaccgaacgtagcgatgctcaggtcgaaacgtttgtattcgaagcgggcgttcaaaccgaaattgatcttaggcataccgctgcccaatactacctggtcattggcatctacctttccgtcaggctttccgtcgggaccgcttacgtccttatagaggcagtcacctatttgggcgccttcttgtgtggcatggttgtccaagtcagcttgtgtgcgggcgatgccatcataaacccatccgtagaatttgccgatctcttcacctacgttggtgatgtaggcgccggagatgtatgaatcggtaccgaagcccaatgaggttacgcggttacggacagtacttaagttagccgacacttcatacttgaagtcgtggtctcggttgcggtaagtagctgcaaattcgaaacctgaattgttcatcgaagcggcgttcattgttacggtggtattggatacaccggcttgttcgggaacgggaacagcataaagcaggtcttcactggtgttcttgtaccattcggcagtgaattccagacggttgttgaacaaggcgaggtcgatacccacgttgtagcttttcttcttttcccaagaaaggttgttgtctacgaaagtggaaatagcagaaccggtgatgggcgtgttgccaaagctataagtcatgttattacgtgccattacagcctgatacatgtattcaccaatgttttcgttaccgagctcgccatagctggcacgtaccttgaacatgttgacaatgtttctgttgaaggggaagaaagactccttgtcgaaacgccatcccacagaaacagaagggaaggtgccccaacggatattttgggacaagcgggaactgccgtcgcggcgcacggttgccgagaacagataacgctcgtcgtagttgtagttgatacgcccgatgtaggataggagggtgtgtttgtattcgaagctttcagcgtaagtgttggcggcattctggagttgcaggaagtaaggctcggtgaagttgacgccccagcctgtcagcaagtcggtgttttcttcttcgtaagtctggccggctaccaggttaaaatggtgtttgccgacggtggcatcataagtcagcacgttttcaatcaaagcatcggcataagagcgggtagctttggtgagacgttcgttgcttttggccagatagacacggttgctctgtacccatgcaggaatccaggtgaagtccttgcaatgggttttgctgtaagagagattgactttatagttgagcttgtggtttttgctgtcaataccgatcattttcaggagatccacatcggcagaggctgttcctacaaagcggtctacacgggtattgcgctttaacaggttattgactagcaaggggttggaagctgaaatgtcaccatgtacggtgtcgtagtaaacaccataaccataagagtcatagttgaagttattggcgatccctaccagattgtcaagtacccaagtagagttgtcgtaggctttgatggtgggttgcatcagcaaagtaccacgcagtatgttggttacgtctccatacagaccttgaacgtattcggaagcgtttgacaaacccatgttgtcttgatcggagtgagagtaaaccaggctggtatggaacttgatgaatttggtgtccatcgtgttgttgacacgcgccgtgtaacgttcgtagttgggaccggcgccttccagtgtacctttctggttgtagtaatctaatgaaacgttataagtattgtgggcaccgccaccggagaggttcacattgtgattttgacggatacctgttttgaacacttctttaaaccagttggtattggtgttatcctggaaatgatattttccggtggtactgtccagcttgtaaccgccgggcagcggagtgttggagttggcgcatgcctgaccgatgtactggctgtattggtcggcatccattacgtcatagacactactgggaatgtagtccatacctacgtacccattgtagtctactttcagcggttggtctttctgaccgcgtttggtagtgatgatgaccacaccgttggctgcacgcgaaccgtaaatggcagcagccgatgcatccttcagaatttggatggtttcaatatcgtttgaagagaaatcgcggatggaagtacccatggggacaccatcgataacataaagaggagaagtgtcaccaaaagatccgacgccacggatacggacggtagggtcggcaccgggctgcccgtcggaagtgacttgtacgcctgatactttaccttcgagcatggtggagatattggaatgggatgtctgtttcaaggcttccgtgtctactacagctacagaaccggtcaaatcggatttcttttgtgtgccataacctatgacaacaacttgttccagcatctggttgtcgggttgcaattggatagcttcaatgatagcgcggttacgaacagctacttcgcgttccttgtagcctacatagcttatcgaaaggatagcgtttccggcaacctccagttggaagtttccgtccacatcggtaatggttccaccttgtcctcctttaattctgacagtagctcctgtcaagggctcaccttgttcatcgataacttgaccgcgaaccttgatagccggagattgtgccacggtagctatagcaggtgtgggatacaccatcatgccacccatagcacacagactaagcattacggaaaataataaatgtttcctcatttttttaagtattaaattagtagattaaattgttgctgatgtattgaattgagatgttggattattgtacaatccaatgttgaatactctaggtagacaaaccacagagtttataaatatgctggagctattcttcataatatttaagattaggattagactttaaaagcagggttctcttccgaaagattgagcaccgattgcatgacaaaagtataatttacaccgtaaacaggggtggacaaacggttttatagggtggacgaatggataatggaaaaaaatgtatttattccgcttatagtttgcgtcttttggaggtggtgagataggcttaggagaaggctttttttatataaagtcatgtagccggacaacctggtgaaggactgtccggctacatgagggataaaatacaaataaaattctctgaaaggaattatttcacaagtaaaaatcctccttccgcctgcatcgtaatgctgacttcatcattcttttttaatgttatctcttcagcgtgaggatttagttttttatcgtcctgataaagcatcactttatctcctttagtacacatgggaaggttcaactttaatttcagcggttctttttgtgcattgattccggctatgtaccatttatcggcatgccgacgtgccagtactacgtatttgcccggatagccgtcaatgaatcttgtttcgtcccatgtggtgggaacttgcttcatgaaatccaaacaaacttggggggcatcggtcaggttattaggcgccaacgcaaaattctgaataggattttggaataaaacggctgttgccagttggaatacatcagtggtcttgcgtatgcttccgccgtcattgttgcggttgaggcgtttgttgaggaatgtgccgccaaactccatgcaaccgatggtgttgcggataaatggatgcagacaggcattaaatgcttcttcatcgcaaaaatgttgttggaaaatcaggttttccgatgcgagcacggcttcgcttcctacataattaggatacatacgctcccatccccgaggaagggtacagccgtggaaaatgaccatcagtccattatcatccgcatcgctcaggatggcttcgtacagacgcatggtttcctgcttgtcacctccgaagaagtctactttgattccttttactcctatattatgcagccatttcatttcctttttacggataatgggattgtccatgtaattggtaggaccttgtacgatatcattccagtagccgctggaactataccataaaaatacatctacatttttactgtgtgcatagtctatgaagtctttcatacgttcacggccgatgttggtatcccaccagttgtctatcaatacatattcatatcccatggcggcagcaagatctacatattttttctgatcgtcgaaattgatgctgccatcttgccaaagtatccagctccaggttccgcgtcccattttgtatgtatgctccgttgggtaaagaggttccacgacatcccatggaatcgttgtttctacaatgggcttcaggttttcgcctacagtaatagtacgccaaggagtggaaccgggcaatgcaagaccgggagatgccgtaccgttaccgttgttttcttcgggcatggggaaagcgagggtataaagtccgtcggcggtggcatcgctcaggtgtgaaccacagtatttgctgtctactccggtttcactgataagtgcccagccattttctcctacatggaacagacaaggaaatgtgtaaccgtgcccatattgtgaacgtacattcataggagcgtcagccttatattcttcctcataactgggcttggtacgtttccaacctatcatggcgtcactttgcgggcacaggaaagtagtggtgaaggaggggaagtcaaaaccggtagtttctttttctatcacgatgcttcccgtatcgccatatttgggcatttcgtagcggaaagcaatatcgttgttgcttacgcggaatattatatttatatttttcttttctttattggtaaaggtgcatgtaagttcattggcttgataatgaatttgtgattgtttgatacggtcttgtgtataggtcttatctattttattctctttttgtccggtgaaagtcatatctcggctgaagtcccccacattggcaatgaaacctaaaggtgaatcttccaggatggtcttgtccttataggtaacggaataaacggggataccctgttttacggatacatttactttcaaaaaggaatcgggtcctgtaactgtagcttgttgggcaaaagctgacattgtagtgatggcaagcagccaagtcataaattgttttttcatgggtattaaatatgctattataatgtagagcaaagataatttatttagcgaggcgagagcgtagaaaaacggagcatttatggtatacaatccgttcattttacgctctggaataagtcagtcggttccattctccatcatcgaactgggtgttgttccgaaatgttttgtaaagcagcgtgtgaagtatttgggatcattgaatcccacttcgtatgctatttcggatatgttcatattgtgcgtcagccggttacggataataagttcccgcgcaagattcagccggtagttacgcatgaattgtccggcagactgtcccgtcagattttgcatttttttgttcatcaaacttttgcttacccccattgcttcgatgaaatcgcttatttcgtaataggagttcttatagttttctttcacaatctgcatcgccttgtccaggaatttcttgtcactggattctttttcgatattcagtgcatccacatccatactgtatgagaacttttgttggaaacgtttgcggttttccagtatattggatatccgggccagcagcaaagtatcatcaaatggtttcagcaggtattcgtctacacctatacggaagctttcgatacgcgattcgttggatgttttggctgtgagcatcaggaaggggatatgtgagatggcgaaattggattttacccggcgggacagttccataccatccatgacaggcatcatcaggtcgctaacaataaaatccacgttctgggattggagcacagtcaatgcttcttcaccttgggatgcttcgagcacgttataatattcggccagaatggaacggatatagtcgcgcatatctttgttgtcttctactaccagaatcgtcagtttttcattggtggcaggttgcaaggccagcggagatcctaccggttctttaatttgctctgttggtgcgggcagactgtctgcatcggcatattgcaaaggaagtaaaatacggaaagaacatcctttgctctgattattcttggcacaaattgaacctccatgcaactggacaattcgtttgcatagatagaggccgattccggtcccgctttgtccgttgatagaggaatgcgtcttgttttgtgattggtagaagcggttgaatactttgtctatctcttcttcgggcagtcctggccccgtatcccggatacagatgaacaacttttcctgctcttcctggcggaagggggtggcatagatggtaatttgtcctcctttgggggtaaatttcaaagcatttcctatcaaattgacaatcactttatgcatggcatcctcatcgtacatgatttcacatgaaggaaggcggaaacgacgttcgatggttattcctctttcggatgcatatgcgtcgaagggaaccagcagttcattgagtaacttggtaaagttgcccgggttgcggacaatttccattttccctgattctactttgcggaagtccattaattggttgaccagtgagagcagatattttgagttgcgctccacaaaatgtaattgttcaatgacttgaggattgtagcttagtttcaatgccctttctataggtcctacgattaatgtcaacggagtacggaattcatgggtgatattggtgaagaaggcgagtttgtcaaccgtcaattcctgtactttctttgacatttgtatcagttgtcctttttgtttggttattttttcgttttgctgtttcaatagttggttttgacgatagagctcgcttgcctgagtggaaagcagttttttttgttcttccagttcacgggtacgttcctctactttgatgtggagtatttcttgttgttcttttaacgaacgaagcctccatgataataccttatatataaggaaagatagaagaaccaatatggacagaatgaaccagatggttttatagaaataaggtgatacggcaatgtggagttctgccatttcttccagccattgtttgccgtcgggggcataacgcagttcgaaagtatagttgccgggacgcaggttggtataggcggcttgtcgcctgttggccggcacttttatccatttgtcgtcaaatcctttcaagcggtaataataattggcgaatgtcgatgcatcataatccagtgcggcaaattcaatatagagagatttgtcgcgttcgtgtaactgtagggtgccgtttgtgtacaatcgttcttcattggccacacgaacatgggtgaatgccagaggaacagcctccttgggatttgtgtctatgaccggtttgactacagacagccctttagtacttcctacatacaaatctccattggcggcacggcatattgcgttccaatagaactggttggataatagtccgtctttccgggtatagttgaagaagctgttgttgttaggattgaagcgggagagtccgttggtggtggtaatccaaagatacccttctttatcttccgatatgcagcggacactgttgtttatcagtccgtcttcggtggtgaaggagcggaaggtatattctccgttttctgttggtgaggatttgtagaaaccatatccgttgctgcctatccatagggttccgtctttagactgggtgatgtaggttaccctttccttcaactttgattccggttcgtccagcttgatcctccagagttgataaatcagtctaggggctttcaaactgcttagatctattcggcaaagtccttctgtaagtcccagccacaggtggttatccttatctatatagtatcctgtacagccttcaattccacctaggttcatacccttgaatggttcggtgagcgtttgtgttttcaagtcgtaaacatagatattggtactggttcccacccagatggcattattcaagtggtcatagcagatacttccggcccatccccatgagaagtctccgtattcgggtatttctatgtggtggaattgtttgttctgcggatttttcatgtctatccatcctatgcctcctccccaggttcctatccagagtcttccatcgttatcgctggtaaaacaactgacggtattatggcttaggtgggcgggtgcatcagtggtatagtgttcaaaagtgttgctgccgggagcccgccggtttaaacctccttctacggttcctacccataaaacacccgacgggtcttcataaatggcattgacgggattttgggaaagacttccgggaatggtgggaatatgataatagttttgtaccaacagcatccggcggctcatcttgttcagccctcccacttcggttcctacccagataatgtcaccatcggtcagcagacagtttacgaagtcacagttcaatgtgttttgtacaatttctccttctccggtatctttatttatccgctcaaaattgtctgtcaacgcattataaaggtttataccttttagggtggcaaccagcatggtatgttctcctgtttctgctatgtctgtgataaagttttgggaaagcgagttgttgtcattcggatcgtacatataatgcttcatcagttccgtatccatattgtatcggaaaaggccttgtgcgctgccaatccaaatttcattttctttccggcagattacttgtatggacacaccgggtaattgcagggcagatgaaatgaatgtgggttcctgtacttccatagccgattctttgatgcggtagataccgtctttgtagtttatccaaagatagtcttccacctcacaaatagtccggatggattctcctgccggcacttcgcatattttaatgatctgtcttatatttccttgtttgtcaaaggtaattttgaataaattgttttccgaacaaacccaaatatttcccgctttgctatggagaatgagatgggaggggcggttgcacagtgaaataagtttgtctttcgtatcagcgacttgtacagtctgcatggtttgtatatccaatatgtcaatacccatttcactgacagcccaaatacgcttgaagttatcctcacacagtttgtttatgaagttgcttcgtagtttggtgtgggtgcttcccatattgaaggcggtaaattcataaccgtcataacgggcgattccttccccacgggtggcaatccataaaaagccctgactgtctttcaatatatcgtccacgaagttgtgaggcagtccttcatccatcgtaatagcggtgacgttatagcgttcagaccattttccggcggtctcttcagcttgcatagacaggctcgacagaaagatgaacagggcaaatagcaaagaatgtcttttcatagtgtgtagttcattaatgacgtaagaatataccattatggaaacaaagatataccttttcgtttttccttaaaaacaaacaaatcatttttatccctctgctgtacaaatgtccaccctttaagcgatattgtccacctggcgagcttttggttgcagctatatttgcattaataataattagtcaatgtgtcaatatgccaatgtgccaattggctgcgctatatgccacatggccattgataaattagtacattagcaaatggtcatataataaacaaaatactatgaaacagcaattttttcctcaaagattattcatggacatgaagaggttaataataaataggttagttggtttaggcctgttggtcgtaggggcattggtatcatgcaatgcacctacggctttcgtgcctgttccttcaccgaatccttggatggatgattataccgccctttcgtctatggaaaattataagcagtggggaacgtataatgtacacgatccggcttgtaaaaaaataggggatacctattatatgtattccactgatgctatctttgccgagaaccggaaagaggcggaagagaagaatgtaccgttaggttttattcaggtacgcaaatcaaaagatctggtacattgggattttgtgggatgggcctttcccgaaatacctgctccggctatagaatgggtccatagtcaggcggagggaaaaggggcgactaacatttgggctcccttcctgatgccttatcagggtatttatcgtttgtattattgtgtatcggcattcggcaggaatacatcctatatcggtatggctgagtcggattctcccgaaggtccctggatacagaaagggtgtgtggtcaagacaggggaaggggatgcgatgaatgccatagacccttctgttattgaggacccggaaaccggaaagtggtggatgcattatggctcttatttcggcggtctgtactgtgtggaactgagtcccgaaacaggaatgactatgcagccggaggatcatgggcacttgatagcacgccgggccaattaccggaaagacaatctggaagcgccggaaatcatgtatcagccggaacttggcaaatattatctgtttacatcctacgatccgctgatgactacctataatgtacgtgtcgcttattccgattttcccgaagggccttttgtggatttctatggagaggatataaaagatacaacgaataatgttcccattttgacagctccttaccgcttcgaaaatcatccgggatgggcgggaacggctcattgcggtcttattgatgccggtgacggccgttattttatggctcatcagggacggctctctcctcagaaccagttgatggatctgcatgtacgtgaagtgttctttactgtaaacggatggcctgtggtttctcccgaacgctatgcaggtactgctccgcgctctttcactaaagaagatttggcaggtgagtgggaaattatccgtcttcaggagccgcctctggaacgtagcttggaggccggtcagataatgtggggcgagggagacttgcgaaatggggagcaggcattgtctgcccgtgtcgttttggaagcagatggcagtgttggagatgcaacttgggattttaatgttaaaaaacaacttcttactataaaaacagccacagaagatattaacaatttgattatctttgccggacacgattgggaaaatgaaacagaaaccattctctttaccggcctggatgctcaagggcattcggtatggggaaagagaattaactaataaaaattaataatattactatcatgaaattacaccgaactctattcacagcatgggtatttgctgccggagtagcgctacatgcacagaatgcgcacaacatggtcgtgcagaccaataaacttggtgcggaaatacaaccaaccatgtatggtttgttttttgaggacattaattatggagccgacggaggattgtatgccgaactggtaaagaaccgttcattcgaattcccgcaacgttttatggggtggaatgttttcggtaacgtgaccttgatggatgacgggccgtttgaacgaaatccgcattatgtccgtctgggtaattccgggcacagggaaaaacatacagggattgaaaacgaaggtttcttcggtataggtgtcaaggaaggagccgagtaccgtttttccgtatgggcacgtggtgagaaccagaaacttcgcattgaattgatcaagaatgatacgatggaggaacgtcaggcttttgagtcaaaagaactgacagtgaactcgaaggattggaaacaatatgaggtgatattgaaatcgccgagaacggaacccaaggctcatctccgtattttccttgaaagtgcgggaacggtggatctggaacatgtttctcttttccctgtggatacttggaaagaacgtaagaacgggcttcgcaaggacttggtgcaggctttatatgatatcaaacccggtgttttccgttttcccggcggctgtattgtggaaggtacggatgaggctacccgttacgaatggaaaaaaacagtaggtgcggtagagaatcgtccgttgaatgaaaaccgctggcattatacgttcaagcatcgtttcttccccgattatttccagacttacggactgggcttctttgagtatttccagttgtcggaggatataggcgccgaaccgttgcctattctgaactgcggactggtatgccagtatcagaatgaccccgaccagcaggtcagcttgtccaaacttgattcgtatatacaggatgcattggatctgattgaatttgccaatggtgatgttacgactacttggggaaaagttcgtgcggatatgggacatcctgctcccttcaacttgaagttcttgggtattggcaacgaacaatggggaccggaatatccggaacgtctgaaacagtttgtcgaggtgcttcgtaaggcgcatcccgaaatcaagattgtcggcagttcgggacctcagtctgaaggtaaagactttgattacttatggccggaaatgaaaaatctgaaagtggatttggtggatgagcatttctatcgtcccgaaagctggttcctggcacaaggtaaccgttatgacaattacgaccgcaaaggtccgaaggtctttgccggagaatatgcttgtcatggaaaaggcaagaaatggaaccattttaatgctgctttaatggaagctgcgttcatgaccggactggaacgcaatgccgatgtggtacacatggctacttatgcgcctttgtttgctcatgtggaagggtggcagtggcgtccggatttgatttggtttgataatctgaattccgtccgtacttgcagttactatgtacaacagttgtacagtcataataaaggcacgcatgtattgccgttgacaatggataaaaaagctgtgagcggtcaggaaggacaggatggtctgtttgccagtgccgtatgggataaggatgaaaaggcttgtatcgtgaaaattgccaatacttcggataaggcacaaccggtatcagtgactttcaacggattgaagaagagtgataaacttgtggaaggtaaatgcatcacgctccagtctgccgatttggataaagataacacggtagagcatccgaatgtcatcactccgaaagaaagtgatgttacgattgagggtaatgtactgaatgtagagatggcgcccaagactttcgtgctttataagtttgttaaggcaagtaataagtaaaagatgaatcattcctttaaatgctaacacagaggatagagaaacataaagcagccgaagggctgctttataatcccaactgcatccggaacttttaaaggaaatgtatacctgtctcccttggttgtaccaagggagtttttttgattatacgtatattgtcatcttggatttttcacgttattttgctgtaaatcagtaatgtaccgtgaaaatacattctaaattcccccgaaacggtttgccattctccgctgccaaatttggtttgacggatatcggttgttctgattcctgtgtcatagctacggttgttccattgcaggggagcgtcataaggcgtatttttgttcgggtgcgttcattgcttcactaaggtgaagaggcagcttcgcttaggtgaacagccgctttcacccaagtggaataactgcttcacctgggtgaaatatcaaatggagtgaggtgaaggtatgatgagaataggttcttctgatgcctacgagctaccgggaggtaacgaggggctgattttacattctgtccgagagcatccccgaagcagatgtatttcgccaccggcataccgattgaggaggttttgaaagactgtcgcacgggaagctcttggtaatgagtgagttgttgtgatggaatgcttttatgttttatgtaaatgagtcaaaagtgatttttgttgtcgttatgttgtatgggcgggctcatgggcctgcccatacggtggaacatttgatggttatttcggatttttgaaatatcctcttattggatgagtcctgtttacatctttattctcttattgcgtacttgcctcagaatggtctgcaactcaaatactttctcaggatacttttctgctacattctcttgttcgctcaccttttccatttcatataactggggaacgttcaggtttccggtttctattttttctgctttcatgaaagtggtcgggtcatcattcggttcaatgtatttccagtctttggtacggacggacaacgtgtggttcatggattgttccacaatccaggggcggtctgtcttgtcggttcctatcagattccctaaacggtcataactgtccggagcgctgcctttaggtaatctggcgttgatcaaagctcctaaggaggctagccagtcaatctgtgacattaatacgtccgagtctcctgtcttttttatcttctgtggccagcggacaatgaccgggacggctgttccaccctcgaaagcgctgtatttgtttcctctccacggaccggaaggtgtatgtccgttcaacagctcttctgccttgtccttatatccgtcgtctacaaccggaccattgtcgctggatagaataatcagcgtgttttcagttagtccaagttggtccaatgtttccatcagctggcctaccgtccagtcgaattgggcgattgcgtctccgcgtagtcccataggattctttccacggaagcggtcatggggaaaacgaggaacgtgtacatcattggttgcaaaatacataaagaaaggctcgtctttatgctgtttgataaagtcgatggcatgaacggtgatggaatcggcaatgttctcgtctttccaaagtgcttttccgccccctttcataaatccgatgcggctgatgccattgacgatggacatgtcatgtccgttgctgggatgtaggttatacagtaattcgggattatctttgccggtcggttctcccggaaagttcttggtgtaactcacttctatgggatcggacggatcatagttggctaccttgccgttttctataaatacacaaggtacacggtcggctgtagcggccatgatatagtgatagtcaaagcctaagtcacctaaagcggctggtaaaggagcattccaatcctgtccgcctgtcttgtctcccaggcccagatgccatttgccgatggcggctgtagcatatccggcacttttaaacatgtctgccatggtgtattgttcgggacggataatcatttttacatctcctgcggcaatgtccgtgtccggtctgcgccatgcatattctcctgtcagcaaggagtagcgggatggggtgctggtagcggctacggtatgtgcattagtaaaacgaatgccttccgatgccagtttgtcaacatggggagtttctacattcttggctccgtaacattttaaatctccatatcccaggtcatctgccagaataacgataacattgggcttttggggggcctgcgtactgtttttttgaacggtttctgctgttgcagagttacaggcggctaatgaggcaagtaaggatatgcctgcataatttctacttttcatctctatttatttaaggtttgatccggatacatgtctattttcactttccggtttctcgacctgaaggtgaagaacgacggaaagttatcaagaaaatcttgaagcagcaaaaaagagggccgaaatatgatttgaaagtgtctggaattagatgataatgcccccacccagtactacatcatccctatagaaagcggctgcctgtcccggagcaatggctgtcagcggctcgtgcagttgtacatgcagggtgttatccggttgcagggttactgtgcagcggttggcttgtttccgatagcgtattttgacgatgatgtcgtccttgtttagtaataaagcgggattggtgatgcgccattctttcagtctcatttctgttttttccagtgctttcaagtcgctcagtatgactttgttttctgccggaatgatttctttgacaaagacagcccggttaagatctatgcccaatcctctccgctggccgatggtatagaaaggataacctttgtgccgtgcgataaaattccccatttcatcgaagaatttacccggtaggatacttccttcaggtaattccttatgtaggaatgtgcggtagtccatggggcagaagcagactcccagactgtcccgtttatgggcggctttcagaaaaccacgctctgccgcgatttcacggacacgggctttagtcaggttgcccatagggagaagcatacgttgcaggatttcttgtggcagcccccataggaaaaaggattggtctttatccgggtcggcaccggtagtgatgtgatagcatccattgatgaagcgccggcgtacataatgtcctgtagcgaagtgataaattcccatttcatcggatattttcttcaaaagaggccatttcaggtagttgttgcacaaggtacagggaaccggggtatgacctgccatatattcgttgatgaaatagtcaatgatggttttccggaaggtgtcacgaacatcgtatgtgagatggggaatgttcagacgttcacataaagcgcgggcatcctccagatactcagtatcattttctttttcataaaagcggaaggtgatgccggttacttcgtatcctgcatcctgcaatagaagggcggctacggaactgtctgttcctccgctcatgcctagtaggactttattattggactctgtttctctcatctttatagcagttttgtgaggatagatgccggaatatccattttggagaaggcaaacagtttctttcccaaatctttcaaagaggctccgatgtgatatatgtcggattggtctataataagaaaacggtcatgtgcctggctattagcccattggcggaattggattcctcgtttcgtatttacacggtatcctactgatataatcacatctaaattataatattctaagttacgtgtaatctgtctgttgccttcttggcgaactgttcggaaattccgaacggttgaactttggattagttcttctgatttataaatgttctttagatgctcgcttatattggctttgctggattggaatagttctactatttgtgcctgggtcagccacactgtttcatcttcaatgcgcacttccatcctcactgattcatccggctggtagagtatgatttctccttgttgttccatgtgttcgattttttgagtacaaagctagcaaatataaatcagactgatcttgttttcaggttataattgaaatgtaggatgggaaatgaaactccgatgacaatctatatgatagtgccatcggagttctgacatactcttcttattaaggaaggaatgcttgctatgtttttattttaccggcatcaatgtgaatccccaatgatattccttattggcgggtagggtatgttccggcagagggcggtctccccagctgtcataaccggctacaccttgttgcttcatatcaatacatacttccacaaaattacgtggggtgatatcattgacatgtgtcatgcggcgtattacatttttagctttttcctcattatggttagcaacttcttcgggagtgaagttagtccactgacggggacggctgatagcttcttccgagtcaaagtcctctacggagttgcgcagggcattgaatccgatagtgctgtcggcacgtattaacaatccttttccgcctttgcgggtcagttctacccaacgggtgtcggtgcggtgtccgttttcttgcggacggacatagttgttggtgtacatctggtcggctgtagtgcggtagagatcaacgaaactgcttgcattacggtcgatgtagttttcacccggtccgcgtccgaagtattctacctggttcatatcggatggcaaatggaaacgtacaccgatacgtggtacgttcagtttggaagaggcaaggcgttgagcatcctgtcccggtgtgaaagtggccattaaggtagcttctgatacttccgtgtcggcagccttcatatcggtagaagtaaaggtgatgcctgcatgaaccacaccgtcgggatagatggtatatttcatgatgtacagattgcctgccgccagtaggtaattgactgttaatacggtcttgttgccgtctgttgttgtggtaacatctgctacattgaaattcttgctggactgtttccatatttgctcgcgcttaggcccaccgttaccataatcattgtccgtcggtgcgcgccagaagttaggctgaataccaaaaccttcagcgaaatattctgtaccgtttactttgtatgaagtcacgagtccgcttttcttgttgaaaacgaactgcatacgtggtgataatacggtgatgacgtcaccatccgtgctgacggtagtcttgccgcttgctttatgtccggtcatagccaatggttctatgggcaggcggaattgttcggaagcaatatcgtgtcctgcaggaatcaagggctccggttctgtggtggtaactacaaaatctacaaaatattctgtgccggccttgggtttcaatccgttgaggttgatgttcagttctttggaaccttgcggttcgatatctaatgatacttttccgcctttgattgtttttccgtttgcctttacggtataactgatcatatactttttcaagttggtgaagtagaaacggttttttaccaggaatttgccggcagccgggtcgatggcttcgaaacctacattctgatgtgcatatttcacttctgtcatggccggatgcggagtgcggtccggagctacgattccattgcataggaagtttccgtcgctgggtgcattggttccgtaatcacctccgtaggcccagtaggtacgtccattttcgtctgtttccagaataccttggtctacccagtcccaaatgtaaccgccttgcaggttcgggtacttgtagattgctctccattgtgctgccagattaccattggaattgcccatagcgtgtgaatattcggatggtgcgatgggacggtcgctgcctttcttgcctatttcttccagccaggcggcactggggtattggggtacatacatatctgtgttccattcccaaagggcgcgttcataatttacaggacggttcatcccttttacttcgcgttctttcagccataaataggtctgatagaaattataaccgtttccggcttcgtttcctaatgaccagatggctacagagggatggtttttgttacgctcgtacatattaatggtacggtccatgtgcggcttcagccattcgggatggttgcccaatgttccgccccggcttaagttataatacataccgtggctttcgatgttggcttcatcatatacatagatgccatattcatcacacaattcatagaacttgcggtcttgcggatagtggcagaggcgcacgctgttgatgttgttctgtttcatcagggtgaagtccttgcgcatcagctcttcgggaacataatgtcctgtttcgggattatgttcgtgtatgtttacacctttcagcttgatgggttggccgttgacgaacaagcaaacgtatggtttgccgttttcggctatctgatcggttggtttgatctcgaaacggcggaaacctaccgtataaggaatgatttcgcttgttttttctccgtctttcagagatatcagtaaccgatacaggttagggtgttctgatgtccaggtcttgacgttgctgagggcggcttcaaaagagatgctcttctgcccgtctgctgtaacaggacagggggtgttaccttctgcaaccactttctttgcggcatccagcaattcgtatgctacggttacctctttgttggctgctgtatggttggttacgtccacattcagtttgaagataccattcttataagtgtcgtccagtgtagacaccacattgaaatctttgatgtgggttttgggctgtgagaacaggaatacatcacgttcaataccgctcatgcgccagaagtcctggcattccagataagaaccggtactccagcggaatattttgatgaccagcgagtttttgccgggtttcaggtagttgttgattaagaattctgccggattcttggagtcttcgctgtatcccacttcctgtccgttgacatacacgtatacaccggattttgctccttccaaacggaggaatatgtcgcgtccatcccaatcggcgggaatttcgatatcacgctgatacacaccgaccggattggtttcgggtaactgcggcggttgtggatttctgggtttgaattcgtatccatgattggtgtagatggccactccgtagccctgtacttcccagttgccgggtactttaatctccttccaggctatgttggcatccggttgctcaatgttggcaggcagatctttgtatgcatctgcataataaaagttccatgtaccgtttagtagtttgtaataagggctgttctcatactcgccggtcagtgcctggttccggttgtcgtaagtcatgaaagctgtgcgtggatattccttgttgacggctacggtctgaatatctttccaataaggtagttttgtatcttccgcatgaagaacttgtgttgaatatgcgcatacagcagcgccgatcaggaatttaaataaggttgtcattttaggtttcataggttcaaatagaaaaatgaagaagaaagggcgctagtaccggcgcccctttccttaagtccttttatgtaaaatagcaattatttaattgcgtctgccagttcagcacctggtttgaacttggttacttttttagcaggaatagtaatcgttgcttttgtggatgggttgatacctgttcttgcacttctttcagcaacagagaatgttccgaatccgattaatgatactttgtccccttcttggagggcttttgttacagttgaaacgaaagcttcaactgctttttttgcgtcgactttgctcaagccggcttcagcggcgactgcgctgataagatctgccttattcataacgaaaatgattaattattaaatgtaacacaaaagttttaccaaaatcagtgacaaatatatgctttcaaaattagaaatcaaacagatagcctaaaaaagatgctccaaaaatcaaaaaaacgtaagagaactcttgttttctgttatataacagaataaaattgtaaatttgcgcgcaatcaatgttttataagacgaagaatatttatgaacagtatacctacagtaaccaagaatttattgataataaatgtgttgtgtttctttggcggcgtggtagccatgaagtatggaattgacttgaacgacctgctgggactgcacttttttatggcatctgattttaatcctgcccagttgattacttatatgtttatgcatggcggtttccagcatatcttttttaacatgtttgctttgtggatgtttggccgtacgcttgaacaggtctggggaccgaaacgtttcttatcctattatatggtatgtggtataggtgcgggactggtgcaggagctggtgcaatatatacaatatgtgactgaattatcgcagtatgacagtgtgaatacggggattgccgtgatcccgatggcggagtacttgaatctgatgactacagttggcgcttcgggagcgatatatggcattttgttggcattcggtatgctgttccccaatagtcagatgtttgtattccctatcccatttcctgtcaaggctaaatattttgtgatgggatatgctgctttggagatatttttgggcttgggtgcttcgaccgatggcgttgcccactttgcacacttgggaggtatgatttttggctttatattgataatgtattggagaaaaaagaataacaatgggcagttttattactgatttgaaaaatagtttcaacaaagggaacatatatatccagtttatatatattaatgtaggggtattcattgtaacttccttattgggaattttatggatgctgttcaaccggaatggagcatttgtgcttcaatatttggaactgccggcctggacgttgcagtttgtcaagcagccttggtctttgctgacttatatgttcatgcacgcaggtattttgcatttgctgtttaatatgctgtggctttattggttcgggcagatgtttctgtctcttttctcggcaaagcatttccgcgggctctatctgttgggaggtatttgtggcggtttgttgtatatgatcgcttacaatgttttcccttatttcagtgattctttgtattattcttatttgttgggagcatcagcttccgtacttgctatcgttgtggccactgcggtacgtgcaccggaatatagagtaaactttatgtttattgggactgttaggttgaagtatgtggctctgtttatggttgtgaccgatttgctgtttatgacatcgggcaatgccggtggccatatcgctcatttaggaggtgctttggccggatggtggtttgcttccggattgtcccgcggacatgatgctacgtcatggataaaccgatgcttggattgcttctcggaaggtctttcgtttcgtcgtcaatcgaaaagaccgaagatgaaagttcattatggtgataaggcaaaagattacgattataatgcccgtaaaaaacagcaaagcgaggagatagaccgtatattggataaattaaagaaatccggttataacagtctgactaccgaagagaagaaaagcttgtttgatgcgagcaaaaagtgatatatgaaatatattggtcgttttttgggatggatactactgggcataaacttgtgtatggtggtattgttactggtatgtgcttacagcccttatattgatcctgtggctcatcctgtatggtcatgtgccggtttggcttttcccgcttttttgattgttaatcttttgtttctggtcttttggttggtgatttatcgtaaatatgcgttgctttcatttttaggcctggtatgttccattggtgctatccgtacttatttcccagtcaatgtatttgtatctgatgtaccggaaggggcaatcaaattcttatcctacaatacgatggcctttgaaaagaaccgtgcgaacaccaaggataatccgaatcctgtgctggaatatttaagaaacagcaatgcggatataatctgcctgcaggaatatattgtaggcggacggttaaccaagaaagaggtggattatgctttaagagattatccttataaaaattatcataagatatcgggggccaacggtttgggttgttattcccgttttcctattttgtcggcacatccggtgaaatatgccagccttaacaatggttccattgcttataaaatcaaagtgaatggtgataccttgctggttgttaataatcatctggaatccaataagctgactgagaaggataaagaagtctatcgcgaaatgatgaaggaccctgataagcaaaaggtatcgcaagggtctcgtttgctgatcagaaaactggcggaagcatcggctatacgtgccgttcaggctgattccatagctcgtttggtggccggttacaaagggggaggcataattgtatgcggtgacttcaatgattctcctatatcatacactcacagggtggtaggggaagggctgaatgatgcttttgtggagtcgggaaacggctttggcatatcttataatcaaaatcatttttatttcagaatagacaatattttattgagcaagaatttaaaatcttaccgttgtacggtggataatacgataaagagttcggatcattaccccatttggtgttatgtggcggagaagtgattttacatacctttaattgacagattatgaaaagactattatttacgttagcgacgtgttgtgtaatgtgtgcatgtgaacagaaaacagaaatgaatccgttctttacggaattccagaccgagtacggtgctcccgattttactaagatcagactggagcattatgaacctgctttcttgaaaggaatagaggagcagaatgcggaaattaaggcaatagttgataatcccgaggaacctacttttgaaaataccattgtggcgctggataaaagtggcgggattctggcgagagtaagtggggtgttttttgcattgaccgaagcggatacaaatgattcgttgacggccttgaatgaaaagatggctcctgtactttcagaacatagtgataatatttatttgaatcaggatttgtataaacgggtggctgatgtgcatcaacaggaacgggaaggtaagataactcttacgactgagcaacaccggctgttggacaagtattataaagcttttgtccgttcgggtgcaggactggatgccggaaaacaatcccgtttgagggagatcaataaagaattgtcgactttggggattgctttcgacaatcatatcttaaatgagaataacgcttatcagttggttatcgagaatgaggctgatttggccgggttacccgaatgggtgaaagcgggggccgcagaggaagcgaaagctgctggaaaagaagggaaatggctattcactttgcaaaactccagtcgcttgccttttttgcaatatgctgaaaaccgtgagctaagaaaaaatatttatgaagcttatatcaaccgggggaatcatgatgatgcgaatgacaataaagagatattgggaaagatcatggcattgcgtttggaacaggcaaaattattaggattcgattgttattccaattttgtactggatgagaacatggctaagaattcgcagacagtcatggatttcttgaacaacctgtggggatactcactggaaaatgcaaagaaagaggccgccgagttgcagaaaataatggataaggaaggtaagggagagaagctggctgcatgggactggtggtattatgccgaaaaattgcgtcaggaaaagtatgatttgaatgaagatgaaatcaagccctatttcagtttggaagatgtgcgtagcggattgtataccgtggccaacaaactgtatggcattacattgaccgaactgaatgatgtgcccgtatatgagccggatgtgaaagtgtatgaagtaaaggatgccgatggctcatttttgggattgttctatgcggattactttccacgcgcaggtaagcgtggtggcgcatggatgagtaattttcgtgaacaggccggtgaagtacgtcctttaatttataatgtggcaagttttactaaacctgcaggaaatatgccttctttactgactttggatgaggtggaaaccatgtttcatgagtttggacatgcattgcacggtatgctgaccaagtgtaactacaaaggagtgtccggtaccagtgtggcgcaggattttgtagaacttccttcacagattatggaacactgggctgtagaacctgaagtgctgaaactctatgccaagcattatgaaacaagagaagtgattccggatgagctgattacgaaaatccaaaatcagggtacttttaatcaaggttttatgactacggaattattggcagccgctttgcttgatatggaactgcataacctgactgatacagacaacctgaatgtcgttgcttttgaaaaagaaacgatggacaagctggggctgattcctgaaatagctcctcggtatcgcgccacttattttagtcatattataggtggatatgctgctgggtattacagctatctatgggcagaagttcttgacacggatgcttttgaagcgtttaaagaacatggagtgttcgataaaaataccgcagactctttccgcaaaaatattctagagaaaggtggaacggaagatcctatgaccctttacagaggttttcgtggggctgatcccagcttggaacccttgcttaaaaacaggggtttgaaataaaatagactgtgagatagaataatttaggctgcaaaaaatgcttttgcagccttttttctcttttggaatctaaatatttgtgtttgataccgtgggaatgtgaaaaaaaaactatatttgcaaccttgtataaactaagaattaatcaaaaagtaaaaataataaatttcaaagtaacatgcaaaacaaaggatttgtaaaggtttttgcggtattactcacccttgtatgtgtgttttatctttctttctcttttgtgacccgctatcacatggacaaagcggcacaagacccgaaaggtgaagcacattaccttgattctatgcagaatgaaaaagtttatttgggtagttatacgctgaaacagtgtcgcgagatggagattggtctgggtctggacctgaaaggtggtatgaacgttatccttgaagtttctgtaccggatgtagtgaaggctttggctgacaacaagactgatgaagcttttaacaaagcggttgcagaagcatcaaaacaatctatcactagtcaggatgactttatcactctttttgtaaaagagtataagaaacaagctcccaatggcaaattggctgaattatttgctactcagcagttgaaagacaaagtaaccacccgcagttccgacagtgaagttgaaaaagtattgcgcgaagaggtaaaggctgctatcgacaactcttataatgtattacgtacacgtattgaccgctttggtgtggcacagcctaacattcaggcgttggaaggaaagatgggccgtatcatggtggaactgccgggtatcaaagaaccggaacgtgtcagaaaactgttgcagggatctgctaacttggaattctgggaaactttcgacgcaaaagaaatagttccttatctttcttctgtagataacagactgcgtgatattcttgccgttgaaagtggtgctgcttctgctgattctgtagctactgatactgttgctgtagcacaggcttctgcaatttctgctgccgacagtcttgcagccgcattgaaaggcgaaacggcaagtaactctgccgcaatggagcagatgaagaaagaacatccgttggcttctgttcttcaattaaatccgaatggttacgggtcggtggtaggttatgccgattataaagatactgctcaggtaaaccagtaccttgctatgaaagaagtgaaagaaatgttgccgaaagatcttcgtttgaaatggggtgtaaaggctgctgactttgacaagcagggacgtatctttgaattgtatgctatcaagtctactgaacgtaacggacgtgctccgttggaaggtgatgtgatcactgatgctaaagatgaatatgaccagttcaacaagccttgtgtcagtatgtctatgaacactgacggcgcacgccgctgggctgttttgacaaagaacaatgtaggcaaggctatcgctatcgtactggatggttacgtatacagcgctccgaatgtaaacggtgaaattacggggggacactctcagattaccggtaactttaccccggaggtgacaaaagacttggctaacgtattgaagtctggtaagatgcctgctcctgcacgtatcgttcaggaggatattgttggtccgtcattgggtcaggaatctatcaatcaaggtattatttcatttgttgttgcgttgattctgttgatgatctatatgtgcgctatgtacggattgattccgggtatggttgccaactgcgcattggttgttaacttcttcttcacattaggaatccttacctcgttccaagctgcactgaccatgtctggtattgccggtatggtgttgtcattgggtatggctgtagatgctaacgtgttgatttatgaacgtacaaaagaagaattgagagccggtaaaactgttaaggctgctttagcagacggttattctaacgcattctctgctatttttgactcaaacttgacatcaattatcactggtatcattctgttctatttcggtacgggtccgattcgtggttttgccactacgttgattatcggtatcctctgctcattctttacagcagtattcttgacccgtattgtttatgagcacttcatgaataaagacaagtggctgaacttgacattcactacagggatctccaagaatctgatgcagaacgtgaattacaactttatgggaatgatgaaacgttcattcacggtattcggagcgattatcgttatctgtatcatttcattctttatccgtggtttggcgcagagtattgactttaccggtggacgtaacttcgtagttcagtttgaacagcaggttgaacctgaaacagtgcgtgacctgttgaagaagaaaatcacagaagataatgtacaggctattgctttgggtacagacaagaagacaatccgtattacaaccaattaccgtattaatgaagattctcctactatcgactctgaaattgaagagttcttgtatcagtctttgaaagatggtaacttgctgggcgaaggtactacattggaaatctttattgaccgtgataatcgtgtcggtggttctatcatcagttctcagaaagtaggtcctagtatcgctgatgatatcaagacttcggctgtctggtctgtattgtttgcattggtggctatcggtttgtatatcttgctgcgtttccgcaatgtagcttatagtgtgggtgcgactgttgcattggctgtcgatactattttgatcatcggtgcatactcgttatgttatggatgggttccgttctcattggaaattgaccagacttttattggcgctattttgaccgctatcggttattctatcaatgacaaggtggttatctttgaccgtatccgtgagttcttcggtctgtatccgaaacgtaaccgtatgcagttgtttaatgattcattgaatactactttggctcgtaccatcaatacttcattaagtacattgatcgtattgttgtgtatcttcgtgctgggtggtgacagtatccgcagcttcgcctttgcaatgattttgggcgttgtgatcggtacattgtcttctatcttcattgctgctcctatcgcttacctgactatgggtaacaagatgccggaagaaacaaaggcataagaaggtttcttttaagaaataaataaaaagaggaggatgctcatatcatgagcatcctcctctttttataaggtcgattggaattggtttgtggaaaaagggtagatgaatcttctgtggcttcaaaaattaacttaagtatattgggtaagtaacttagcttacttggtatttcaacttaacttgcttgtcccatgaagttaacttgcttttttacgcagtatcttgcagatcaattctgtttggctataatcgtgaaaatagttatctgactactcttcctgaagtgtttccttgcattaactcttccacttcttctactgttacttgattgaaatcaccatatatggtatttttcaatgcagatgcggcaagggcgaattccaatgttttttggtcattgtcggggtaggtcagcaaaccataaatcatgccgcctacaaatgcatctcctgcacccacacggtctacttcatggacaatatcgtaaatgccggtatgccttaatgttcctttagaataaagtatggctgccagcagattgtgattggaagtgatggtattacgcaactccagaaacattttctggcatcggggagcttgttctgatactttttgaccgaatactttgaaaccggacaaatctaatggatatgaggtgtctacagctttaaaacctaccgggggaatgccgaaaatttctttgtattcgggttctgcaccaaaaatgacatcactatattgaacaagggggagcattacctctgatgcggatttaccgtaattccataattttttgcggaaatttaagtcgcatgagattgttaatcccaggcggtctgctgtttgcagtgcttccaggcaggcatctgctccttcctgtgacagggacgctgctatacccgaccagtggaaccagcctgcatcggaaagaatcttttcccagtctatcatgccgggacgtaaagtggcaaaggaagagccttcacggtcatatactacattggagttacgaaatgctgcaccgctttccagaaagtataatcccatgcgtttcccaccataaataatgccgtctgtacctaatccgtaagcttggagtgagtttacgcaggcttgtgccattgcattctcgggaagtctggtaacgaattctgtggggatgccgaagttgaccagtgatatggctacattcgcttcacttcctccataagtagcaataaactcgtttgtttgggaaaagcgctggaaattgggggcggtcagccttagcattacttctccgaatgtaacgactttcttgttctgggtaatagctcttgtattcatagtatgtttttaatcagtatgttaatttgcacgaagatacgatcaaaattttatataagtgcaagaaatgtataaaaatagccttctctattctatatggaacagatagaatagagaaggctattttatttattcaatattagtggtttatttattgaatcgtatttttagtttggcaagcatatcctgtgtcatgctgtctagatcatattccggtttccatccccattcctcacgggcacaagtgtcgtccagtgagttcggccatgattcggcgatagcttgacgtagcggatctactttgtactccatatggaagtcgggcatatacttctttatattgttataaataatttccggatcaaaactcattgaagcaatgttgaacgaattgcgatgaattagtttgtcgggattcgcttccatgatttcaatggctgcacgtaaaccgtcaggcatatacatcatatccatgaatgtaccggctgcaataggacattcaaatttttcaccttttacagccgaataatagatgtctacagcataatcagtggtcccgccacccggaggtgtgacatacgaaattaatccggggaaacgaacggagcgggtatctacgccaaaacggatatggtaataatcgctcagtaattctcctgatacttttgtaacgccatacatggtacgcggattacggatagtgtcttgcggggtcttgtctttaggggtgttgttgccgaagacaccgatagaacttggggtaaatacggcgcaacccatttcgcgtgctacttccaatacgttgaacaggcctcccatgcctattttccatgctagttgaggtttggcttctgctacagccgatagtaaggctgccaggttgtaaatggtgtcgatgttgtactttgatacagtttcggcaatttgttgttcgttggtgatatctacgatggcagaagggcctgattcttttaattcccctttaggctcagcaccgggaatatatccggctacgatattaccattgtaaatacttctcaatttcatggttagttccgaaccgatctgaccggtggagccgataattaatacatttttcatagtttgctatttgctttaagttttcttttggaagcaaagatagatagaaaactgcatattttatcaaaattttctctataatttaatcggatatcaaaaaaaaataagaactttgtcaagtcagactgatttttaaacttaaactatatacttaataaaaaaacaaagctatgtatggtaaaatgaaggagttccttgcgaaggaactggctgatattaaggcagccggattgtataaaaatgaacgtataattaccacacctcagcgtgcggacatcaaggtgaatgacggagaagatgtgttgaacttttgtgccaacaattatttaggtttgtcagataatcaacgcttgatcaatgctgccaaagaggcgatggacacacatggcttcggtatgtcttccgtacgctttatctgtggaactcaggatttgcacaaacagctggaagctgccatttctgattattttaaaacagaagatactatactttatgcagcttgttttgatgctaacggtggtttgttcgaaccgctgtttacagaagaagatgctattatttcagatgcgttgaatcatgcatctattatagatggtgtacgcttgtgtaaggcaaaacgctatcgttatgccaatgctgatatggctgacttggaacgttgtttgcaggaagcgcaggcacagcgtcatcgtattattgctacagatggtgtattctcgatggatggtaatgtggctccattggataagatttgtgaactggcggaaaaatatgacgcgttggtaatggtggatgaatctcattcggccggtgtggtaggtcctacagggcatggcgtggccgaacagtttaatgcatacgggcgtgtggatatctttactggtacattaggtaaagcatttggtggggcaatgggaggatttaccaccggtaagaaagaaattattgatatgttgcgccagcgttcccgtccttatttattctctaattctgtagctcctgccattatcggtgctagtctggaaatgtttaagatattgaaagaaagtgatgctttgcatactaagctgatggataatgtgaattatttccgtgacaggatgctggctgccggttttgacatcaaaccaactcagagcgcgatttgtgctgtgatgctttatgatgcgaaactgtctcaggattttgccgccaagatgcagaaagagggcatatatgtaaccggtttctattatccggttgttccgaaaggacaggcacgtatccgtgtccagttgtctgccgggcatgaaaaggcacatttggataaggcaattgctgcatttattaaagtgggcaaagaacttggggtgattaaataatcagatttgaaagctatccagtaaaataagagcagtaaacggttgtataacaattgtttactgctctttgtagccccgaggggaatcgaacccctatctaaagtttaggaaacttctattcacacctgattatcaaacagttacagaaaatgtattccaattaagtattctgcacacctttgaatggcgcaaaagtaattattttgagtgttttgaacataaattcaatatcattttaacgtacgttgtatatgtaattttgacagtataataaatacattataagtctggcatgaagtttgcatgatgcttttttggaaagataaatatttttaattacaaaaattagtactatgaacgaaacattaagtaacggagtttctgaacaaaatcaggaacaaaagaaagtgaaaaacaatggagaatctaaagctttcaaagtaaaaggcaaacctaagtcatattatgttaagagagccttaggtgattattgtaaagcaatggctgaatttgaagttgtgagaaaacttggatatataaatgatgctcaatttaaaaagttacaagatggtgttgctgccaatatcaaagaaatgactgctgaactttatgattatttatccgagaaagaaaaagataagctaggttatagtgccgaggttgaggatatattagctaatctttaattgtttgtactgttattattgtaagagaagaacatttagatgacgccctatcttttggtagggcgttactattttatactctcgtttttttaccatctacaatcctttgaaaaccttatatatgaaaaagaataaacggtaataagcataaaaagtaagatatgataagcggtagcacagtataatgttatatactggcagctacagaaaacataatccttattttcagtagatatactccagttatatcagatcgggaaagtaagaattatgttttcgttattatccgtttttattctctacggcaggaaacagcagattgttttctgcctttttttattctcctttcaaagccttattaatgagaataataaaaccattaataaacaatttaataaaggaggaataatgaaaacaagaaaacttttagaagtaatgaaagtgatcggcttcatagtaaatgtaatagaactcatagagtatctggaacacttttggagaagccacagaaagcccaaaacagtaaagggatttaatcaggagtgcaaaccatgactaagtatgaacgtggtgaagctattctgataatagtgcttgaatcagttttagttattgccaaaaattggaagaaactaagatcggttttgagtaagaaagtaaagaaaataaaaacagattaaaaatggaaacagtaaatttaataatgccatctacaaacatggtggctttagacaataattggaagaatgaagcggaggaagcaattcttatatcggaaaagcaggaaaaacagcaacctaaacgatctccatttattgaagccaatacaaatgaggtaacattggaacacctcaaaaatgattgtatcatacctacattttctaaggataatgaggtatgtatatcacatcaatgtttcatagaaagtatctatgaggcagttcgggatttttataagggagaaaagatagaagatcccgtaataagagttagccacattgtaaaaggtagaatcccagaagctataaacaaaaaagtagatcagcttctcgaatcggacaagacaatgtactacgaaagaatgattttcaatattgaagtaccgagtgtatttcaagatatgaatggaaatcgtttgaacctatccatttcaggcagcaaaagctatggaagggataacttatcaggcaaaaagacaatgcagaaattcagtcttgcagttggctttttgaatcttgtatgtactaaccaatgtatttttacagacggttacaaagatgaagttaaagcaagtagcgatgcagatttatatctggcagcacttgatttattcaatcagtacaatatagccaaacatattcatctgatgcagtctttaagcgatacaatgctaagtgaacatcaattctgccagattctgggaagaatgcgattatataattacttgtcacagaaccaacagaaaagactaccacaacttttaattacagacagccaaataaacaatgtagccaaatcctacattcacgataagaattttgctggaagtaacggagaaataagtatgtggaagttctataacctgataactggtgcgaacaagaacagttatatagattcattcctgaatcgcagcgttaatgcgacaactgtaagtaaaggactgacagaagcattaaagcatgaagatgaatcctatagttggtttatcgaataaccaacttgatatgtaaggtaacaatttctaggaggaactacaaaacaaaggtagtttctcctttttgtgttcaatcagggagtgtgttcaaataaatctgtggaaaggttttgaatacacttcttcatgttatcattttattcaaagattattatggaaacaaaagctgtaatatatgcacgtgtctcgtctgaaagtgatcggcaagacacatcaagacaaatagaagatctgaaaagatatgcaaaccaacaaaatatggaaatcgtgaacatatacgaggaacatatttcaggagcaaagaaaaatgaggaaagagtagttctcacagaatgcttggagtattgtagaaacaattctgtagagtacctgcttttatctgaacttagtagattgggaagatctactttgcaagttctgaaatcattggaaatactacatgaatcaaatgtatctgtgtatatccagaacttgggactttatactttgcagaaagacggaaaagtaaatcctatcgtttctattttgataaccatccttgctgaaatgtctaatatcgaaagaagcaatatagaatatcgtctgaatagcggaaggaaaaactatattatgaatggaggcaaattaggaaggaagaaaggtagtatcaagacagaagagaaaatgaaggatgaatataaggaaactattatcctattaaaaaaaggatatagtatcaggaatatagccaaacttcaagggataggtatttcaacagttcaaagaatcaaaaatcaatttataaacaataaagagtaatggaaacaaactacattatcatcttggactactcgattggagaagtaatcaagataaaactggataggcaacaaatagaagaatcggagcgatacgatgattttgaaagttacttatcaacacttgaagataagtataatttcaggttgaaggattgcttatggatgtgtactgaaacatataatgaaagatgtttcgggttctaggactggataagggaaagtcagacttactttctcttattttttatactcctacataaaatgatatttttgaagtctatctgtcctagaacagtctaaaagccttatctttgaagaaataatacccatataagagcgttacattaaacaaaaaactttatctttgcagtgttcggctggagaaatggctgaacttaacatagaaagcgttttttgctttatcctgaaaacgaaatcgccaatttcaaaagtagaaggatagagaaatgtaacgctcattctgttttgtatatgtaattaggtatagcccatactgtatctgattttacatatcattacggcatgggtatttgtttcttcatattcatttctactgggtgtttggcgatacccgttttcggtgaatagcagaacaagttccatgcctttcttgcatagttaaatctgctgactttgggaacttataggcgtataaggagaatataactatgaaccaaaaaacactatctcaattgaaacaagatttattgaatccattaactgatttacaagaagttttattagtcttttatatctcacccaatcaacagttatggcatactttagcttatgaggcttgttctaatatttattttattaaacgaactccaactatagaaaaattattcaacaaactatttgtttgggatattaatgcaaatttcatatcatccataataatgaaaatcacgatctatgcagatggaagtgattttaattatcaatttattactccaatgtatttgacacccaattatccttgtggaaattccgttcaagagtttattgatttatttatagacaaaatagacggaaagattgtcaaattgtagataaaatataattcataaaagctaagtaacatgaaaacaaagtattttctttttataggaatgataatttcattccttttatctgcttgtggtaatactagtgctaataatagtagtgaagttacacattttacatatcaagaagcagaaaatggtaaatggggaattatgagtgtagaaggggaagtagtggtacaaccaacatttcaaggtatgccaactaccgtaactgacgatatgttttttgtacctagacaagatggcacttatgaattgcataacataaatgaaccagagaaaatcataaatgcgaattatacaaatatttcaagtttctcagaaggtaaagcatttgtaactcgaaagggagaaaatatatcttgcattgataaaaagggaaacgtactatttactttatcgcaaagtttcattggagcaagtacattttcaaatggatattcaatagtttatgcaaaggatgaacttggatatttagaatgcggatatatagattcaaagggaacattaatagttccttgtcaatatgaatatgcctcttattttagaaatgaacgagcttttgttctgtctgaaaatagtcaatttcttttaatagacaaaaagggaactaagcttaccagtattaattctgataactctagagaaacaattctttgtattcggcttaatggagaaatctgggctgccatagaagatgatattatcccttatgtagctaatggagcatttggtttaaaaaatacaaacggtcaaattatcatggaagcaaccccaaaatatgaagttattactcgttcttggaatggatatcgtatttataaaaccgcaaatggttatggtattatggacaatttaggaaaagaactgattaaggataaatattcctttataggaacatgcaatactaataatagtaaaacatttgttgcatgtatagataataaatggggaatactttcaatggatgaaaaacaattatgtcctttcagttatgaacatattattggttttccacaaagttctcattttattgctataaaagatggacgtacattattgattactaaaactggagaagttaaaagacaattctatagaataaacacaaataataagggagatataatgatagaaaataatatgtgatatgataatatttatttctataataacaggaattatcatattttatcaggtgataattccttccatacacaatcaatattacttaaagactgataaaaaaacaactaaaggtctattatctatgtccttttggcagattctttttggtagtctggtatgtgtttatgccttacaagtcgaaccagtatataagcaaacggatgaagatgtaagttctttcgttcaagaatattcagtagttggtgatttagtaaatgaatatactggcatcaatactacttccaatttcaactatttaatgagtgaagcggacagtttgcatacattcgctattatcttcatcataataactgttgtcttttcttcggcaactgtaattggtagcattgggagaaaacttgatagacggattgttgagggattagctatattaaatacattggcttgttgttggattgctaaatcaagtaccgacctatatgaaatgataatacgtgatggagtaaccttacaaacggtagcatggataggaagattattaggtacagacatttattctacaatggatttgataatacgaagtgtttggatattgccattaatactgattataaaacatttctattatcataaaacattgaatgaatattatgcttcatagaaatttagtagttaattgatgctttagagcaattgctacaaaacatcgaaaggatctaataaataattaagcgcactaggacaacaaatcttagtgcgttattttttgtccttatctgaaaatgacaaaacgcgctcccctagacgtgaaactctaactaatgacaaaacatttaaaacctactgttatgtgggataattttattagaacatttttcagtggttctttagaagaaccgctggaacgtcaggttagagatcatgaagtttgtcctgatgtaatcgaaaaaacaaatgaaagtagatatgaatccgatatagaagcattaaagcagaaattcggtgattcattctcaactggtctctctattgaaatcgacttgaaggagattttgaagatttgtcctcgtgaaagaagaagaagcgattcttatattggactaatcggtttcttacaaaagaagtatggaataattttaaaagtagtatcacagaaaagcaaaagtagtaattatggattttaaatttatagccttcaacatgatgttatgtactaggtggggcaaaaatgaaattgaagaaatgatccaaggcaaattggacgagaaaacaaatggaataataaagatagaatataatcaacttgcagaaaacaagattcgattagtattctggcgtgattcattagatgcaactgacaaagatttgattatagatactgattgttatattgtttcaggtatttcagtatcagctttcagacttggagaggaagaacagccattgatttatcctttgataaagatagggaaatatcattattatacacataaaagtgcatttataaggttttaccgtaccttgttggaattgttaggggaacaaaaaacggaagaaataaagatacgtatctatagtgatagaattgtacttgaaataacttattagtagtatggcaaaaagaataaataacggtaataacagactatcgaaaaagatagttctagtatcgaagatctacgatactggaatacaaactgatgatgaaatagccagacttgtacaaacagacctagacaactatataggtctagacaaggtgatattcggaataactacgactgacaagactataacagccgttttccagagatatacagattattccaaagatgatctggctgatggacttatgaaagatgcagacgcttttatgattactggagaaggctacaataattttcatctacccaatccatttccaatagttccatttagctattcatgtttaatggagcagaaagagtttaaggcagcatataagtcaagtgccgttctgctaggtgcgaataaggtaaactggatgaaacttgaaataaagccttattgtgtggttatgaggttaaaataaagtttggctggggatatttgcaaaccaatgaaatgcgtatctcaaagccttattccctaattgatgtataagtgttttttagttctcaatatgacttggaaaggatgatagatcggtagaggtttatcgtcctttcttcatataaagcagatctgttgaggtggctgaaagaacttataccattgaactaatactaaaaaacatatcaagatgaacgaaacacttattaaaagaaaatctgaactcatggaacagataaggaatgagtttaagatattacaagcattgcagcctgattttgacaatgcttttttcgatgatgaatccatgctttcttatatgcacttcttggctgataagtataaatggttgattgttgatgatgaaccagaggaaggaggcggcaaatgaatactatcaatgtaattcctagtagtggaaatggttttactatgaaccttagaaatggttctattaaagttgatgacaagactgggatgtatgttatatcaactggatgcggctctggcaaaacgacatccataaaacaactaatcaaacttaaagccgacaaaggtataatgtattgtgtagatacaatagccgaagccgataagatgtatcattggattatagaaaacaatattctgccagattcggatgtgcttcttattcatggtgagattgaagccagagaaaacatgaaagtatattgtgaaactccagaactgataatgaacaagaaagtaatcatattaacccacgtcaggttttggactgatcttattgattattttctgatttataagccaacttcaaaagtacctgcatttgatggggattttgcaaaactgatggctagggaagatttaagagcctacgttatcttcgatgaaactcccatgttctacaagccttttgtcagtatatccagaacagtattgggatgtttctctgaaaaagtatctggcgaatggagatgcaagggaaaagccgatctggaagaatcatacaaagagttcattgctgatggggaagatgatttttgtaatacaacccataaactcggaaggattaaaagagatgtggttctagaatgtattcctagatattgggaaggttggaaacaatctggagaacaaaagatgaatatatctttctatcctaagaatctttggcaatcaactataaatacccacatacttatctatgaaggtgctggagatattttactacatgattccagttgcttcactctgctggatataccttataaatataatgccaaagtgaatttccatgagataacagcaccacaagaaagaagaaatgaatttgatctggttaaattcaatgaaacaatcaataatataatcggaatattgaaaactagacttcaaagcaagatattgattgtagtctggaaagatattggaaaacgtatcgaggatgaaccaagcggagaatctgactgggcaaacaagatagatgaagaactaagatcaaaaggttatgtaccagatatggactattcaattacctactttggatcgagcaaaaccaaaagtacaaatgaatttagaagctatacgggaattattttgcttggcgattggaatataccttattctttcgccagttctgtaagagaagcatttttaagcgagacaacacttgaagattatagaatgtggtattatacccaattattatccagaatcgggattagaaactttgacggtggagaatatgatatttggtacagtagcgattataagcctgaatttattaattgtatctctacctatctgaatgataatatctataatccaatcgaaagagccaaacatgaatccgattggctggctgaaaaggctgaaacttttagaatcaggaaagagatcgttgcagatatacaaaagctagcagaatatgatacctccctgaaagattatataatggctgacagaagagatacatttaccatatcattggatcaactctatattatctgtcctaaatcggagaagaagaaaagtaagtatgataacttgaaaaacaacctgaaaaaactggatataacattgataatatcctaactttttttcgggagcttttttgtaatccgattaacctatatagagtggtaaaaaaactcccaaacttgtagtaatacctatttatatacttttagcgaagtaagaggttctttgagagaaggttctagcatccttgcctccccttcagggaggtggcgaagccagatgcgtagatggttcttctcgaaaaggttctctgtaataaaagtaaattaaatactataatattagttgaatggatagtatattgaaagtataatttgaatataggtaatacggattttttcaaattaacctgaatatagatatacatcaatccagatcttaatctgcaatatggttttctattcaatctaggggaaatggtaatatatattcaaatttaccatgaaccttaaaaagaaccgaccttcgcccccatttgagagggggcgaggtctttcagtaccttcattctttttaagaaccactcctaggataaaataatagtttctgggggtattattcaagatccctatcacgtagcgaagcggagtgatacattaattataatattgtttcggttggctagattttaagtcctatttttattttgatagaaattgaaatatccttttattgtatgaatatctggtaaaactatacctaattctaattcttgtatgctattttgaaatagttgcaataatgtataatcctgtcgccaaataataatagccaaaactacattaacaatctttgcaaccttatcctttaattctaagttacctttatacttttctttatcaatttcatctattctacttatatcttttaatattttaattgcatcttccgtctcttgtaaattatatatttctatttttttattttccaattctgataatttcagtaataaattaccagcaaatatataattaaatggatctttatcactattatctttttgatttattacactatttctaaatagctccttattcatatcttcatctacatagcgcaagatcttttcaggattattttttaaagtctcattgaataatttataatctttgggacttacaatttttgcataatgctctaccatatcaattgtatcatgtcctgaataagtctgtatttttctattatcccagtttcttaactttaataaagttataaatgtccttcttccagtatgtgatttaacacattcatatctttctttattatcggtttttactgttgtattttcaccgctatgccttgttactagttgttttcctttaataccagctgcttttgctatcttttttagtagtttattaaaataatctaccgttactttttgaggttttctatctttatattcagccagtatttcattagctagttcaaatataatatcaaattctattttttttgctgtctttttttgaaccatctgcactgattttatatcgctttgtatttctatacctggaaacaactcatctatatcaccatatcgttgcccagttaagcactccaacaagaataaagctaatgtatctttatacttggtatcttctaacttatgccaatagttccataataataacacctcatcatctcttagtgctatctcatctatattttttgttgccttatcctttatagtccatgttttataattccagtcattcaatacttgcaatttcatcacatcattttcgactgcaaatttattaagcatcgtagccaactgggatatttgtttattaatataattcagtgataattttccgtctgttgttggagcatcgtctatttttcttaaaaactcataaaaccctttgatgtattttttatcaatctcatcaaaggatgttacttcatgtccttctttcatatatctatccaaatttttaataccatttgaatagtctttcttggtcttatcagatgcaccagtatattcttctaattttttgtttaagaaagctatacaatccatattccttttttgtttattcctatatatatattgcttcaataagatctcactgtttattatctcattgggatgttcgcaaagataagttttaaaatcagagaaacaatcctttaaaattgcaattttcgtatttacgatagaattatttgtattatctagctcattaaggctgacactaatataagcttcttgtttttttatatcccaatgtttaggatatactttcacaccagttgcaaaacgatactttctaccgttcattactacaacataatatataagagaaggtttttctaatttaggagttctaaggtaaaaattaccttgtagttcattgataaaggtttgctgcataccgtttgatattatattaagttaataataccgataacgtattccattttggtattccaatgtggtattccattatcgtattcaaatggtatgtttttgtacctcggaggggaatcgaacccctatctaatgtttaggaaacatctattctatccgttgaactaccaaggcaaatattaagaacgcgcggtcagcccgttaggaaacttctattctatccgttgaactacaaggcccctttatgggtacaaaggtacttctttttgttaaaatggcaatatgaaagattgaaaaatgtcttaagtgggaagaaaataatcctttctttgttgttttgttgttttttgtctgttttttataatctaataatgttgttattctgctataaactttcatgttgttcataaaacatggataaaaataataaattgtaaaaatgaatcgtttttgatactgtcataatgataggaatttatgcttttaaacaggtaattatctctgctttttcttagcttggaaataaataaacctttaattttgtacattttgatattcaaacgtagtttgatagcggaatattttgtcctttgacagaactttccgaactttgcaaacagtgaaattttgtaaccctaaataataagttatggcagatgaaatgatagtcaaggagttggaccaagtggtggtccgtttctcaggcgactcaggcgatggtatgcagctggccggaaatatcttttctaatatttcggctacagtgggaaatgatatcagtacattccccgattacccggcggatatacgtgccccgcaaggttcgttgaccggtgtgtcaggtttccaggtgcatatcggtgcgggtaaagtttttacccctggtgacaaatgcgacgtgctggtcgcaatgaatgccgctgcattgaaaacacaatacaaatttgcgaagtccacagcttgtatcattattgatacagattgttttcagaaatcagatctggacaaggcggctttcaaaacagacaatccgattgaagaaatgggtattaagcaggatgtaattgctgctcctatttcgcagatggtgaaagattgtctggcagatacaggcatggacaacaagtcaatgttgaaatgtcgtaatatgtttgctttgggattggtctgctggttgtttaatcgtgacctggcggttgctgaaaatttcttgcgcgagaaatttgcaaagaagccgcaaatagctgaagcgaatattaaagtgatacacgccggatatgattatggtcacaatacgcatgcgtctgtggatcatacttataaggtggaaactaagtctaaagtacctggaaagtacatggatatcagcggaaacaaggctacggcttatggcttaattgctgctgccgagaaagcaggtctgcgtttgttcctgggatcttatcccattactccggcaacagatatcttgcatgaactttctaaacataaatcattgggagtgactacggttcaatgtgaagatgaaatttcaggttgcgctacggctatcggtgcctcgtttgcaggtgcgttggcagctacttctacttcgggaccgggtgtttgtctgaaatcagaggctatgaatctggctgttattacagaattaccattggtggttattaatgtacagcgcggcggtccttctactggtttgcctactaagtctgagcaaacagatttattgcaggctttgtttggccgtaacggtgaatctcctatgccggtcattgccgcagcttctccaactcattgttttgatgctgcttatgatgcttgtaagattgctttggaacacatgaccccggtggtgttgctgactgatggttttgtagcaaatggttccggtgcatggaagttgcctgatctggcgaactatccggctattaacccaccctatgttactccggaaatgaaggataattatactccttacaagcgtaacgccgaaacaggtgtccgttattgggcattgccgggacaggaaggttatatgcatattttgggaggcttggaaaaagacagtgatacaggtactatttctaccgagcctgaaaaccataatttgatgtgccgtttgcgtgccgagaaggttgctaaaattccagtgcctgatgttaaggtgcaaggctgcgtagaggatgcagatttgctgatagtaggtttcggtggaacttacggtcatttatattcagcaatggaggaaatgaaccatgcgggcaagaaggttgctttggcacattttgttcatttgaacccgctgcctcacaatacggcagaagtgctgaagaaatataagaaggtagtcgtggctgagcagaatcttggtcagtttgccggatatctccgtatgaaagtggacggatttgttccttatcagtttaatgaggtaaaaggccagccgttcgtagtcagcgagttagttgatgctttcactgagattttaaataaataataaccgtaaagaaagtaaagactatgaacgaatatacagcaaaagatttcaaaaagggacaacctcgctggtgtccgggttgcggtgaccattttttcttggcttcgctgcacaaagcgatggctgaattgggagtggctcctcatgatactgccgttatttcgggtatcggatgttccagccgtctgccttattacatgaatacatatgccatgcagactgtgcacggtcgtgcggctgctatttctacaggctgcaaggtggctaatccgaagattactgtctggcagatttcaggggatggtgatgggctggctattggtggaaatcattttatacacgccgttcgtcgtaatatcgacttgaatatgattttgttgaacaaccgtatatatggtttgaccaaaggacagtattctccgacctctccccgtggatttgttagcaaatcatctccttacggcactgtggaagatccgtttcatccggctgaattatgttttggtgcgcgtgggcgtttctttgcccgtgcggtagctacggatggtcctggtacagtggagattctgaaagctgctgccaatcataaaggtgcggctgtatgtgaaattcttcagaactgcgtcatttttaatgatggaacacacgagtcagtatatacgaaagaaggtcgttcaaagaatgccatttatttggaacacggtaaaccgatgttgtttggggtagataaagaatacgggctgatgcaagaaggtttcgggctgaaagtggtaaagcttggcgagaatggtgtgacggaaaaagacattttagtgcacgatgctcattgtatggataatactttgcagttgaaactggcattgatggaaggaccggattttccggttgcgttaggggtgatccgtgatgtggaagcgcctacttatgatgacgccgttaatgcacagattgaagaagtggccgcaaagaaaaaatatcataatttccaggaattactgatgacaaatgatatttgggaagtgaaataatattttcattttccctgtaggaaccggatctacagagttgttctaaaaattaaatggttagtaataggcagtgaataattgccggttactaaccatttaatttagaattttagtgtgtaagagaacacacctgaaactgtccttatagtttgagctttagagtttctcgccgaatgataaatcaccggcatcccctaaccccggaacaatgtatttgtgctcgtctaagacagggtctatggcggcacaccataatgtgacatcatcgccgggaaaaagttctgccatatgcgctaccccttgttggctggcaatgacacaggccatctgcaatttagctggtttgcctttggtaaggaacgctttccaggcaagttccatgctttcaccggtggcaagcatgggatcaacgagaagcaaggttctgtcattcaatgaaggagcggcgatgtattcaatgtgtacatctacaatacggtgttcatcatctttgtaaaaacggaatgcggaaacgaaagcgttgtcggcatggtcgaacatgttcagaaaaccggtgtgcagcggcagtccggcacggaataccgttgcgatcactattttgtcatcgtgtgtgctggccgtggcagttcccaagggtgtctgtacttgctttacggaataggttagtgctttactcatctcgtatgccatgatttctcctattctttcaatatttctgcggaaacgcatacgatcattttgaacatgtacatcgcgcaattccgctacatattggtttaggagagaattgccttcactgagattgatgattttcatatctatgcttttgttatattgttgactttgacctgcaaagaaacaaataatttctagatttgtaaagtacgaattgcatttttgttacacaaatataaatatttgattattacggaaatttttctctaataacttcttttttttaaaataaagcactaattttgtagcgccttagacaagggggtgttgaaaaacatcttctttcagaaaataaagagtaaaaataacattatacaataaccaaattaaatcatttaaaaatggcaaatttagatttaagcaagtacggtattaccgacgtgaaggaagttctccacaatccttcttatgatgtgcttttcgctgaagaaactaaaccgggattggaaggtttcgaaaaaggacaggttactgaactgggtgctgtaaacgtaatgactggtgtttacacaggtcgttctcctaaagataaattcttcgttaagaatgaagcttctgaaaattcagtatggtggacttctgacgaatataaaaacgataacaaaccttgtactgaagaagcttgggctgacttgaagtctaaagctgtaaaacaattgagcggcaagcgtttgttcgttgttgatacattctgcggtgctaatgctgcaactcgtatgaaagtacgtttcatcatggaagtggcttggcaggctcatttcgtaactaacatgttcatccgcccgactgctgaagaactggaagcttacggagaacctgattttgtatgtttcaatgcatctaaagcaaaagttgacaactataaagaactgggcttgaactctgaaacagctactgttttcaacttgaagactaaagaacaagttatcctgaacacttggtacggtggtgaaatgaagaaaggtatgttctctatcatgaactacatgaacccgcttcgtggtatcgcttccatgcactgctctgctaatacaaatatggaaggaactagttcggctatcttcttcggtttgtctggtacaggtaagactactttgtctactgacccgaaacgtaagttgatcggtgacgacgaacacggatgggatgacgaaggtgtattcaactacgaaggtggttgctatgctaaagttatcaacttggataaggaaagtgaacccgatatctacgctgctatcaaacgtgacgctttgctggaaaacgtaacagttgatgctaacggtaagattgatttcgctgataagagcgtaacagaaaacactcgtgtttcttatcctatctatcatattgaaaacatcgttaaacctatctctaaaggtcctcacgctcaacaagttattttcttgtcagctgatgcattcggtgtattgcctccggtatctatcttgaaccctgaacaagctcagtattacttcttgtctggatttacagctaaattggctggtacagaacgtggtattactgaaccgactccgacattctctgcttgcttcggtgctgctttcttgtcattgcatcctactaagtatgctgaagaattggttaagaagatggaaaagactggtgctaaagcatatttggttaacactggttggaacggtactggtaaacgtatctctatccgcgatactcgtggtatcatcgatgctattttggatggctctattgataaggctcctactaaggttattccttacttcgatttcgttgttcctacagaattgccgggtgttgatccgaagatccttgatcctcgtgacacttacgctgacgctgctcagtgggatgaaaaagcaaaagacttggctggtcgtttcatcaagaacttcgctaagttcactggtaacgaagcaggtaagaaattggttgctgccggtccgaaattgtaatctgaattttacagatttaacatataaaaagtggttcccgataggaaccacttttttttatgcttgaaaatgcctagatttgttgcaaaccaaatatgatagcaaatgaaattatttagattaatgttagttggtgcaggtatgttcgtattatgcagctgtacatcgcaaggttctcaacagaaggaagttgttacggatagtgtttccgtgagtcaggtagaccctgtaatagaaactattatgagccgccgtagtatacggaagtataagcccgaggctgtggaacgtgaaaaaatgcagactatagtggaatgtggaatcaatgcacctaatggaatgaataaacagtcatgggaggttcgtgtagtagataatccggaatttatcaatggtttgactgaaattttcaaaaaagaaaatcccaaagcggcagaacgtccgggatttcagaatatgttcaataatgctcctacagtagtgtttattgctaacgatcctgcatatgatatgtcacagatagattgtggtctgttgggtgagaatatgattttgtctgcttggtcaatgggaataggttcctgctgtttgggagggcctgtgcgtttcatgaaatcacctgcagctgccgaatatatgaaacagttgggattcagtgaagggtatgagttgctttatgcgattgctttcggttatcccgatgaaatgccggctgctaaacctagagaagttagtaaagtaaagtttgtagattaaatataaaaaatcccgaaggtaatatggtctccgggattttttatattaaaggtagattgattagcttttgttagctctcttacgttctgtttcgtcaagaatcactttacgcatacgcatactctttggagtaacttctacatattcatcttccttaatgtattccaatgcttcttccaacgaaaatactaccggaggaatgatgcgtgccttgtcatcagaacctgatgcgcgcatattggtaagcttcttcgatttagttacattgataaccaagtcgttttcatgaacatgttcacctactacttggccggcatatacttcgtcttgcggataaatgaaaaatttgccacgatcctgtaatttgtcaatagcgtatgcaaaagctgttccgctttccatagcaatcatagaaccgttgctgcgacgttctatctcgcccttgtatggttggtagcatttaaaacggtgagccatgatcgcttctccggccgatgctgtcagtacattggtacgaagaccgataataccgcgcgaaggcatatcaaactcaatgtttacacggtcaccctgtgtttccatagaaactaaatcacctttacggcgggttaccatatcgatcattttactggaatattcttcgggtacgctgatcgttaattcttcgataggttcgcattttactccgtctatttctttgaagataacctgaggctggcccacttgtaattcgtatccttcgcggcgcatggtttcaatcaggacagaaagatgaagcacaccacgtcctgaaacaatccatttaccgtcctccagttcgcttttgcgtacacgcaatgccaggttcttatccaattctttggtcaagcggtcttggatgtggcgtgaagtcacaaacttaccttctttgccgaagaaaggagaatcgttgatagtgaataacatactcatggtcggttcgtcaatggcgatggggggcaatggttccggattttcgaaatcgcagatagtatcaccaatttcgaagccttctacacctactacagcacagatgtctcccgatgaaacggcatttgtctttttacgtcctaagccttcaaaagtatgtagctctttgattttagactttatcagactaccatcacgctttgctagtgtaatattcataccttctttcagcgtaccacgatgtacacgtcctacagcaatacgacctgtatatgctgaatagtctaaagaggtgattaacatttgaggagttccctccaactgcttcggtgccggaatatgctcaataatagcgtccaacaacggaaccaggttttctgtcggggtcttccaatcagtactcatccaattatttttggcagaaccatagataacggggaaatccaactgatcttctgtagcattcaggctgaacatcaagtcgaataccatttcgtatacttcttccggacggcagttgggtttatccaccttgttcactacaactacaggtttcaatccgatctgtaatgccttttgcaatacgaagcgtgtctgcggcatcgggccttcgaatgcgtctaccaataagatacatccatcagccatattgagtacacgttctacttcgccaccgaagtcggcgtgtcccggagtatcaataatattgatttttgttcctttgtagttaattgaaacgttctttgaaaggatagttatccctctttcgcgttccaagtcattattatccaataccagttcaccatttgtctggtcgttgcggaacaaatgtcccgccagcatcatcttgtccaccaaagtcgtttttccgtggtctacgtgggcgatgatcgcaatgtttctaatgtcttgcatactatacctatatatttggctgcaaaggtacgatttttattctaaaaaatatttggctgttaacgattattttttatcttccgtatcttctttacttttaaatgtagagggagtggtgccatagaaatcgacaaaatgctttctgaaggtggagatgtcattataaccaaccatctcatgacaggtatcatgacatccgttattacaagatccggtattaagtataaaggagaatgttatgagcagcctgttagaaatcatggataaaaaatcatgcggtaaatggtatgcctatgaacagtctgctttttatttgagccggatgatgcttgagctttctttagaccgttatgtgatggaaaatgctttgtggctggcaagggcggaaattgatgtaaaccggatttcttgggataaagttatcagtcatagccaatccgaatatgtattgcactataggttccatgagtggctggttgaaataaaatagcgatagtttaaaaagggtccagtccgaaattcgtgaagaaatggtttcggactgggcacttttattcatcggatggagagaaatcgggtttacaatttcattcaatgtcagttgggcagcctttgctataatgttcgaagatatgctgaaagatgcgacagtaaaagagatagaagattatttttaaaataaatcgctctaattcattgtgatataaaagataatgtctatctttgcacctgctaaatgaaaattttatatatcaaaaaatctaagaattatgtatttagatgcagctaaaaaacaagaaatctttgaaaagtacggaaagtctaacactgatactggctcagctgaagcgcagatagctttgttttcataccgtatttctcacctgactgagcacctgaagctcaacagaaaagattatagcactgaaagagctttgacaactttggtaggtaaacgccgtgcgttgttgaactacctgaagaaccgtgatatcgaaagatatcgtgctattgttaaagcactaggattacgtaagtaattcaatctctattgaaaaggacttaaagaaaagccgctctctgaaaagaaagcggcttttctattttctgttattacgtttctactgttctgttgttgagaattactctttagtaggataatacagattatcttttgtcatgtgttccaatacttcatgcagatatttggccgactcccatttggccataggcaggtcatgaagcaagtagttaccgcaatctttaggggcggctcccggaacttcgccttcaaaatcggctacaaagcggaacgtttcctgcatcagttctataatatcttccgattttaaatcgcctttcattaacaggtagttaccggtgaggcatcccatcggtccccagtagacaattttgtcagaccatatagggtggttacgcaggtaggtagcggctagatgctctatggtatgcaaggctccttgccccaaagcaggttcccggttgggttctttcatgcggatgtcaaaggttgtgaccgtttcaccgcccacttcgtcttttctggatacatagataccgcgaagcaagcggatatggtcaatggtaaaactgggtattgtcttcatattattcgtttttataaattagctggtaatgaggaaaggaaggtatgagtgacctcgaaggaacggtcggctatagtctcccaaaaatttgtgtattgttcccaatggttgtcggatcccggcgtatcgctgatgatacggaaactgatgaacggtaccttatatatataacagatttgggcgatggctcccgattccatatctactgccagcccttcgtggaacttttctttaatgtcgttcagttcggaacggtcggtgatgaatttgtctccgctgcatatcagacctccatgaatggcggtcggagtatccagtgacatggcgcaatcaaacaatgtggcattaccttcgaatcgggcgggaagtccttgtatctgtccgtacatattgccttctccacaccatacatcatgatatacaatttgtcggctcaccacaacatccattattttcaggcagctgtctatgcctcctgctacaccggtgctgatgacacagtcgggttggaaggtacggatcagttctacagtaccggcagcagcgttcactttacctattccgcatttcatcaggataatggtattatttctaatgctgccttcagtatattggaaaggaccttcggtgtattctttcttgttttcgagcagttgcgctacttgtttctgctcggaactcatggctgttataattcctattttcataattcaactttatttatggctgcaaatgtacgcattttatcagagtatatcgtatctttgcaacgttaataaacagatatacttatgaacttatttaaaagaatactacctgatatagtagtgattatcctttttgctgtcatctcattcgtctatttttttccggcagtgacagaagggcgtatcctttcacaacatgactctgtggcgggcattggtgccggtgaagaagcgaaagaatatctggaacgtacgggagagcgtacgcgctggactaattctatttttggtggtatgcctacttatcagatggcacccagttatgattctacggataccctgaagggagtggagaagttatatcatttgtatctcccgaattatgtgtggtatgtatttgtcatgctgttgggcttttatatattattgcgtgcattcgatttctcggtctggctggcttcattgggggctgtgttgtgggcgttttcttcttattttttcatcattatagctgccggacacatctggaaatttgtaaccttggcttatattccacccactatagccggtatggtattggcttatagagggaaatacctgtcaggtggtttgctgacagcggtttttgttgctttgcaaatagtgtcgaaccatgtgcagatgagttattattttctttttgtcatgctctttatggcggttgcgttcggagtggatgcttggcagaagaaggaaatgccgcgatttctgaaagcaactggtgtgttgttgatggccggtattttgggagtttgtataaatctatctaacttatatcatacgtatgagtatagtaaggaaacgatgcgtggaaagagtgagttggtgaaaccggatagtcataatcagacaaaaagtggtctggaacgagattatatcactcagtggagctacggtatcggtgagactttctctttgcttgtccctaatgtgaaaggtggtgcttccgtacctttggcagctaacgaaaaggcgatggaaaaggcgaatcctatgtataatagtatctatagccagataggtcagtattggggtgagcaacccggtacatccggtcctgtatacgtgggggcgtttgtgatgtttctgtttgttcttgggctgtttatagtgaaaggtcctatgaaatgggcgcttttgagtgctacagttttgtctgtcctgctgtcatggggaaagaattttatgggattcaccgatttctttttggattatatcccgatgtacgataaattccgtgcggtttcttctattttggtcattgctgagtttaccatacctttgttggctgtccttgctttaaaggaggtaatggcacgccctcagttggttaaggaacaggcccggtcgttttatatcagtctgggattgacaggtggcatcgctttattgtttgcattagctcccggtttctttttcccgtcgtatgtttcaagtatggaaatgcaggcattgcagggtattccggcagatcagctggctccgttacttgctaatctggaagaaatccgtcagagtatctttacttcggatgcatggcgcagtttctttgttattatgataggtacggcagttctttggttatatggcatgggcaaactaaaggcgaaggtgacgattctggcattggctgtcctctgtctggcagatatgtggagtgtgaacaaacgttatttgtatgatgaacaatttgtggagaaggtgcagcaggataattcctttaaaccgaccgaaacggataaggcaatattggccgataaaacgttggatttccgggtactgaacctagccggcaatacgtttaatgaaaatacgacttcttattggcataagagcatcggtggatatcatgccgccaagctgcgccgctatcaggaaatgatagaggagcatatcagcactgagatgaatggcgtgttcaaggctgtttcggaggcgggaggcgatatgcagaaggtggctccgtccggttttcctgtgttgaatatgctgaatacccgttactttatttttccgctgcaaggtggaaagactgtcccgatacagaatccttatacgctgggcaatgcttggtttgtaaacgaggtgcagtatgtggataatgccaatgaagagatagatgctttgcatcggatagatccggcaaaaacggctgtcgtagataaaaaattcagtgcggaggtaaaatcggcggctgaaacagatacactgggtacaatcaaactgactgcgtacgaacctaatgacttgaaatatgaggttaattcgaagacaggaggaacagtggttttttcggaaatttactatcctggttggcaggcatatattgatggtgtggaagcaccgcacggaagagcggattatattcttcgggcgatgaatgtgccggccggaaagcatgtagtggaatttaagttcgatccgaaatcgctgcatgttacggaaacggtggcttttgtggcgttgggtgtattgacctgtgtgctggtcttgttcttattcttgcaggtcagaagagcccgtaggaaaattgattaaggcccgtcgtaagccagactccggattatttgtaaagcaggcgcagaacgaaccataagtggtgtgtcactgtgcttgcccatccatagtgacggctcataatacggaagcgttctttcaaggaggctttatggttacgggtggtcattccttcattcaggtaatcaataagagtaagatgggtgttatggagtacatccgctttcttcatgatacggatacaccagtcaaaatctgccgagaaccgatatctcaggtcatatggttccaccagatcacggcgggcgaaaaaggcttgatggcagactagcattccttgcttgaagcttttccaggtaagcgttgcgggtgcggacaggcggcgcatatataaaaaatgcccttgactgtccacaatttctgtttctccatatagcactcccggcagggctgttccattgatggaatgtaccatttgcagcaaagtatcatcctcgtgcaggccgtcaccggcattcaagaaacaaagataatctccggttgccaattttattcctttgttcatggcatcgtataaaccttggtcgggttcactgataacagtggtgatatgttcctggtatttgtgaatgatatccagtgtttcatctgttgatcccccatctacaataatatactccagattcttataagtttgtgtaacaatactttgtatagtatcctccaatacttttgcggcgttgtaggtgacagtaataatagaaaacttgggatgaggatgatggttatgcatgattccctgtaatcttgttatagatttcaacatatttcttggcgatggtactttccgaatagctggatactgccttacggcaggcttcttcgctcagactttcatattctccttcggtcaatgcccagtgaattccgtttgccagatccttggaagactgatattcggcaacatagccgttgtgcaggtggtcaatcatttgtggaatacctcctacattgaaccctatgcacggaataccacaggccattgcctctacgatggtattgggtaggttgtcttgtaaagaaggtgtgacgtataagtcgactgcgttgtaaatatctaccagttccttctcgttgctgacataattcatcggatagatagggaaaggaaacagggaagcgtattgttcggcttggttgccaaaaaccactacacctaactccttactaaaatcaggatacgaggaagctatttgtttgcaagctgataccaaatagtctattccttttctcttgtctgtaatttttacggagccgaaaagcaataacttcttgtcttgcgggaggtggcatttttctctggcctgttttttatcacgaggtttgaacaggttggtgttgattgcattgggaatattggtaatggtctgacctttaatcagatcacttttcttagccaatgattctaaccagcggctacaagctacaaaggtgatttgtgctccttcaaacagttttttctttttctggaaagtacggtaggctatgtctttcttgctccctttgtaaagttgcggacagttgtggcattgtgtggcatatttatcgcaatctcctgcatagtggcagataccagtaaaaggccacatatcatgcattgtccaaacgatgggcttgccggattggatgatacgccggatatctgtcagtgacaacataccttggttaatccaatgcagatgaatgacatcggcttgggtaaattcgggcaatgctgtgatattggtgccggtattcgctatgtcaacggcaaacaagttatgtttcttgaagtggttggcttgccagataacgacacgctcccagatgaattgccatactttccaccatgatttctttagttcaacgacacttatctggtcggtctgcttgtcgcgtacaagcatttttgtctttattccgttgttttttaaagcctccatgaggcggttggctgcaatggcggctccacctattcgctcagacgtattgatgataagtactctcatgtgcataaaagtttatgcaaatgtacgttttttaggggacatcttggatatttccagtaagctttctgctatttcacgggaaaagatttccaaattgaaacgtttttctgccagctttcgggcgttggcgcccattttttgggcttcttcgggatggtcggctatgcgatgaatggcattgatccacccttccacgtcatcataggctacggtaattcctatttcttctttgtctatatccatttcaaaattaggattacgtgagcaaatgacagggatgcctaatgcaaaggcctctaccagtgtggtaagacctacggtataaggaaaatccatgcagcagatgacaacacagctttttcgtgccactttctgtgccaacaagtatgggatgacaccgtccgtataatgtactcgtacagaatcgggcagacagaagctttcaataatctgttggtagtttacacttccattggtgggggctatgtacaagtccagttgttgatcggtggcgcagaaagcttgcagcattgtgtctacatcccggttttctttcccggtggagataaaaccttccggtttccgatccggcattgtttgcagaagatggtcatagaaagcgaggtccggcccccaatggataagctgaagcttttcttcgggagcttttccggttgctaatgagtctttaatcaattttttactgaacaggaacatatgatcaatgcccttataaaagaaacgtgagatgcgttctcttatttttctggatgaggtttttaaagcagtgtgatgccaaatgacaatgggcttgcggtagaggcctaatgctctgagtaggatgataagttccaacccacggaaagatgtaccgtagagcacttcgtatggctctttgcagcacagaatctctttagtggcatagaacattagtttcagacggctggggaaagctttgtatttatgcatcaccgaccggattccatatttttccagcaaaggaagtccgtagaggatatgtcccggaaacttataatctttccattcctcgtaactttcacgggttaatcgggtgtgataaaaataaatagtgagtggttttaccggtgttggtctcttttcagccatttgttaattctgttttttattgctttagtgatgatggaaaaattgccgtatcgcaggttcagaaatagttcttcaaaagaacgtcctatcttaatccagggatgtccccaccccataatgcggtagacagcttttttataagctacattctcaatgacataacgaggatgcttgagaggaaattctacttcataccgtttcatggtgaagatgcggcggtatcctttaggtagtgtatgcacagaaccggcaaaatgggtggaatctgccgtggctcccaagttgttaatcatgttgcgggtgggcacgatagccagtcccgagttgaaaagcatggaagcgtggaagatggtttcataataggctttgttgttttctttatggcgatggcacatatagataaagtctttacggaatttccgttctttaacgagctgttccagttgttgcatattgaacttgtcttctagaaaagtataatgttcgtcccattggtcaatgacccttttccaactggcccatccccagatagagaaagtggaggcaaagaaataatcgtatggtacacccggagtaatctcttcgttattgaaacccgcaatcatggtgatacgggggtcttgctcgtatttgtctaacatttctttacagaatgtgaaaaaagaaacggaaggcacatcgtcatcttccaatacgatacatttgtcaaccatagaaaaagcccatttttgtgaaatgtattccgaagggtcgcaaccgtagtttttttcctgatacatacggtggacttcgcagtcccagtctatctgatctgtcacttcacgacatgcttttataccgggcaggtcgtgttcgctgcgtggtccgtcctgatagaggaaaagcttggagggacgggcattcctgacttgttcaaacacttgcgacagctgttgcgggcggttgaagaacaaaatgagtacggatacatctacaaggaacggtttcatagttcaatctcctttatttgtaaaattcgagtttgttgtaatgcggatgtatattctctaaatctggtaattgcatatagtcaccgtatatcttccttagcacagcatctgtttggcgtggtacggggaacatttttccttcaaattccatttctgtcagtggaaaaatatcgtctgtatagcgcggtttgaaataggcggtgccaaaagaatggcgtaattcttttccggggaataacttggcaatgaaccttaggatgggaaaaccgatgcgggtattaaaatgataaatcctacgaatccgtttgtataatgtgctttcttttatatttttattattcaactgattgtatatctgcccttgcatgtgtcctcctatccaagccagacaataagggatcttttctaaaggaaaaatatcaatgtagataccggtataatagaaaatacggtcatatgaatttgtttcttccaaatgagaatccttatcacgtaatttgccgtatataaagatgtaattgggatctgtttcattagtttgcaatgcaagattgtccggaagttcttgaggaagaactttcagcagacgcaggtaatctgagcgaagcatttctatgtccagatcatcatcccagggaatgaaacctttgtgacgtgctgcacctattagagttccggaactgagccaatagggtatttggtgcttgcgacaaatcacatcaataacctccagaagctctaacatacgtagttgctggcgacggagaagggaaccatcgggattaaatcgctttcttagttcactatccatacattaattttttagtagtttataaaacaaatcagcgttgatgtaacctgtttctgacaggtcttttccttttaattctccttcgtggatatattctttgtttaatacatcttgcccccatagcaatattttatcaatgtttggggtacaaatatttaatacatctgctattgatttgattatcaataatccaaatggaaaatcctcagtgaaataccggcttttgaaatcaggcagaaatcctttttctgttttttccataggagctggaatatgtttgaaggcaatgatggagcgtatcttgcgggtaagtgaccttgcatcataactgtcataatattccaataaagtaggaattggctctattcggactggcagtgctttcagaatttgttggaattcattgtcacaagcaatgaggagctctgaactttcttcatcccaactattatagaacccgggaatctcatgatatgcttttcctctactccaggtatggaaaagtgaataaagacgggctggatgaagcaatggattgctattggtcaggctggcttctagaaaatgatgaagcatacgcaccggcgtatctaacatttcttgaagagttcgtagtaaaatatcggattttgatatgtttacggtggctatttgtaattcctttttgtatcccaacaagagtgctttttggccataggtttgcacacgggcaatgaatggagcacgctggaatccgaaaagtgaagctgttttgcctaatattctataagcggtaaagaaaaaaccggtacaactgactacacttcctatgcaagttttttcctgcaagaacggttgtatgtggagaagttcttcctcaatggcaaatccggggagacaaagcaatacgatatcagagtgtggaatgacctctgccgggttagccgtaacgcaggctaatgagccggagaatgtatttccccggcaattttcaatgagtaatgatggattccattgctcgggatgccgggtgaggacggaaacattaaagcctttatgtgcagctactcctgcaatgacgtgccccagaccgccaccgccacaaatacagatattgatactcatgcttgcagtttttttaagttttcagccagataattgttgtcttcagtgtcgcgtatggcgatacggatgtaattcctgccattgaatcctgtcttggtactacaatcttttaacaagagattatgctccagcaataaagaaacgagtttggtggaactgaagcgggaagttacttcgcacaggaaataattggcttgtgaaggtatgacacgtaggaagtcaacctgttgcaatacctcgaaaaagcgttggcgctcggctatgaattttttacaggcattttgataatcattattatacttgctgtatatctgtaaatagaattcggcgaaggagtttatattccatatagccatgttttttcgtaaataggctattatctctttgtcggaagatgcggctatccccaagcgtaatcccggaactccataagatttggaaatacttttaatgactgtgaggtgtgggtatgtttccagaacttcattcttaagcagcgtattttcgacacttttttcgctgaagtcaacaaaagattcatccagtattaagtggatatttcgctgctgcgtccatgccagcaaatccataagttcgttaagggggatgaagttacctgatgggttatccggattgatcaagagtaaatggcggatatctttgtccgcataaaaaagcatcagttcttttgccgtataatgaaaatcggcattctgtggatagaatgcaatgatttcttctgattgccggttgggatattcttcgaaagtgggataaattactcccattttgccatctgaatgttccatcagcgctttgatgatttcggcggctccgttgccaacaaccacataatcttgccggataccgaagttttttgccatgacaagcgtgttcactcccatgccggaagggtattcacggagaagcacattaaaattagcctgtagttcttcacacattttttgtggtggaaaataggggtttactaaatagcagaaatctttcagctttgggaaacgccagtatccgccatatcttttttggtagcgttgtagctggtcctgttcggcaaaaatggtttcagcgatgtcaagatcttgtatatcatcaatctcataccagcgttctccttccaaagggagtcctttcagttcacatctctccagcagggtgattacccgtaatacctgttcgtaatattcgttattacctagggctttgctgtaggcttcaagaaatggcacataactgttgcggagaaactccttactgaatttatagatattgacggttttgtagtaatcgtcaatatctgcgtagcggaacgttttttttgagataaaatcaatgatgtcattttcagtattgagccgtaccatcgtgccgtccatccatggctcatatttagctacaagtgccagattgggataggggttatttaaaattttgtggaaaagtgtatcctcaaaaatcaaatcggattcaattaataaagtatcttgcttttgcaattcctctttagcaagatagagagaatagatattattggtcttattgtagacaggattgtaaatatattctatcggagtatttctactttgtttctctatgtgggtacgtaatttctctccttggtagcctatgactaaaatgatgcgttccagatttaatgaatctaactgtgagagcagacggtctatcagataggtcccgtttactttaatcatacacttggtgttatctttggtaagatctcccaagcgcttgcccatgccggcggctagaatgattgcttgcataataaattaggtatatatattgcaaaagtagtaattaattagcatttataagcgatgttatttatatttgcctcaaattttaaacaggaatgggtaaaataacatttgtaccggtaggaggattggccaaccgtatgcgtgcagtggcttcggcggtaatgctggcaggaaagacgaaaagtgaattaagcatcatttggtttcaggattgggcactgaatgcaccgttttatcagttgtttaagcctgtagacagggaagtggcttgtttacgggatgcttcgcggttggattatgcattattagacagacctcgttccaagaattttcatttcccgcttttgtttcagaaactgcttttcaagtcttgtctgtacgagcgttccattactcctttatgtaaccggcattttgattttgaacggtgggttaaagaaggtggctgtgtttatatggcatcatacaccgctttccaaccttatgattatgcatggatcagtcggttgtttgttccggtagacgagattatggaagaggtagaaaaccgttgtcggaatttttcggatgctatgattggtgtgcatatccgtcgtacagataatctggcttctatcaggcaaagccctatcgagttgttctatcagaaattagatgagaagataaaagaggacggcaaggtggctatctatttggctacagattcggaagaggtgaagcgggagatgaaagagcgttatggcgaccggatattctgttccggaaaaaaggcagaccgtggatctttggagggaataagggagggtatcacggatatgtacacattggctcgtacacaaaaaatatatggttcttttcagagttcattttcggatatggcagctcagataggaggggttccattggagattttgaaattatgagttgcggaaataaatcattgttttaatgattatctgcaaacatttttatttttgctcctcttttttctatggcatttgccaatttgttttctatttttcctaatagcagccgtctgctccattctataacaagcgttgtcagacagatagaaacaagtgttcccataaaatacagaacaagtaggttgctgtctgcatatgggacataccagggttgtaaacagtggataagaagtccttgaagcatatataaggcaaaaacgtatcctgctaggtaattgatgatgcgggatgaaaaatgccaccgggtaaactggtagaaaatcatgatggaggcgatgataatcagtagattattatctcgggcgaatctcagtatgatatttccactcattgctgtaagcagggaatttagtataaaaatacaggcaaggctgcctgacaagatttcccggctatgtcgtttcatattttccggaagaccataggtcttcagatattgtcctatgagataagctagtgtgacattgataattcccttgcccgtgtcattctgaatttcaaaaaacaggattgtcggggcaaatacaaaaaagaatccccatagtaacagtagttgtttataacttttttgtgagaggttatgaaccagccggtttaaatagggcgagaaacaataaagtactacatagcaggtcataaaccagtattttttgctaagtatcggtagcaatgaggaggccagccctgtccaggtatgcggagtgtgaagccatattgtttcgatcagataagaaacgatggaataaaaccatacgacaaccagcattttgaaaaatttatgtgtattgaaacggattccaaaataacctgagatcagaatgaacaaggttactccggtgtttcccagtgtattgataaatagtatgaattctttgttcagccagttactggtgtggaaggtatttcctagaatatgcatggatacaatcagtatgatactgataattcgtaaacattctaatccggagtgacgtgtagcagccattatttcttgattatatagtgtaaactctctttaaaagtgacggagccgctcaaccacaggatggctgtgtagagtgtgccggctatgatcattttgcttgccattaataaatacagattggcaaagccgatagtgatataataggtagccgccattaccgcggtagctatgaaggcaaacggaaggatgtctttcagcgctgcaaacaagctgagccgtatttgtttccatacaaaatagtgccatacaaacagccagcagatattgatggatacatacactataatcatggtatgtacgccgtatggatagagcagcagcatggttgttaactggataatgcctaagctgatggtattccacatatagatatccgattttcctttgctgatgactaagttggaatacaaattggttatgggaatgaatgcgccaccgatgcagagcaattgcaggatgaaggcactgggtagccatttgtctgtaatagtcagtataatcagttcgggtgcgattaatgataatcctaacatagccggaaaagaaataaaggcagtgaagcggagcatcttccggaaagcgcgttgttggcgttccctttcatccgacaaactggaaagtacaggttgggccacactgttgactgttcctgaaattaatgaatgtcccatataattccatttattagcttgagtaaaatagcctacttcttgtcccgaatagaatttaccaaggataacggtaaagatattattattgatgtggttgaatatattggttactaataatttgctgctgaaagaaagcatccctctcaaaggcttgaagtcgaaagtaagtgtaggtcgccagggtgagaagcaccaataacagatattaatggttcctacatagacaatgctttgtgtggctatcccccaataggcaaatcccaagcaggccatagttataccgatagttcctgaggcggttaatccgatagtgaccgccattgccttttgcttgaccattaagttgcggaacaggtaagcactgtgggcaatgcccaaactggctacaaagaaaccgaggaaagtgtatcgtgccaaagctgtcagttcgggagtgtgatagaattcggcaatgagtggggcgcaaaggaacagaatgaggtagagacaggcacttagcccggtactgaaccagaatacggcattatagtctttgtgggagatatcccgtttgttggctagggcggccgtgaacccgctttcctgcaaagagcctgcaataagggagaagatggacagcattcccaccatgccataatcttccgcattcagaatgcgtgacaggaatatcccgaaaaaaagattcagcagctgctgtactccattgcttaatccgccccagaagaggccttttgctgtcttttctttcaaggattgttctgtcatttttatagatagattataaaacagtcaggctgaaagcggacgtttcagttgctttcagccttttctgtatttgggtgtatattatttcacttcactgcccggctttacctctcttaataaagaggtcaccgctaaggtgccgtcaaagttttcagcactcaggatcatgccttcgctcaccaatccgttcttgaattggcgtggagccaggttggcaatgaataaaacttgtttgcccaccagttcttccggtttataatgttgtgcgataccgctgacgatggtacggttctccagtccgtcagcaatcttgaatttcagcagctttttcattttaggcactacctcacactctaatacggtacctacacggatatctaacttttcaaattcttcaaaagcaattaccggttttatcgggttggctttatagttggcagcctcgtttgcttttttggtagccaacagtttgtctacttgtgcttgaatggtttcatcttcgatcttttcgaacaacagttctgccttattcaattgatgtccttctgccagcagatcggtacgtcccagttggtcccattcaaatgtttccatattcagcattttgcggagcttttcgctgctgaaaggcaggaaaggttcgaatgcaatagccagattggcaactagttgcaatgctatgttaaggatggtggctacacggtccatatcagtttttgccagtttccaaggctctgtatcggctaagtatttattaccgatacgtgccaggttcattgcctctttttgtgcatcgcggaatttgaatacatccagtagcttttctacttctgcctttacgtctgcaaattcttttaatgtttctttgtcgtagtcggtcaattcaccgcaaacgggaacttttccgtcgaaatatttatgagtcagcactaaagcacggtttacaaagttaccgtaaacagccaccaactcattgttgttacgtgcttgaaaatctttccaggtaaaatcgttgtcttttgtttcgggggcattggctgtcaatacatagcgcaatacatcctgtttgccggggaagtcctgcaaatattcatgcaaccatactgcccagttgcgtgaagtggaaatcttatcaccttccagattcaggaattcattgctaggtacgttatccggtaagatatagcttccttccgctttcagcatagcagggaaaacaatgcagtggaatacaatattgtcttttccgatgaagtgaatcaaacgggtttctggatctttccaccaagtttcccaactgtcgggaagtaattcttttgtatttgaaatatagccgatgggggcatcgaaccatacataaagtacttttccctcagcgccttctacaggaacagggattccccaatccaagtcacggcttaccgcacggggttgcaagcccatatccaaccagcttttacattgtccgtatacattggggcgccattctttatgattttcaagaatccattcacgcagccatccttcgtgtttgtccaatggcagataccaatgtttggtttcacgcatcactggtttactgccactgatagcacttttcggattgatcaggtcggtcggagaaagtgatgttccgcacttctcgcattggtcaccgtaggctccttctgcatggcagtgaggacattcaccggtaatataacggtcggccaggaactgatgggcttcttcgtcgtaatattgcatggaggtcttttcaatgaactcacctttatcatacagggttttgaagaattcggaagccagttcgtggtgtgtctttgatgtagtacgagagtatatatcgaatgaaattccaaattctttgaatgattcttttatcaaggtatgatagcggtccaccacatcttgtggagtaataccttctttctttgcacgaatggtgataggtactccgtgttcgtcagagcctccgatgaaaagaacatcttcttttttcaggcggagatagcgcacgtagatatcagcaggaacatatacacctgccagatgaccaatatgtaccggaccgtttgcgtagggcaaagcggatgtgacggtggttcttttgaatttattttccattgtatgatgtcttttttgttatttctaccagtaacgtgcaaagttagtgatttttagtaagtatatggaataatcagaaatatttctcccttaaaatctctgacaggccgtacttattataaaatatggttattcgggggctttgtcggaagaagtgaaaatacagaaaaatgttatatcgtgatgcagtgatttgcacttatttgcatttaatcttaaggagagaaaaatgatgaactaaattttacttatcctgttttttataaaaccttaagtcgaacgagacatgaatacgtggtataaattcattttaaatgcacttttctctaaaaagagagaggataaagattgggaaacgaccgataaggaagaggatgttctttcaaattacattgaactggactcattgatgcaggtcatttatcatgcaaaggaaactgagtcgggcagctaaactaaccgacccagtcttctctatcaagatttctatagcttatcgcttctgccaggtggatggaagtaatgtgttcgctgttgtccagatcggcaatggtacgcgctacttttagaatacgaccgtatgcgcgcgccgacaggttgaggcgtgtcatggcagttcgtaataattttagccctgcttcattgggttgagcgtacagatggagtaacccggcttccatttgtgcgttgcagtaaatacccggatggttggcaaaacgttgagcttgtatttcccgggccttgataacccgttcgcgtatgcttgcactactttccgcatgatggcgttctgccattttttcgaatggaaccggaactatttctatttggatatctatgcggtccagtaaaggaccggagatacggttcaggtaccgttgcacttgtccgggattacagacgcaagctcgtgtgggatgattataatatccgcatggacagggattcatactggctaccagcatgaaactggccggataatccagactgtatttagctcgtgcgatggatatatgcctgtcctctaggggttggcgaagtacttcaagtacacttctgttaaattccggcaactcgtctagaaagagcaaaccgttgtgagccagactgatttctcccggttggggattggtgccgccacctaccattgctacttgcgaaattgtatgatggggactacggaaaggccggatggcaatcagtgaactgtcttttcctaattttcctgctactgaatgtattttagtcgtttccagactttcacccaatgaaaggggagggagaatgcttggcatgcactttgccatcatggacttcccacttccgggtgaaccgatcataatcaggttgtgtcctccggacgcggctacttccaatgcgcgttttacactttcttgtcctttcacatcagcaaaatcgtatggaaagctactttggtgttcatagaattcctcccgtgtattgacgatgctaggctccagattgcgttcattattgaaaaattcgatgacctctttgatattttctacgccatatactttcaggttgtttactacagcagcttcccgcgcattttgtttgggaagtatgaagccttcaaaaccttgctcgcgggcactgatagctatggagagggctcctttgactggttgaaggcttccatccaggctaagttctccgataataagataacgtgaaagtttttcttccgatacgatttgggtagcggccaatattccgattgctagcggaaggtcgtatgcagacccctccttgcgtatgtcggcaggggccatattcactacaatttgacaagtggggaatttatatccgtttacctgtaaggcggaaataatacgttcatgactttctttcacggccgagtccggcagaccgacaaggaagaattttatacctcgtgaactatttacttcaatagttacaatggtagcgtcgataccttgaacggctgctccatagacttttaccagcattcttttattttttattttgtctctttcgagcacgttctgcctctttggcggctttttctttctctttatcttgttctgtcagctgtctcactttgtctatcagttctttgccccgtatatcttgtgtgatgacccgcttgtcaggacctatcagtatattggcaggaatccgggttatgccttgttgcttgacaatggaattgttccagcctttgaaatcgcaaacttgtttccattgcgtggtatctttttgaatgattttctccatccattcctttttattcagatcaagggagaggctgataataacaaacttgtcttttttcaatgccttttgtacggatactaaagaatcttgtgtggcaatgctttctttgttccagcttgcccaaaaatccaaaaggacatatttcccttttacactgttccagttgacggtctttccttttttatccgtgcacgagatgttggaaacgtagcgatgttctgtcagttcttttttctcacttaatttattctggagttctataatataaggtgtgtcttttataataccgcttagtccttttatcagctgatctatgtggttgtaatcaggaagcgagtcctgtacgtaatatttgtctatcagatagatattgctgtacgagcttgggttggttttaatcaacgaatccacagcagtcataacagctgccttgttattttctaaggtgctaaggtactggatatgttttgccagttgtgcgttttctccctttcctttaacctctatctttccggccattccgtttagggtaacactttctcctttatcagcatatatcggtaagatttgtttttctcccaatagtaatgagaagatagtaaatgtgtcaggggtaatggtgtaagtgaatttaccttttgagaggagtatggtatccagcttgtaatcgggttcttgataaaatactaatatagtgtctgaaggaagtcctttaatgcttccttccaaggtgaatgtatttttcttgccgcagccgcttgccagcacaacaagagtgaaaagaaagaatagtaattttttcatttcaagatattttttgcgaaaatacgcattttgtggctaaaggcaggcataaatgaaggttattttacataaaaagaccggaagcttcatcacgaagcctccggtttcagtcataatcatctaaaaaactagacaagatgatatctagttatattatttgatagcatcagcgtatttagcgaactcgcgatcgttagcagcttttccagccattgaaggatcttttgcgattgcgctcttgatgctgctgcttaccaatgaagcattgtttgtgcgagcaccaacgatagccatcaagtagtcagtcattgcatccggattcttgattgcagacaaagtagcttttgctttgttatagtctttagccaaaatctgagcttgagcggcactgttagtcttagcgtcaccgaatgagttgacagctctgtcatactggccttgtttgatatataagttacccaaagcttcgccggcagcgttagcacctgtagctttgcctaagtaagtttcggcagctgcaacattgcccttaaccaattcgcaaagaccaaggttagcgtttacttcaggagcgttagcgttcttagaagcagcttgtttgaagtagctttctgctttagcagcatcaccggcagcgaatgccaattcacccaagttattataagcacggaaatcgttcggataaagttgagttgtcttggtgaagatagcttctttgcgagcgttgtcgttagtcagggtagcagcgtacaataattcttctacactcaatactttaggatcagagttgaatgcttcgttgatttcgtcatcgctacgaccgatgatgtcatagttggcagttaaacgggcacgacgcaactgaggcaggatttcgtcagccaaagttttgtatacagaagagatattcttgatttcagcttctctttgttcaggatcattgtacatagaaagaacacgtaagatcaaatctttatcctgcaagtttgatttagataccagttcttggaagccttcccagtcttgtgcagtgtattttgcatccaggttagtatcaatcttgcccttcttcaactggcgttccatatatttttctgtgtttgcttcacggttttcagccaaaccggtgttcagttccacaccaccatcaggtgaagcgtatgcagaaatttcgatgttgttcagtttgtagttctttgtgtcggcattaatttcagccactttcttatggaattctttgatatcgtcagaattcaattcgctgttgcgcaagttggcttgctggatcaagaacatgatgttggcagtctgagcatctttaataatgcgttggaaagcatcgttagcgtatgatgcgttagagctggcagcagtaggcagttcagaagtcgcgataacgccatcagcgatttttacagaaggaatagtgtatgatttctttccttttgtaatcttgaaatcaagataaagttcagagtttgccatttcgggaacgtagtcgaaagaagctttcatcgtgtagctgccacctgccttgtaagcgatagtctgattgtttccttctactttttctccttggaatacagcgggctggcctttagcttcgccgcctttccatctcagaacgggggtaacttcaacagttgcgttcttcttgaaatacttttcggggaatttaccattaattgtcacaggcactttaccaccgattgcttcaagcacttcagggttagttgtgaaatagtcagaagacaattctcccatcttgccgcatgatgataaggcaaggaccaataaagccactaagggcaaatacaactttttaatcatagttacttattaatttaacgtttgtaatgtaaaattcgctatagtacgtttttgtgcgtctctttgggggcaaagataggaaaaactctattatatgctagcttcttagcctgcttttttttcaatttatcttaaaatattttagaatatagaacctttattatctttttctctgaatttgatgttacgggggtgatgttctatgatttcactgcgtagcatattacggtctatatgtgtataaatttctgttgtcccgatactttcatgtcccagcatgcactgtatggcacgcaagttggcacctccttccagcaaatgtgttgcaaaagaatggcggaatgtgtgaggactgattttttttttcagacctatccgggctgccagttccttgatgatatggaaaaccatgatgcgggagatgttcttcccgaaattgctgataaagacaaagtcttcaaatcccggctttattttcatcaggttacggtcggtgaagtagagcctgatttccttgatggcgcgcggtgaaataggaaccagccgctgtttgcttccttttccttccactttgatgaagccttcttcaaaataaagttcggataatttcaggttgcagagttcggaaacacggagcccgcaactgtaaagcgtttccagtatggccctgttgcgctgtccctctttggtgctgcggtctatgcttcctatcagcaggtctatctcttctactgtcattacttcgggcagtttgaaacctgtctggggggattccagcaattctgtcggatcggctttcaggtaatcttccataatgaggaaacggtagaaagagcggatgcccgacaagatgcgtgcctgcgaacgggggtggatgccgatatcatgtaatccggccgagaaatcttccagattttcaagccggacatccagaatgttgatgttttctaatgtaagataagccagtaacttgtccaggtcagtaagataagcatctaccgtattgtcagataacgatttctccaactttaaatattgtttgtatttcaccaatatcttgtctgttttctcggttcttttcatttcttttttctacctttgtacccaaattccctgcaaaggtagaaaaagttcagatatagtataaatatgaaaatacaaattattaatggacctaatatcaatttattaggcaaacgggaaccttccatttatggcgctgtttcatttgaagactatctggtggaattgcgccatacttatccggacattgaaatagcgtattatcagtcgaatgtggaaggtgagatgatcaacaaaatacacgaagtgggttttgattatgacggcatcgtgttgaatgcaggggcttatacgcatacttccattgctttgcaggatgctatccgcgccgtgacagctcccgtggttgaggtgcacatctcgaatgtacatacccgtgaggagtttcgccataagtcgatgatttcctgtgcttgtgcgggagtgatttgtgggttcgggcttcattcatatcgtttggcgattgaggctttgttaatgagaaaataaaacgtttaggtataatataaggtgataagattatgatgttgaaacaaacaaaaatcgtagcgtccatctcagatcagcgttgcgaggtagagtttataagagatcttttcaaggccggtatgaatgtggtccgtatgaatacggctcacgcttcacgtgaaggttttgaaaaattgataaccaatgtacgtgaggtttccaaccgtattgccatattgatggacacaaaagggcccgaagtgcgtactactgctattgcgggcggcgagcctattccttatcagattggtgacaaagtgaagattgtaggtaatcctgcacaagaaacgacccgtgaatgtattgctgtatcttatcccggttttgtgcatgatcttcaggtggatggcgatattctgattgatgatggtgatctggagctgcgtgtgattgagaagacagacgagtatttgttgtgtgaggtgcagaatgaagctactttgggtaaccgtaagagtgtaaatgtaccgggcgtgcgcatcaatctcccttctttgacagaaaaggaccgtaacaatatactgtatgctattgaaaaggacattgatttcatagcacattcgtttgttcgtaataagcaggatgtgctggatatccgtcagatactggatgcatacggcagcgacattaagattatcgccaagatcgaaaatcaggaaggagtggacaatattgatgaaatattggaagtggccgacggagtcatggtggctcgtggtgacttgggcattgaggttcctcaggaacgaattcccggcattcagcgtctgttgatcaaaaaatgtattctggcaaagaaaccggtgattgttgctacccagatgttgcataccatgattaataatccgcgtcctacccgtgctgaagtgaccgatattgccaatgctatttactaccgcacggatgcattgatgctgagtggggaaacggcatacggcaagtatccggtggaagccgtgaagacgatggccaagattgcagcgcaggccgagaaagataaactggccgagaatgacatccgtattcctttggatgaaaactccaatgatgtaaccgctttcctggcaaaacaggcagtaaaggctaccagcaaactgaatatccgcgccattattaccgacagtttcagcgggcgtaccgcacgtaatattgctgctttccgtggcaaatatcctgtattggccatctgttataaagaaaaaacgatgcgtcatctggctttgtcatatggggtggaagctatctatatgcccgaaaaggctaacggacaggcatattatttcgctgctttgcgtaaattgctggatgatggtgtcttgagtgaaagcgacatggtggcttacctgagcagcggcaagcaaggtactcagacttctttccttgaaatcaatgtagtgggagatgtgttgaagtatgctatggactatgtgctgcccaaccgcaaccgttacctataataatagaagataggaatgaaagaaacggacgctattgacgaatatatccttcagcacattgatgaagaaagtgattatctgaaggcactttatcgcgatacgcacgtcaagcttttacgtccccgtatggcttccggccacttgcagggacgtatgctgaaaatgtttgtgcaaatgatacgcccccgtcaggtgctggaaatcgggacttacagtggctactccgcactttgcctggccgaagggttggaagagggggccacgttgcacacatttgagataaacgatgagcaggaggactttacacgtccctggctggaaggttcgccttacgccggcaagattaaattttatataggtgatgcgctgaagttgctgcctggcatgaacattacctttgatttggcgtttgtagacggtgataagcggaagtatattgaatattacgaaatggtactggagaaattatcacccggcggatacatcattgccgataacacattgtgggacggacatgtattggaggaaccgcatcatacagatcttcagactattggaataaagaaatttaatgatttggtagctgccgacaaacgggttgaaaaggtgattcttcccttgcgcgacgggctgacaatcataagaaaatgttgaataatgtgccaataggttatgctatgaaccgtatggcatattaacaaattagcaaactgaataattattaattatggaaacgaccagacaaaataagatttctcgtttgatccaaaaggagttgagtgagattttcctgcttcagaccaagtccatgaatggtgttttggtgtcggtaagtgctgtccgcatcagtcccgatatgagtattgcacgtgtctatctcagcgtgttcccttctgagaggagccaggaaatagtaaagaatatcaatgataatatgaaatccatccgttatgagttaggaacacgggtacgccatcagttgcgcatcattcccgagttgaaattctttgtggatgattcattggattatgccgaacgtatagacgaattgttgaaaaagtagaaccgggcggtgaattttcccttttatatagcgaagcgttatcttttttccaaaaagtcgcacaatgccattaatgtcatttcagccatttccgtctgcggagtggctttggctacattggcattggtatgtactttgtctgtttttaacggcttccaggatctggtggctactttctttacggcttttgatccggagctgaaaattacggctgtcaccggaaaggtctttgacggacaggaagcgcgtatagaagctttgcgccggatgccggagatcgctgttttttctgagtccttggaagagaatgcgatggttcagtataagggccgtcagactatggcggtgatcaagggaattgaggataatttcgaggatctgaccgctattgacagtattcttttcggccgggggcaattcgtgttgcatgatgaagtggtggattatgccattcccggcatagaattggtttccatcttgggaacgggtatcaaattcctcgatccgctagagatttatgctcccaaacggggagctaaagtcaatatggccaatccagcttccagctttaactctgccgatttatattccagcggccttgtgtttgcggtgaaccaacagaagtatgactcttcttacattttgacttccctccaatttgcccgtaggttgttccagtatgacacagaagtgagttcggtagaattgaaattgaagccggatgcagatgtagggagtgtaaaatcgaagatacagaaaatattgggagatggtttccgggtgcaggaccggtatgagcagcaagcggatactttccgcattatggagatagagaagctgatatcttatattttccttacctttatcctgatgatagcttgctttaatgtaataggctccttgtccatgctgattatagataagaaggcagatgtagtgacattgcgcaatttgggggccagcgacaagctgatcacgcgtatattcctgttcgaggggcgtatgatttcactgataggtgcggtggttggtgtgatactggggctgatcctttgctttatccagcaggaattcggattgctttcgctgggaggtggtaattccggcggtaattttgtggtggatgcttatcccgtcagtgtccatgtatgggatattgttatagtctttgttactgtgctggtggtgggctttctttccgtgtggtatcccgtgcgttatctcagccgcaggttgctgggcaggtaatttatttattattgttgatacggctgatgtttgtcggtttgtacggtacggcttggctgctttctttgtttttattcttttcgtcttttggccttatggctttatctggttaagtcttttcttctttgtggttaaccttgttttaccttatggttaagctcttttttatggttgtgtactatagtctcttgcggtggtttgtacagtctgatatagtggactgtataaactcttgcagtagactgtacagtccactgccggagtctgtagtagttaactgtatgataagggttagctataaggaaaaacgaccttaatcgtcggagcaatagggcttggtacaagcttctttccagggcgtttcagatcttctactttcagggtcctcaaatcaattcgtagctgctcacctgaataggcatatccagattatgcagcaccttctccagcaaaatgccttcccgattatcatattcatagccgaaagtggcgcggatgccttgaaggataaactgtgtggcgcggtccaaggcgataggaagactgtcgccttgtatcagtgagccggttatcacactggtaaatgtatcgcctgtgccgggatagtgtgcgggcaggtagggacacgttactttccaatagcggtttccctgtctgtcataggcgtaaacggaagttttgcgaggatctccctgtacgggcacgctggtgataataacgataccggggccgtgctccgaaatttcatgcaggtaagcttttagttcttcgtctgtattctccgctttatagggtttgtccagcaaatagaacagttcggtcatattgggcgtgatgacatctgctttccggatgaggtgacgcatttccagaatcatttgttcgtcaaagttggtatatagctttccgttgtctcctaatacgggatctatcatgaccaggctgtcggactggcggaaatcatcaatgaacccggatacgatttgtatctggcggggagatcccaagtagcccgtataaatagcatcgaattgtacgccaagttgtttccattcactgataatcttgggcatctcgtccgtgaggtccaagaaagagaagtgcgggtattgggtgtggctggataatacggctgtgggcagagggcagacttgaaagcccatggatgagaggatagggataacgacggtgagggatacgcgccctgcaccggacagatcgtgtaccgcagctatcttctttactttatttgtatacatatcttcatgaattaagcgttatggatggtatatataacaggtaaaccggaagaaagttattccaatgctatgctttttacctttatgtcttgccggcccaagaagatggaagcggattcctcaaacttgttttcgctttctgtggtgaggaagcggcagtttcctcctttatcgcagcgtgcgtccatttccggatggcggtttaaatagtctcgcaggctccgggccacatattccccttgtgaaatgatgcggataggttcaggcgtaaattgccttattttatccagtagtagcggataatgggtacatcccaatatgatggtgtcaatcatcggatctttatccagcagccggttgatatgttgtttgacgaaatagtcggctccttccgattgatattcattattctctaccaaggaaacccacatgggacaggcttctcctgttaccacaatgtcgggagataacttatgtatttccaaaagataggattcggatttgatggtaccggctgtggccagtatacctacgtgccggcttcgggtgatttctcctatacattctgctgtaggccggatgacaccgagtactctgcgggtagcgtctattaccggaagattgatctgctggatggtgcgtaaggcttttgccgatgctgtgttgcatgccaatatcaccaaaggacatcccagttcaaacagtttgcttacggcttgcagggtaaattcgtaaacaacttcaaaagagcgcggtccgtacggacagcgtgcgctgtctcccaaatagatataatcatactcaggcatcagtccgcgtattttgtccagaatggtcagaccgccgtagccggagtcgaatacaccgatgggaccggttgaagggaggatagatgggatcatggcagtatagctatataatacaggcacggattacacggatgttcacggttctgaaacctgtgaaatctgtgtaatccgtgcctgtaaaggtccttaacttaattatttgattcctactttagctttgacagcagcagttacatctgtagactgcgcttcatttacgtagggaatttctgttctgttcaaatcgaagatataagtatatccaccttcctggcctactgctttgatggcgtcttcaattttcttgtagataggttccatcatatcagcgtatgatttctgcaactgttgttgtgcatcttgttggaactgcattcctttttcctgtaattcctgcaattctttctggcgtctttcctgaatgttcttaggaaggttggcttgttcctgttgatattcagtatattttttggtcagttcatcagttgcacgtttcatttcatcctcgtattgtttctgcatggcttggatgtcggtctgggcctttgtgaattccggcatgacagtaagtacatctgcggatttaatatgcccgaatttctgagcaaatacactcatcggagcgataagtaaaagtagtaaagcaatttttttcaacatagttctattttttattagttattgcaaatttggattatcggttgcaaatgtaggaaattaatttgaatatcctaatcttgagagcacttcattgctgatatcaatgcttggagatgcgaaaataatgctttgggcggagcctctgtccactactgccgcatatcctttttgctctgaaatctgttttaccgcttcatagattttatcttgaattggtgtgatcaatgcctcttgttttttggccatttctccttcgggaccgaaatatttctttctcagttcggctgcttccttttcttttgctacaatcgcttcttctctttgcgttttctgtgcggccgacagggaagccgaggctttctggtattctttataaagtgcttccgcttcttttgcttttgcttccacctcactttgatattgttgtgaagcttgatttagttgggtattcgcctgttcgtatgcaggaatattcttcaggatatattccatatcaatcaaggcgaacttttgagcgctggctgtgaatacacaagccacaaacaatagagataataggatagcctttttcataatcacattgtttttagttattaaaactcttgtcccaggataaagtggaactggcttccactatactggctggatccgttaatcttgtcgaaaccgtatgcccagtcaatacccatcataccaatcatcggcaggaagatacggacaccgacacctgccgagcgtttcaactggaacggattgaatttgcttacatctgtccatgcgttacctccttcaatgaagcctagtgcatagatactggtcgaattttccaacatcaacgggtatcttaattctgcacctaaacgtacgtaagcatagccttcactaccataaggagtcaatgaaccgttttcgtaaccacgcagtgcaatggtttcggaagcgtagctggtgctatagcctgtcataccgtcaccacccatatagaatgtttcaaaaggtgatttcttgtacttgttatagtgacccagcaagccgaactctgcacgtgtcatgataaccggacatttctgacctcctgtaagagcggtataggtctttgatttgaatttccatttgtggtattcaatccagttgaacatacttgccgcttcatcataatcatctttaccgtataccgagtagtccttgttactgaacaatgagtacggaggagtcagctgtacggaagccgagaattcagaaccgcgacgcgggaaaatcgggttatccgtagagttacgtgccaaagtcagattcaaactcaggttgttgcaattaccggttgacatgtattctccgttgttcaacttgatatacaagtagctccagtctttcaaaataaagcgctggtaagaaagttcggctgacaaggtaaaatagtcatccggccatctcaaacgcttaccccaaccgatagatgctccatacatctggatagatttatcggggtcataaaaagactcgtagttgttattatatccgccataataatttccataaccgctgtaataattgtagtaattattcatataagctgagttatagtagttactgctgatatctgtctgtatggagtagaaagccgaaacagagaatgaattcggacgttttccgccaaaccatgggtcaaagaacgatacactatatgactggtaataactaccgttggtctgtccactgatggttaatgtctgtccatcaccctgtggcaggaatccgcggtagttgtcactcttatggaacaagttggccatagagaagttcgtgaacttcaaacttaatttaccgataacaccggtttgtccccaacctgccgagaattctacctggtcgtttgctttggactccaggttccagttgatgtctaccgtaccgttggtcgggtccggttgtacatccggctggatattttcagggttgaagtgtcccatttgggctatctcacgataagaacgttccaatgcttctttgctgaacagatctcccggcttggttcttaactcacggcgtactacgttttcatacaaacggtcgttaccgttgatacgcactttgctgatagaggcctgaggaccttcctgaatacgcatttccaaatcaatggagtcgccgtctatgtttacttctacggggtcaaggttatagaaaacgtatcctttattatagtagtagttaccgatagcatcttcatcaccggtcagacgctcggtcattaatttctggttataaacatctccctttttcatacggagctgttcgttcagccagtccgaagcataaatggtgttacctacccaggtcacgttgcgcagatagtatttgtcaccttcttctattttcatgtacacgtcgacggtacggtcatcgtacggagaaacactgtccacaacaatttgtgcgtcgcggtaacctaattcgttgtatttgtcgatgatatgctgtttgtcttcttcgtatttctcttcaatgaattttttggtacggaaaaggttgacaagtttgtttttctcattcgtcttcttcatgacgcgttttaacttcttgtcacttaacacggtgttgccgtcaatggtgatcttgtggactttcaccttttctttcttgtcaatcatcacatcaacatccacttggtccttattgtcagccaaatcacgctcaacgatggtcacttcggcgtttttaaaacctttttcatcgaaatgtttcttgattaatattttagcacggtctatcaagttgggagtaatctggcttccttttaccaaacctagtttggcttccaaatcttcacgctcgcttttctttacgccgtggtaacgaatgtcggcaatacgtggacgttgggtcaggatgatttttaaatagatcttgtctccaacaattttttcagctaggatttgtacatccgagaacagtccgtgtcgccaataacgttttacagctgtggtgatgtcatctcccggaacaacaatggtctgtcctaccgatagtcctgaaagtccgatcaatacataatcttcatagttttttacgccttctactttgattccgccgatttcatacttcttgggcgttccggaataaagtatgactggattgtcgttttcttctacgtttgcttcttgggcgtaactgcctgttgaaaagcaaaataggcatgtaagcgttaatagtataagtgaaatacgatatagcattttatctaactttatatttgttcactggttttgccgaaacggcgttctcttttctgataatcataaatggctttgcaaaattcttcttcgcggaagtccggccagaacgtttcacaaaaatatagttcggaataagcacattgccaaagcagatagttgctaaggcggatttctcctccggtacgtataagcaaatccgggtcgggcatatagtttgtacttaaatgtgcacttatcaaattgtcatcgatgtcctcaatggctagtttgtcgttttgaatcttggccgctatttgtcttaccgcttctgttatttcccatttggaagagtagcttaaagcaagtgtcagacacataccggtattgattgaggtgcgttcaatgcattggttcaatcgttccagaacttctaccggtaactttgccgtatcaccgataatgcgaaaactgatgttgtttttcatgaaagtttcttcttcaatggagtccatcagaagactcatcagagcagcgacttcatctaccgggcgattccagttttcggtagagaaagtatatagtgtcaagtatttgactcccagtctagccgcttcttctgctatgatgtgtacagtttctgcaccggcttgatgtccgaagctgcgcgcctgtccacgttgtttagcccatcttccatttccatccattataatggctacatgggcaggtatacggcttttgtctatttgctctctatatggcatgtcgcaatctattttatatgactctctttgactttattccttggaatcgaatcccaacttattgattcgtcctctccatacttctccgcttcggctccatataatccacaagaagttattcttgtctacgacataagaatagttgccgtctgcctggttgtatagatctgtgaattctgtagggaagaatacatatcttgaaacaggtttccatgtaatgccttgatccgttgacccgtagaatcggctgaaagcgggaatgtccttaccgaaacttttacccggaccaccgaaagcgtataattggtcgttataatgaatcatggctatattagccagcttgggacaataaaaactatcgtatgcggctgtaggataatctgcccaactgtcttctgtagtcagtctggtccatacagtagaggtcgtgtcggtcgcaatgggattttctcccattagtaccatacggtctatgaatttattggttaccaacgggtaagctgtgtatgataactgatttttcgggaaattggccggaacctcgccattagtatcccaaaccagagcatccgtgctttccataaaatgattgttggtgtctatggcgtacaatttgcagttatgttctgaatgaacaccggcaatcagcttctcgaatttggtgttagtgcccatcttgctccagctttttccgtcagaggagcagtacaggtcattgtcggcaagtatgtataattggtttccccatgccatgacagaagaatagtccgcattttgcatattttcaggtaaagcctgtaagggcgtccaggtttttccgtcattgatgtgggtgcttgtaacagcggtgccattgtcttgctgtgcgaaaacataaatataatcccctaatgtgactgctttctgtgcttggatagtgttgtcgaaactacttcctctatggctccactgcaatgagtcgggaacttgtttatgtacattaatctcggctttataaataggtccatagactccgctcatcgccataactttaaattggacaggcttttcgaaattcaaggagtcggtatcattccacaacgaatctttgtcctcagcgacaataaaaatgccaataccgtctgattttatgctgactacgactttgctgatgtctgtaccgactggcagggagtctacgttgtagatatgtcttgtgccttggtcgatggcaaaagggtatttggtaccatcaacggtgaatgtcagcgttgtgtctttgccattaaccttttcggtatattgagtttcaattttatcttttatagcaaaagaggtaatgcttgattctgaactatattctgtttctacttcgttgtcgtccaagcaagatgtaatcataaaagccgcagcaagcagacttgtgatgacagtcaaaaactttattttcatttgcaaatgagtctattgttacaagtcgcaaaagtaggaagatttttttctatatagaagttttgggacaagttttatattaatttatagataaaccagccctttttctcggtcaatcagccacattttatctttgaatttgtgaatggacggcatgcattatttctcttccaaagtatattttattcagtttaaagtgttttttttgaatagaaggtgcctgtattccattgtttaagcgtagtggagccttttctatgaaggcttcatcccataagccggagtctatgaaagactgtaataaaatacttccgccttctactagaagtgattgtatttttttctgatataatacttccattatttgcggcaggatatctttgttgaaatccaacgatatgtattctgttaatgcgtttggctgacagggggattcccgggtaaacacgaatgtctttattttgccgttgaaaagttccaaatctcggggtaatgtcaattctttatctattaccagacgcacgggatgcttgccgtaccaattccgggtggatagggagggattgtcaagtaatgccgtgtgtcgtcctactaatatagcgtcatgttcggcgcgttttttgtgtaccagcatgctggtcagcggattggaaagtatgatcggctttcctcctgtgcggtttatatcgataaagccatcagcggattctgcccactttaaggttatgtatgggcgtttgagcgtgttgaatgttatgaagcgtcttatcaggtgccggcattcctcttctaagacgcctacggttacttcaatgccggctttgcgcagtttctcgatgcctctgccggctacttgggaaaacgggtctatgcagcctattacgactttggggattctcttctctataatcaggtcggcgcagggaggggtttttccataatgggagcatggttccagacttacgtatatggttgattccttcaaaagattttcgtctttaacggaacgtatggcgtttacttcggcatgtgcctctccgcaacggatgtggtagccttctccaataatggtgtcgtgatatacaatgacagcacctaccatcggattaggggctgtgttacaaagtccgttgtatgccagttgcaggcaacgggaaatatatttttcatcttttgtcataacgatcttgtttaaattcttacttttgcatataaaatgacactatgaatcctgttgtatcttacataaaacaaaccttgcagggatattaccctgattcagaacttgtgcctatggctaaattgctgcttacacaagtcttcggcatgtctgttgttgaattgtatgcaggcaaagatactactttttcggtgaatgagcggaaacagctggatgatattctggttcgtctgcaaaaactggaacctattcaatacataataggtacggaagaattttatggccttacttttgaagtgaataaacatgtattgattccacgtccggaaacaggggagttggtagactggattatacgggagcataagtatggtcgggttagaatattggatattggtacggggagcggctgcatcgctgtctctttggccaagaatttggaagaggcggaggtcgtttcatgggatgtttcagaaaaggtgttgcaagttgcggaacgtaattgcaggcggaacggcgttcgtgtaactcttgagcaaagggatgtgctgcttgcttctcctgcaggtgagcggtttgatgtcattgtcagcaatccaccttatattacagaaaaggagagggcggatatgagtgctaatgtcttggaatgggagccggaattggctttgtttgtgccggatgatagtccgttgttgttttatcggaaaatagcagaattgggtagggatatgctagtgtctggtggaaggctttattttgaaattaatcaggaatacggtcgggaaacggtggatatgttggcaggtttggaatacaaaaatatagaattgagaaaagatctctttcaaaatgatagaatgataaaagcggagaaataagatgaagggagaattaagtgagaatgatttgaggtataaggcagaaacttattgctcttcaatggagcgttgtgtagtagatgtagaggctaaattgtcacaatggggagccactccggaaatgatggagaaaatcgttcggcatttgcaggatgagagatacattgaccagaagcgtttttgctcggcttttgttcgcgataaatatcgctttaaccaatggggtagagtgaaaatctgccaggctttgcgcatgaagaaaatccctgcggatgttatagccaaaggattggaggaggtagatgagcgggaatatatggagatactatctggtttgatcgagcagaaaagaagaagtgtgaaagcatgtacggaatacgaacggaatgggaaattgattcgttttgcagttggtagaggatttgaaatggaggctgtttgtcgttgtgtgaaacaaaccggagaagatgatgtctatctggactgatctttggaatttatttttccctcatagttgtctgctttgtgggcggcagcttatatcaggggagagagtgctttgcttgaaatgcttgtcggggcttccgcgtactcaatttcatttacggaaagataatattgtagaatgtaatttctggggaaaaataccggtggagcatgccacctcttttctttattatgcaaagggaggaaatgtccgacagttgttgtacgaactgaaatatcatggtaatcaagaagtgggtgaagtgatggggcggatgatggcatctgaacttatgtgctctcatttttttgatgggatagatttgattgttcctgttccgttgcatcaacgtaaaaaacgtttaagggggtataaccaaagcgaatgcctggcaagaggagtttcggtggtgacaggtattcctatggatactaaagttgtgataagaagcaggtatactgacacacagacgcataaaggacaatatgcaagatgggaaaacgtgcgaaatttgtttgcctgtattttccctgacagcttggaaggaaagcatcttttgttggtggatgatgtgctgacaacaggggctacggttgtttcttgtgctgatgcctttcgtggcatacccggattgcgtatcagtgtgcttactttggcattggcaggggaatcctgataacaacaactattttttagaaaaataccttgtccgatttttcattatctcgatgtatttctatatttttgcacaatatttatcagatatagttgagttatgaagactttagaaaaattattcgcagagaaattactgaagattaaggctatcaagttgcagccggctaatccttttacttgggcgtccggttggaagtcgcctttttattgtgataaccgcaaaactctttcgtatccttctcttcgtaattttgtgaaacttgagattagccgtattgtcctggagaagttcggtcaggtagatgctattgccggtgtggcgacaggggctatccctcaaggagctttggtggctgaagagttgaatctgccgtttgtgtatgttcgttctactccgaaagaccatggcttggaaaacctgattgaaggtgaacttcgtcctggtatgaaagtcgtagttattgaggacttgatttcaactggcggcagcagtttgaaagctgttgaagctatccgtcgtgacggatgtgaagtgattggtatggtcgctgcatttacttatggtttcccagtggcaattgaagcgttcaaggaagcaaaagtgaacttggttactctgactaattatgaagctgtattggattcagccttgaagaccggatatattaatgaagaggatgttccggttttggataattggagaaaggatccggctcattgggaggcaggcaaataagttatagttttaaaacaaatataatatgaagagaaccgttcgggaatttttatggatttccggattgttcttttcgtgtttttagagagcaggtattatggcacaatttgagagtggtgtgaaatatgttccttatagtcaggagcaggtgtttaataagttgtcggatttaagtaacttggaatctgtacgtgataaattggccgacaaggtacaaggtatggagttcgacagtgactctttaagttttacggtacaaggcataagcattactttgcgtataatagaacgtgaaccttataaatgtgttaaattcgaaagtgaaaaatctccggtccctatgaatttgtggattcagattttgcctgtagaggctgggcaggcaaaactgaaagtaactattcgtgcagaagtgaatatgtttatgaaggcgatggttgctaaacctttacaggatggtgtggataaactggctgagatgttatcgatgattccttattaaaaataaagacaaatatggcacagaaactttgggaaaaaaatgtccgggtaaatgaggagatagatcgttttactgtaggacgtgaccgtgaaatggacttttatctggctaaacacgatgtattgggctcaatggcacatatcaccatgttggaaagtatcggtttgcttacagccggagaattggaaatgctattagcggaattaaagaatatctatgcttctgccgaaaagggagagtttgtaatagaggatggtatagaggatgtacactcgcaagtagaattgatgttgacgcgtaagttgggagatgtcggaaagaaaattcatagtggacgttcacgcaatgaccaggtgttggtggatttgaagctgtttactcgtgcggaattaaaagaagtggccgaagaggtggagcaactttttcatgtgctgatttctcaaagcaatacatataaggatgtgttaatgccgggttacactcatttgcagatagcgatgccttcttcatttggcttgtggtttggcgcgtatgctgagagtctggtggacgatatgatgtttctgcaggctgcattcaaaatgtgtaaccgcaatccgttgggctctgctgccgggtatggttcttcttttccgctcgatcgtgagatgaccacccgcttgttgggatttgattcgatggattataatgtggtgtatgcgcagatggggcgtggtaagatggaacgtaatgtggcttttgctttggcttctattgctgggacagtttctaaaatggcttttgacgcttgtatgttcagtagccaaaactttggctttgtaaaacttccggatgaatgtactaccggctccagtataatgcctcataaaaagaaccctgatgtctttgaattgacacgggcaaaatgcaacaagctgcaggctcttcctcagcagattatgatgataatgaataatttgccttcggggtattttcgtgatttgcagattataaaagaagttttcttgcctgcgttccgggagttgaaggaatgtctgcaaatggctgcctatattatggacaaaattaaaatcaacgaacatattctggatgatgaccgttacctttatatctttagtgtggaagaggtcaaccgtttggcgtctgaaggtatgccgttccgtgatgcttataaaaaggttggcctggacatagaagccggcaagttcacccatgacaagaaggtgcatcatactcatgagggtagtatcggtaatttgtgtaatgacaggatcgaaagcttgatgcggcaagtagtggacggatttaatttctcagtcatggaacaggctgaacgaagccttttaggtagatagaaataattgtaaaacgtaatagcatgaaatatcaaccttcggcagaccgttatagcaaaatgcagtacaaatactgcggaaatagcggcttgcttttacctcgtatctctttaggtttgtggcataactttggtagtgtggacgattttggtgtagcaaccgatatgattaaatatgcttttgatagcggggttacacattttgacttagctaataattatggtcctgttccgggaagtgctgagattaatttcggtaaaattctgaaggagaatttccaaggttaccgtgatgaattgattatttcctcaaaagcaggacacgaaatgtggaatggaccttatgggggaaacagttcgcgtaagaatttaatggccagtatcgaccaaagcttgtgtcgtaccggtttggattactttgatatattttatagtcaccgttatgatggcgtgaccccggttgaggaaacgatgcaagcgttgattgatatagtgaagcaaggaaaagcattgtatgtgggtatttcaaagtatccgcctatgcaggcaaaggtggcttatgaaatattgagaagtgccggtgtgccgtgtttgatcagccaatatcgttatagtatgtttgatcgtgctgtggaggaggaggtattgccgttggccgctgaacaaggctccggctttattgcattttcgcctttggcacaaggattgctgaccaataaatatttgcatggtattccggagcactctcgtgcggctcgtgctactgggtttttgaaagtagaccaagtgacagaagataaagtggaaaaagcacgtcggctgaatgaggtggctgtacaccgtgggcagactttggctgagatggcattggcatgggtgttgaaagacgaacggatgacctctgttattgtgggggcaagttctgtaaaacagctggcagataatcttcatgcgttggataatttggcctttactgatgcagaattgaccgaaatagagggaattttacgattgtgaataaaaaaatgggtgtaaagtttggttggtattataaaatggcttatctttgcacccgttaaaacaaaacgcggaaatagctcagttggtagagcataaccttgccaaggttagggtcgcgagttcgagtctcgttttccgctctctctcgtcgaggatgctcgaatggtggaatcggtagacacgagggacttaaaatcccttggctattgcggctgtgcgggttcaagtcccgcttcgagtacaagatgtaattgcaatcattggaaaactgatgattgcgatttttgttttgtatattcaccataagataacggaagcagaagcacgggtcagcggattttcctggttggtaagctttcttttaagcgtatagcctagccagtctgaacatgaagaatttcagggtcagcggattttcgggtcagtttgaaaacttgggatcagttgtaagttttagatggagaagtatgagaaagtgatggcaacatcttttttcaacacataaaacaaggagctgccaccacccctaaatctttttatccatcagtgtttccgataaaaggtggtagcagtggcagcagattttaaaaactctattgtggaactttccggcaaatacagtctgtcagatgatcgttgataaaacctgaagcttgcaaatgggcgtagcaaattgtagtcccgaagaacttgaaacctcgttttttcatatctttactcatggcatcggattcgggagaggataccggaatttcgctcaatgaccggaatgtgttgataatcggctttttgtcgggaaagaatgacagggtataattataaaaactgccgaattccttttgtacggcaaggaatagtttcgcattcgtgattgtcgatttgattttcagacggttttttacaattccttcaaattgcattagccgctcaatgtcttcatcggtcatttgtgctaccagttcggcatcaaaattatagaaagctttacgatacccctctctttttctaagaatcgttatccagcttagtcctgcttgggcactttccaatacaagaaactcaaacagcgtcttgtcatcggtaactaactttccccactcttggtcatggtatttcacatacaattcgtctgttccgcaccaaccgcaacgtccgtttgttatatcttgcataattctaatatttgtgatatagaacaaatgtagtggattcatggcattatgccaaatttaaaaggactattttgtggcataaatacctataaaaagttattgcatagtatatatattccgtaaaatgggggaaaagattacctatatcaggtgattgtttcctcttttctttttacggacctttgcattctcaaaaattaagaatttagaattataggtattcatggtaaaaagacagttacaaaggatcagtttaggctctcttttttttataatcggagcgatatctatttttgcacaacctaagacaatggtatccggtaaagtgatatccaaagaaaaacaggaagtcgtagattttgcaaccgtatatttgaagggtacaacttatggctgtacaacgaatgaagaaggtatctatcatcttcatgcaccggcagggaaatacacgctggttgtttcggctataggatataagactatagaaaagcctgtaactttagttcatggtgaaagaattaagatgaatgtaatgattgacccgtcagtgactgagttgggtgaagtggtagtggtgtctaacggggtttcccgtgtgaaacgttccgcattcaatgcgatagctgtagatacaaaagaattccagaattctaccaagaatctgagtgatgctttggctaaagctccggggatgaaactccgtgagtcggggggtgtaggttcggatatgcaattgatgttggatggtttcagtggcaaacatgtgaagatatttattgacggtgtacctcaggagggagtagggagctcttttggtttgaataatattcctgtgaattttgcagataggattgaagtgtataaaggggtggttcctgtaggatttggcacggatgctataggtggtgttatcaatattgtaaccaataagaagaaacgtaattggtttttggatggctcctattcatacgggtcgttcaatacgcataaatcgtatgtgaatttcggacaaactttcaaaaacggctttacttatgaaataaatgcttttcaaaactattcggataatgattatcaggtggacgcaccggtagaggactttgaaaccggaagaattgataaagataaaagggtacgtgtgaagcgctttaatgatacctatcataatgaggcggttataggtaagatgggtattgtggataagaaatgggcagacagattgatgttgggctttacttattcacacatgtataaggagatacagaccggagtacgtcaggaaatagtctatggggaaaaacatcgtaaaggacattcgttgatgccgtcattggaatatagtaagcgtggcttattcatcaaaggtctggatgtggcattgactgccaattataataaaaatgcaacgacaaatatagatacagcttcctataagtacaattggttgggtgatagaaaattaatgaactcacccggtgaacaatccaatcaatattcacgggcggataataacaattggaatggaacattaaccgttaattaccgtctggcgaaaatacacatgctgacctttaatcatgtgttgaatactttccgccgttctaacacttctttattggctaagatggaatcggaggatgccatagctaaagaaacccataagaatatctccggattgtcctatcggttgatgccgtctgataattggaatctctcagtatttggaaaatattatagtttgtatgtggcaggtcctatggctacgactacgaatcaagatgattatgtccgtactacccgaaacatgaattccataggatatggagctgcgggaacttatttcattctacccggtttgcaggcgaaattgtcatatgaaaaagcatatcgtctgcctactattgaagaaatgtttggagatgaggatttggaaatgggagatatcagtataaaaccggagagtagtgacaatttgaattttaatttgagctataacagaacatttggcaggcattctgtatatatggaaagtggagtgatttatcggaatacaaaagattatattcagcgtaatattgcggatttgagtggtggtaaatatgctgcgaaatatattaattacggtaaagtattgacgaaaggatatactgtttctgctcgttacggttttggtaattgggtgagtataggaggtaattttaccaaaatggatgtacgggacaatatgaaaacatctatttccagcagtgcggaaaatctggcttataaagaacggatgccgaatctgccctatatgtttgctgattcggatgttactttttattggcgggatttaggaaggaaaggcaatatgttgaccgtgtcttatgataatcaatatctgcatagctttacttattattcttcccgaataggctcaaataaaggggactatgtggtacctgatcaattctcacacaatatatccttttcttatagtttgcaaaaaggacgatataacgtatcattggaatgtcgtaacttcacagatgagaagttatatgataattttagtcttcagaaggccggtagggctttttatggtaaactgcgtgtttgtttcggtaattaaagaattggaaaaaggagtttataattaattggatttaaaattaaatagaagaataaaatgaagaaagatttctttttgaacggatttgctgctattgccatagtaggaatggcgttgagtgcatgtacggataatgagccggattacggttcgggtaccgaggctaaaggtgagtatgttattgcatcgtcggtcacagcgtctggaaatacaacgaatgtgctgcttacttctgaaacgttggataaaggtactgtttctacagtgaataatggtcttgtgaatgatggtgcaactcaatgggtgttttacaagaatcaatatctttatgcgctgacttataatcaagggaatgcaggtacgacccgttcttataacatggattcaaataatgaagtaaaggctcgttcgggggagtttgccgtaaagagatttactacttacggtatttatgataaatatatcatgacctcgtctaccggtgacggacccacagcgtatgctgatgagaatggatatttaccaaagatgtttttgctttcttatttggacgtatctgctgaaacatttacaacgaatgatactcaaaataaggcttatatgtccgaaaacttcttgggaaatggagaatatgtaacattggccggcatattggaacgaaataataaactgtatagcgctgctattccaatggggttaagtcaatatggttcggctactgacgggggaaagtggatacttcccggcaatgaggatttggtaaagacagaagatggtggttccaacagcagcagttataaaaaaggtgaattgcaatggacgcaatatcccaataaatgctgggtggctatttttgatgatgaaacgctgacaaataaaaaaatcatagaaacagataagatcagttatgcttgcgggcgttttaaatcacagtattatcaaacgatttgggcggcagataatggtgatatttatgtattttctcctagttatgccaaaacaatggctgataaacggcaacagactaccttggatgccggagtagtacgtataaaggctggaacagaagagtttgatcctgattattattatagtatcgaagcgcagaccggaggtaaatctttcattcgttgttggcatattacgggagattatttcttgttgttgatgtatgatcgttccttgactgaaactggtttcacagctaatcagttagcgatatataaaggagaaaccggaaaactgacttatgtaactggtttgccttctgccgatttgatctccggctttggcaatactccgtatgtggagaatggatatgcctatatggctgtaactacaacagaaggatatccgtctatttataaaatagatccggttggtgcggtagcgacaaagggtatttctatagaagcgacacaaatcagtggcgtcggtaaactgcaacctcagaactgagtattgtaataatataatgggagtctgcgggcagtatgtgcttatgcagactctttttatgaatcgtatcgaagattttatgaagaaaatatttcgccaaatacatctttggctttctgttcctttcgggttaatcatttccttgatttgcttctcgggagccatgttggtttttgaaaatgaagtggtggaactggctaggcatgaactctattatgtaaaaaaggtagagacagttccacttcctgttgatcgattattggaagaggtagaactcacgttgcccgacagtgtgtctgtgacaggaatcagtgttttctctgacccggaacgtgcttggcaggtgaatttgtccaagcctcgtcgtgcttccgtgtatgtggatccatatactggtgagattaaaggtaaatatgaacgtcctgcattttttgtgactatgttcaggctgcatcgctggctgttggacagtatgaaagcggatggtggagtcttctggggaaaaatgattgtaggtgtcagcaccctgttgtttgtcgtggttttgatatcgggtatcgttatctggtggcctcgtacacgaaaagccttgaaaaatagtttaagaatatctgtcggcaggggctttagaagattttggtatgacctgcatgttgcaggtggtatgtatgcgctgttttttttgttggctatggcccttaccgggctaacatggtcttttggatggtatcggacaggtttctataaagtgtttggcgtggaagtacagcagggaggtgctcatggtggggtgacccggcgtggggggaaaggcggcgaccaatccggaaagaatgtttctcattcttcgtcctatgtttgttggcaacaagtttatgaacaattagccctgaataatcccggctacaagcagataaccttatcagatggggcagcaaatgtctctttcaataccttcggtaatcaacgtgcttccgatcgttataaattcaatcctcatagtggtaagattgataaggtagttttatataaagatgctgagaaggctggaaagattcgcggatggatctattctgtacatgttggtagttggggcggtatgcttacccgtttactgacgtttatagcagctttgataggagccaccttgccattgacaggatactatttatggataaaacgtatgtgaggcaaaaagcgctttaccctttcttcgacttgcgatactcccgcggcgacacgcccataatcttgctgaacagccgcgagaaataataagtatcctctatacctatcttatagcatatttgattaattttcatatctgtagaatcgagcatgaaacacgcctcctgtattttcaacaagttgaaataagacaggggcgcatgtccgattttcttcttgaacagcatggagaaatgtgacgacgaatagcctactgcattggctatatcttgcaatgcgatgtgtttctccatattttccttcatataatgtatggctgcttccaccacattgtcgtcgtctatctttgtgtccacggcattgcggtattgctggatatagcgcaaggaccccagatagtagtggaacaaggaggaggcataatgcagattctcattggtaaatcctgccttcagtgtattgaatatctcttcgaagagattgattcggtggctgatacgcgaatgtgcttcgggtttgatgtccataggttgcaaggcattgcgggcatagtatgaagcgagtgtacctttgaagtgtatccagtagattgtccatggcgtagccttgtttgctgcataagcatgcggtacgcttgccggaaggataaagtattgattggcgcagacttgatattcgtgctctccgatgcggtaccatccggctccatctatgcaatagatgaatacgtattggttaatcggctggtttcgttcgcgaaagtgatgctccgctttagggtagtagcctatgtcggtaatgtgaagcgcagcaagcagagggtcttcttctatcatgctgataatcaattggggaaggacgatggccctttctccgtcgaatccatcttttagtttaatcatggcagcgtgtttctttaaggtttagtgcaaatatagaatataaggaagagatagcaaagaaaaagcaaaaaaataagatagtccatgttcttgctgaaaaaatctattttctttcttgtcaatctcctctatctttgtatcatcaataaaccaaatatctaataaaatgaaaagttataataaaagatttgtctattttatctgcctcgtgtctgctatgggcggcctccttttcggatatgactgggtggtgataggaggtgcgaaacctttctatgaactttatttcggcattgccgatgcgcctgccatgcaggggctggctatgagtgtggcattgctgggctgcctgataggggcgacgatggctggcatgatggcggatcgttacgggcgcaaggtgctcctgctcatttcggcattcatattcctcacttcggcttatggtacgggtatggtagacagttttacttggtttcttattgcgcgttttctgggaggaatcggcattggcatcgcttccggactttcacctatgtatatagccgaggtggcgcctgctgcggttcgcggaaagttggtgtcattgaatcaaatgactattgtgcttggcattctgggtgcgcagattacaaactggttgattgccgagcctattccgacggactacactcctgttgatatctgcatgtcatggaacgggcaggccggctggagatggatgttttggggagtggcatttcctgcagcgactttcttgttgctaacggcttttattcccgaaagcccccgttggcttgccatgaaagggaagttggaaaaggcaaagcgggtattgactaaaataggcggagcggactatgcacggcagcaactggaagtgatggagaataatacggactcgcaagagggaggcggattgaagtcattgttcagtccaccttatcggaaggtgcttatattgggtattatagtagccatgttccagcaatggtgcgggacgaatgtcatttttaattatgctcaggaaatattccagtcggcaggttattcgttgggagatgtattgtttaatattgtggtaacgggagttgccaatgtgatattcacttttgttgccatcttcactgtagaccgtttggggcgtcgtgccttgatgctgcttggtgcgggagggctggcaggtatttatcttattttgggtacttgttatttctttcatataagtggtttctttatgatcgtgttggtagtggcggctattgcttgttatgccatgtcgctggggccggtcacctgggtgttgctttccgagatttttcctaatagggtacggggcatcgctatggctacttgtacttttgccctttgggtggcgtgttttacgcttacttatacttttccacttttgaatagtgcattaggcagtagcggcacgttctggatctatgcgtttatctgtggcgcagggtttgttttcttcctctataaattgcctgagaccaaaggaaaatcattggaaacgctggaaaaggaattggtggaacaataatctttttaataataaagaataatcaatcaaaacgatatggtaaaagcttggaaagaacgggttgtaatcccaacctacgaagtaggaaaacctgagaagaatcctatttttttagagaaacgtgtgtatcaaggtagcagcggtgtagtttatccgtatcccgtcattgaatccatttcgaacgagaagacggacaagacatacaatgccgtattcattgaaaacgagtatatcaaagtcatgatcctgcccgaactgggtggccgtgtgcagatggcttatgacaaaataaaacaacgccacttcatctattacaatcacgtcatcaaaccggcattggtaggcttggcaggaccgtggatctccggcggcatcgaatttaactggccgcaacatcaccgccccagtacctatatgccggtagataccaccatagaagagcatgccgatggaagcgtgacggtatgggtaagcgaaatggaacgcatgttccaccagaagggcatggcaggcttcacccttcgcccgggacatgcttttcttgaaataaaaggagtgctttataaccgtacagaggtgccgcagaccttcctgtggtgggcgaatcccgctgtcgcagtaaacgattattatcaaagtgtattcccgcccgatatcaatgcggtcttcgaccacggaaagcgtgccgtatccagcttccccatcgctacgggcacttattataagatggactattcggcaggtgtcgatatttccaactacaaaaatataaaggtgcccacttcctatatggcagttaactctcgtttcaacttcgaaggagggtatgaaaatgatacccgtgcaggtatgctccatgtggcaagccatcacgtatctccgggcaaaaaacaatggacttggggaaacggcgactttggtcgggcttgggatcgtaacctgacggacgaggatggtccgtatatcgaactgatggcaggagtatatacggagaatcaaccggatttcagttggctgcaaccttacgaagaaaagagttttgtgcaatatttcctgccttaccgtgaactgggcgtggtgaagaatgccagcaaagacctgttgatgaatattgaaccggaaggagaagaatctgtccgtttcaaagtatttgctacttcctgtcaaacggtaaatgtggcgttgcggggagaaagtggcaaagtgtatttcagcaaagaagttaccattacgccggaagaactgctggatgaagtggttaatgtagaaggagagatattcaataaattgagtttggaaatcacagcgagtggcagggaactactttactggcatgctgaaccggaagaggttaaacccatccccgatgctgccgaagctgccttgttgccttccgaaattaaaaccactgaacagctctacctcaccggtctgcatttggagcaataccgccacgccacttacaattcggtggattactacgaagaagccttgcgccgcgatcccatagatgttcgcaataacaatgctttgggtctgtggtatattcgtaagggccgtttctgcaaagcggaacaatatttgcggacagcggtaaaaacacttcaaaaacgtaatcctaatccgtatgacggtgaacctatttataacttaggcttggcgcttaaatatcaaggacgttatcaggaagcttataatcatttctataaatcttgttggaatgcagcttggcaagatgcagggtattttgcttgtgctcagatttctaccatacagggacgtatggaagacgctttggatgaagtggaccgttctcttattcgcaattggcataatcacaaggcacgtgcactaaaaacagccattcttcgtcgaatgggtaggaaagaggaagccttgcaacttattaaagattcattggccatcgataaatttaatttcggttgccactatgaacgctatttaatcagtaagcaatcggaagatttgaatatcttgaaagaactcatgcgctgcgagcctcacaactatgatgagatcgcactggattactgcgcttccggttgttgggaagaagcggtttctttgtggcaggtggctatttccgaagaagctgttactccgatgacctattattatttaggctggtgtcttgcccaaggaggattatctggagtgaaacaagcatttgatgatgcaatcaaagtctgtcccgattattgtttccccaaccgtctggaagctattcttgctttgcaatgcgctatggaatgcaatccgaaggatgccagagcgccttattatttaggtaatttatattacgacaagcgtcagtatgatttagctatgaaagcatgggaaacttcggcgaagttggatggccgtttccctaccgtatggcgcaatctcgccttggcatatttcaataagaaaggaatggtagagaaagccattgagtgtatggagtatgctttcgagctggataccacagatgcgcgtattctgatggagctggaccaactttacaaacgtgtgcagcgttctcataacgaacgtctggctttcctgcaaaaatatcccgaactgatcgctcaacgcgatgacctcgtattggaagaaatcacgttgttgaatcagaccggagcctatgaaaaggcaaagactttgctcgacgctcatattttccacccgtgggaaggaggtgaaggtaaagtgccgggacaatatcagtttgctcgtgtggaacttgccaagcaggcattagacgcaggaaattatcggaaggcaatcgcatatttggaagagtgtctggtctatccacatcatttaggtgaaggcaaattgtatggtacacaagaaaatgatttctattacttcttgggatgtgcttatgatggattaggtgagagccgaaaagcgaaggaatgttgggaacaggctattgggggacctgtcgaaccggcagctgctctgtattataacgatgccaagccagataagatattttaccaagggcttgccctgctgaggctgggtcgcacggatgaggcaaatgggcgttttcaccgtttgatttcgtacggagagaaacatctgtttgataaagtgaagatggattactttgctgtgtctttgcctgatttactgatttgggaagatgacttggatgtgcgaaataaggtgcattgtaaatatatgatagcgttgggctatcaaggactgaatcggccggaaaaagctttgcggctgttgaaagagatagagttgcaggattgtaatcatcaaggcattcaggcttttcgcagtttgattgaatgtaaaagtagaaaataattaatcagtgtgttactatgaaaagaaaccatgttctgaagtattatttggcattgggggtattggtgctgtgtaactccctaagctatgcgcagcagattgacctgtcaggcaattggcgatttgccattgacagagaagaaaccggaattgttgatcagtggtatatgcaaacattgagggagcaggtgcagttacctggctctatgctgaccaatgggaaaggagaccctgtcggacttcagactcagtggactggcagtttgtttgataagtctttctttgaacaggagaaatatgagcgttatcgcaaagaagataactttaaagttcctttttggctgcaaccgaataagtgttatacgggtgtggcatggtatcagcgtgacattgatattccagtaacatggaaagataaggttattcgtttgttttttgaacgttgccattgggaaagccgcgtatggattgacgaggtggaagtaggaatgcggaatgcgttgagtgcacctcaggaatatgacttgaccggtttcctaaaacccggaaaacatgtcatctctattcgcgtggataataaggtaagaagcattgatcccggtgaaaattcgcatagcatctcagaccatacacaaggcaactggaatggtatagtaggtgctatgtatttggaggctaaatcgaagatccattatagccatgtcgccgtttttccctctttgtccgaacgtaaaatggcggtcagggtaaagataaacaatgcggaaacaaagcggaagaaagtggatctgattttccgcctagagggaaacgaaacagtggaacagcggatattgcatcccggagagaataaattggagctggtgctacctttaccggagcatatagattattgggatgaattccaccccaatctctataccttatattatacgttacgttctaagaaaacagatttggatacacagcagcttacctttggttgccgagactggtcggttaaagaaggggtattgcatctgaacgggcatcctgcgtttatgcgtggaactttacattgtgcggcatttccgctgacaggttatccttccactgataaggcaggatggttgcgtgagtttcgtatctgtaagaaccatggcatcaaccacatccgtttccactcctggtgtccgcccgaagcggctttcgaggcagcggatgaattaggattgtattgtcaggtggaatgttcttcttgggcaaatcagtcaagtgccgtaggcgatggcaagccggtagatgcttttttgttggctgaggccggacatatcgtacaggcttatggcagtcacccttctttttgtatgttggcttatggtaatgaacctgccgggaaaaatcagaataaatacttaagcgattttgtttcttattggaaaactcacgacggacgccatctatacacttcggctgccggatggcctaacttgcccgagaatgatttcttaagtgactccgaaccgcgtattcagcattgggaacaagggctgggaagtattctgaatgccagggagccttccacagattatgattggcgtggatatacctcaaagtttacacagccgtttatcagtcatgaaataggtcagtggtgtgtttatcctaatttgaaggaaatgcagaaatatacgggagtctatcgtcccagaaattttgagatattccaagagagtttgattgaaaacggattgggtgcattggcggacagttttctgattgcgtcagggaaattgcagacattatgttataaggctgacatagaggctgccttgcgtactcccgattttggtggattccagttattgggattgaatgattttccggggcaggggacagcactggtcggaacattggatgctttttgggaagagaaaggctatgtgactcccgaagaatatactcggttctgcaacagcattgttccgctggcccgtatgcctaagttgatatacgagaacgatgaagtgtttatggcacacatagaagtggctaattatcgagaagaacttcggcaacctgacatccggtggacagtaagagatacatctcatagaatatggcggcaaggaacttttccgggtaggaaaatatccattggaaattgtcagaagttgggagatattcaattgatgctggatgatataaagcaaccttgccggttgaatctggaagtttctattgcgggacgcaagaatgactggaacttttgggtatatccggcgcggaagaaaacggatgatgatggactcttgtttacagatcgtttggataagtctgccatcgcctgcctgcatgcgggaggaaaggtgctactgtctttgaagaaaggttctttggcaaaagagtttggtggcgatatagctatcggcttctccagtattttttggaatacttcatggacaaatgggcaggctccacatactttaggcattttatgtaatccggcgcatccggccttggcggaatttcctactgaattttatagcgactatcagtggtgggatgccatgagtcattccggagcgatacaggtaggtaagttgtcgaaggaggtttgtcccattgtccgagttattgatgactggtttaccaaccgttcacttgccttgctgtttgaggtgaaggtaggctccggtaaattacttgtttcggggattgattttcatcaggagatggaaaaccgtccttctgctcgccagttattgtttagtttgaaaaaatatatgcaaagtgatgctttccgtcctgttatatcggcaaccccggaaatgataaataatttgataaacagataagaatatgaaacagcagtggataaataagcttgcaatctcagtactttctctatggagtgctttttccgtacaggctcaaaatgtatatgagatttctgtccccaaagtcagtaaaaagatatataccgggcatttaaagttgggaggtacttcttctgtaggagggagtattgaagtaaacagtttctatatgtctcaaaacgggcaacctatacttcccgtaatgggagaatttcattattgtcgctttcctgtcgaccaatgggaggaagctatcttaaaaatgaaggcaggtggattgaccataattcctacttatgttttttggaatgtacacgaggagaaagagggagtgtttgattggtcaggaaataagaatttgcgtagatttgttggattatgccagaagcatgatatgtcggtggtcgtgcgtatcggcccgttctgccacggtgaaatacggaatggaggtctgccggattggctgtttgcacaaccgctggaagtacgttccaatgatgcgaactatctgaaacatgtagagcgtttatataaagagatagcttcccagttacaaggactatattacaaagatggcggtcccgttataggtatccagatagagaatgaacatcaacattcggcggctccttgggctatctgttatcctggtgagagaaagaatatgacatctgccacttatgactcctccatcacaatgattggagtgagtgtgcagaataagaagattactacagcggaactgggcgatttgcacatgcgtacgctgaaggaaatggcggaaaaggcaggcatgattactcctttgtatacggctaccggttggggaaatgcggcagtaataggtaatgaagccattccggtaacggctgcctatacttatcctttctgggcaaaaccgtttatgtcaccattctgtcttttcaaggatatacagcgtaatcccgattatgcgccagtgcggtatgacacggagaaatatccttctttctgtgcagagatgggtgtgggcatccaaatgatttattcccgtcgtcccatagtgaaggccgaagcggcagaagcattgatggtacgtacattggggagcggtgcgaatggcatcggttattatatgtatcatggcggttctactccgaaacaaagtaatggagtaggtttctttagtgatgaagtaatgggagttcccaaaatttcttatgatttccaagcgccgattggcgaatttggcttggtacgtgattcttaccggaacttacggattcttcatactttcttgaaagattttggttccgtactggctcctatggaaaccattcttccggaaggttatgaacggattacgccggataaccgcgaaacattgcgatatgccgtccgtatgaaggatgattcgggctttgtctttatgactaacttccaggaccatgatacagcccgccttgaccagaccgatttacaattgagactgaatttgcagaaggaaagcctgtcgattcctgccaagggaacatttacactaaaaaaggatgaaagcgtgattctgcctttcaatttgcggatgggagatgttgtgctgaaatatgctacagcccagttgttgactaaaatagaagaaaacggcaacgaccattatttcttctttgctcccgaaggctttatgcctgagtatacttttgacaaaagcacggtgaaatcaggaaacgctttctatacgcccgaaccaggtataaagagcacttttactctgactactaaaacaggaaagaagttgaaaatcacaacattgacacgtgagcaggcacttcatgccacgaaaataaacaatcatattcttattacccgtgccactgttttgccggaaaaggataaatgtaccttattgtggttgggtgagaatcgtattgactatattctttatccttcgcgcgcaggctggaaatcgcagattgccgaggtagagccggtaagtgtgaaagccgattggaaaaaagtgggggcacgcagaatgactgtgcgcattgaccagccttccatgccacaagtaaatgaatatttcttgcgtatccattatgtaggagacgtggctatggcatttattgatggggctatggtactcgaccatttttactatggtgctccctggactatcggtctgaagcgttttcaacgcgaactaaaagaacatgatatgagtttttacttccgccctttaaggaagaatgctcctttcttgatggatcttcccaaagaggcgacacccgatttcagtaggcagggggctaactgccagattaaggatataaaagtaattcccgaatataaaacgattatcaacttttaggtaatgtggaatgatggggttgtccctactttttggggacagccccttgtttatcggtattatctttttgtgccatcgatataaccattcataagaaaataacttctttgataacaggtacttgtttattctattcagcaagtcaaaaaattatccgcttatttgattggtgagtgttgcattaacataagagcacaagcaaggctcccatgttactttataccatctaggtatccatatttatttcttaaacaataaaggtaagaactccttcaaacaacgacgccaggtgagccactcgtgggctgtacccggagattcgtaaaaggtatttttaatgccaagagcagttaatgtttcgctcatcttctgtgcgctgaagttttcttcgctgccaatgccgatgaatagtgtgcggacctttttattgaatgccttgctgtcggcaaatacaccattataggctgtttcataatccccatcacgtaaaaaaatggcaccactgaacgaaccgatataagcaaacttgtcgaggttgtacaatgtagtcataaaggtttgatgcccaccccatgaaagaccggccatagctcggttctctctatcggtcagcgtacggaattgcttttctatattcggaataatatcttgcaacaggatggatggaaaagtggagccgaatgcctctcttgccttgtttacattttctcctttcttgggcttgaaaggaatgctgcaattgcccttgtccattacgaccagcatgggctcgcactctccagtagcaatcaggttatcaagaataaagttcaccttaccttgcatcgaccagcttgtctcgtcttcgcacataccatgttgcaggtaaagcaccggataacgtttctttcccgaaatctcgtactccgctggtgtatagacatgacaccgacgatattgtttctccacggtagaataataaaccaccgaacgaatttgtccatgcgccatctcctgtggacggtagtagtccccttccgtcccttcgggtatttcgatggcactggagcgtccatagctgccaccatacgtataagtctctatgtctgtcaccgtcatgccatctaccatatagtgataaaaatgaagtccaacgaccaaaggagaagtggtgacataccaccatccgtcgttatcctttgtcatgtcatatcgctttccgcatactaggtatacctcctgcgccttgggagcatagaggcggaagtaacctcgcttctgtttgtcaacacgaggatattctctctcaaaaagggctgtttccgaaaccattgtattttcgggtatcggtctttgtgcatacatgctggaagcaatcaacaaagttgtcaacagcgtccataaaaattttatcttcatattatttataggattattaattatcagcaagtgccttcgaaagctttggataaatactcatatacttagttgtccttccatccttgtcaaacagtccgccccacataggtgaagtggcttcccaaatgaaagtacctaagcccaatccgtgaggaatacgtgagacaatttcatttacttcctttcggaattcttgatattctaccactacaataggttttctgtagcggatggctaaatcgttcaagttgctttccaactctttcaacgttccatgatgctttggatagtaagactgcccgatgatgtcaaacttaacatcacgactgatgattttatcgaagaacttcaccgatttttcattttgtccgccacaagcaatgtgaatcataatcttaatatcaggattagcggcgcgtacaccggccgtagcacatcgcaacagaacgacaaagggttcatacgtctccgttatcttaccctgtggccacatcatgccattatttatttcattacccacttgcaccatgtcaggacagacgccttcggccatgaaacgtttgatgacttcgtttgaatagctataaacctttccttccagtgcagagccatggatgttactccatgatgcgggtgttgcctgttggccaggatcggcccatgtatcgctgtagtggaaatcgagcaggaatttcatgccaacagcctttatacgcttggccatggatagagtggattccaacccacaaaaaccatctttggaatatcccttttctgtcgtagggtccacaaaaagacgcagacgaatccagttgaacccgttctctttcaggattttcagtgcatccttctgcgcaccgttgtgagagaagacaatgccacgttgttcctgattgggaagccaagagatatccgcaccgattatgggtttctgaatggtatccgtatttacataaggaggttcataaacgggttgggcatcactctttatgtattgtttgtacaaggcatcatatatgccgaacagatccttatcagcatttccttccttatcgaacaagaccctcgtcggttcccatgccatagttccataacccaatccgttgggcagggagcgtacaatatcattgatcatcttaatgttttccttattggcaccatactcgcaaacacatatcggcttccgataccgttcggtcagatcatagagattggaccttaaatcattgtaagtctcgtgccattgttcgtaataagagagtccgatgatatcaaattcggcttccatctgaatcatacgatccaggaactcacggcaaagccggttctgcccacccaaggcgagatgtacttgcagtttcgattccggtaatacctcacgaaccgcacgctggcctgctttgtaaagttccatcaacgaccgccagttttcttcggtagcattgtcatccaacttgccctctggccataccatgccgtgatttatctcattacctatctgcactatctccggagccacctctgcctgcttcaaagcaaccaacacatctttggtataggagtagagtttttcttctagctccgcaccagttgttccttcccaagcggaaggcttgaactgcttgtctggatcagtccatgtatcgctatagtgtaggtcgagagcaaacgtcatgcctgctttcttgatacgacgggccatggcaagagtatgctccaaatcacaatatcctttttcgggagcgtatccttcttgggcttccggattgacaaagacacacaagcgaatggtgttgaagtgatgggcggccatgatttggcaaatatccatttctttcccatctacatttttataggcagttcctccttcttcgttttggggaacgaacgaaatgtctgccccgatgcaataaggctgttgtttacttgtgcaaccagtcagcagaagaatagtatagcagagcatactaaccaaataatgcgtaattttcttcatggttctataatttaaaagattaataaatgcaaggacatgttttctaactgacaaaattagatagaacatacccttttgttcagaccaaatagaacattctataacacaaaaaggacaatgccgaagtttacccatcggacatttttctcatccgggaaaaaatgcgttaatttgctcttagtaaacaaataaccttatgaagattttaactttaatactacttatctgctccattacctgtcacctgcgggcagacaatctgtccaatttgaatggaggcttcaataatctgggttcaaaaaccaagacactatcagtaagatgttttacgcaagactccacaggcatggtctggttcggtacttcacgcgggctgtatagttacgatggctatgacatacgccattatgtttcagacatgcttccctcacatcaactcatcaaatgcaattttatccatcacaaagttatgcttttaggcggagaaaatggcattattttatttaatttacaaaacggacagttcagcaagcctaatattcggttaaacgagtcaataagttctttttgtgaatataagggtgaaatctggattggagcagaatcgggactctatatttataatgtagaacaagatgaactgcggcccgcccttatccgcggaaaggattttccacgcaacatccaatcgcttgccaccgaccaaaagaatctgtacattggcatgaaggacgaagtggggtgctactcatttgccaccagcgattaccaagttatctcccaccctgagtttttctacatttctaccttgatgttggatagctctgaaaacacattgtggataggtaatgcccgtcatctgcatcgcatgaacctagataccaaggaaatcgaacgcgtcagagatttttatgtcgtgaagagtattgctaaagatgataataatctgcttataggaacagacaacggactctacgtatgcgacagacagggcacttggcatctgatttcacacgatgcacgaaacagtcaatccctgtccagcaacgtagtcaatatgttcttcaaggatgctaatggtaatatttggataggaaccgacaatggcatctccttagccacacacaatccttccgtccaatcccgttcgttgttcgacatcactggttccgatgaaggttgccagatatccagcatacagcgcacggctgacagtactctttggctgggtggaagccgagggctgataaaattaaaaacagacatgcagggcaacaatatccgtcggtggtaccaaatgagttccaaagaatcttcccttccgcacaaccgtatacgtgcactctatgaagacagccgccaatacctatgggtagcctcagacggaggattactacgctataatccgacgaacgaacagttcatctcttacttcttcgatgatctcaaaaattgggtgtacgatatattagaaacgcccaatggtgacttgtggttggctactttttgcggtgtttatggcatctctagcgaacaatcccttggagggggcattctgaagaccaaataccattttacccatgatcaagggctttacagtaacgatatctaccaattagcattggaccgagaaaacaatctgtgggcattatccaataaccatcatatcgaccgcatcaacttgacaaccggcactatactccccatagagaagataactggcattccccacattgactcctacgctgtcatcagcgattcggaaggaaatatctggataagcacttcagacaatctgctgaaactatcggtaaacaaaggaaacatcagcacacaaagtatcccgttgagccgtgtactgtctaccgaagtattcgccatggatgagggggagaatgagatatggctcacgacctccgaaggactctttatagtggagaaggaaagtttgaaagtacaccgcatccgtatttcggaaaagtacattgacatcttctatgaccgaattgatcacaaggtatggttgggaacgagtaataagataactcagatagatcccatactgctgaggcaagagatacaacaatcccagaaagtaaagattaccgatattgaaattaatagcaatgaggaactaagctataccgaccgacaaagcaagcacatccagcttactgcgaaacagaacaacttgagaatttctttctccgactatcagtataaaggcgaaagcttgacaaactatgctttcaaactcgatggatatcattcacaatggatagaactgaataggaacgaaaactccattgcactccctaatctttcacctggagactataccttatacataggttccttggaaaacatctcagacaataagcagacagaagccattctgcacatcatcattacaccgccttggtatctttcttggtatgcctatctcttttacctcttggtagtcattggcattgtttggtggatactgcgcttcatcattatcagacagcaactgcgcaaagaacgggaattgaaaaatcatctcatggaacaagccaagtcaaatatagattttttcacgaacattgcccatgaattcaaatctcccctaagtctcattattgctccttccagcaagctgttaagtgaagagaccgaaaaagaaaagaaagcattgttggaattaatatacgaaaatgccaaaaaactgggttcgcttatccatttcactattgaagcgtatcaagacagagaaaagataaagcaaaccttcattccgaccgaaatagagttcgtagaattcgcgcgctgcatcttcaattcttatcgagagaatataaagagcaagcagctggattttgttttcgatactaatcgagagaacatttatactcgtatggacatctttaaaatggaatccatcctgaacaacctgctgaccaatgcatgcaagtttaccccaaagcatggcagcatcatgctctctctggagtataacgaacaggacaaacatctctatgttaaggtggcagatacgggagtgggcatcccagaagaggagattcccctcgtgttccaacgttactaccaatcctcgcgcactatcaaaaatgacaaagagggtaccggcatagggcttgccatcgtaaaggaatatgtagagatgcataacggtaccgtgcttctcacatccgattccaacggaaccaccgtccaattaacatttcccatcaacatagacattcaagagcaagaggaaatcattgaaaagcctaccacaacagaaaacaaagaagatacacgtccgctgattgccatcgtagaggacaacacctctattcccagttttataagcaatctgctaagtacagattatcgatgcattacagcccaaaatgggaaaaacggtctgcaacttagcattaatctcttacccgatcttatcattgccgatgtgatgatgcctgtaatggatggtatagaaatgtgccgcaacatccgcgaacacatgccgcttgccactgttcccattattcttctgacagccaagaatgactccagtattgaatatcaaagtgcccaattaggcatagatgcttttattgcaaagccgttcgatagttcgcttcttgttgcacgcatcaagcaattgcttggaaacaaaaaaagattggagcaacagatgcgcattgaacatatcaaacaacccgaactaaagggcgaaatatccatcgatgaaaggctgttattccgaattaccactatcatcgaagagcatatagacaattccgacctctcggtagagatgctaagtcggctcatgggcatatcgcagaaacagctttacaggaagttaaagtctctcaccggcatgtctacagtggaatatattcgttccattcgtctgaaaaaagccgccttactattccaaaatggaaaattctccgtggcagaagttatgtatatggtaggtttttccaatgcttcttacttcacccgttgcttcgtggcagaatttggcaagacaccgatggagtacttggggatgaaacaagaataaggttttactcctatatccatacctagaacatcattagttgcttggcatgtgcagcgtacatgttgagattgccaggtttacatgcttagcatgtttcgggttacacattagtacgtgttggcttacactatcgcaggcattgggctataccaaagcacgtgtgtaggcctgtctgtgaagcagtatacatcttacacgtgaagctgtatactgcttacaaaacaccctctatctgttagaacccacgctctcccgccatcctttcattttatttcaaccccttggatttaaagtcacattccgggaaatttttcttgcgccagccggcatcaagaaagaatctggatgcttctttcttacccttcagctgccaatcgagccacatcaatgctaccttacccaatacgccaccttcgggttgtttgtaggttccggcatgccccacagggaagttcaccgaaaccaccggtacatgattgatggattcgaaatcgatattggcattgctgtaagctatatcctcaggtcctccgatgaggtaaatcaccggcttatgatactgcttcaggctattggcattagcatgtgccatttcaatattgcccataccggcattaagtaccatcgtagtggagacacgcggatcgtaagaaacggaaatggcctgtgcgcctccacaagagtgtccgcccacagcaatcttgaagcggtcaatcatctgatagaattcactgccggaagtggaagattgcctgcaaacccaatcaacagcatctagcaggttatcatccatatcgctgactgtgatatctccgtctactgcacctaccgagataactacatagccgttcttcaccatctcgataaacatcggctgataatcgcctgaatagtgcgtacaggcaccgttgccatgaatgtataccggcaaccgtccctgcttggccaccgtctccttcagattggtaggatagaaaatactgaatccaggaagagtgctggcgtcaatcataatgccgggatacttctcactctctttcttgtctttaaacaacttcttataagtctcggccagacaataacgggcatgcatccaagtgtgtgctccctcacggtcgtctatctcgtaatggatgcccttttcattgaaatacttcgtattgctgataacttccttgtagagaatatcatctttgcctacacaaaaccacagcatgttcaggctattggccttttctttcaggttaggaaaatatttttccatcacttgcggagtgaggtaagcgctatacgaccccatccaaccaatccggtcggcatgcttcagagcagtaaacatggattgtccgccgccacgtgaaaagccggcaatggcacgatggtcgcggtcgtttatcgtacggaagttctgttccacataaggtatgacgcactccgtcaattcgcgggcaaaggtgttgtacatttcaccggcctccaaggtgtgaggacggggcgtaccgccgttcatataaccataaggcattaccacaatcatcggctcagcttgtccgcgagcaatgaggttgtccaaaatcgtgttggcgcgtcccgtcttgtaccatgactcttccgaatcggtcgttccgctcactaaatagaataccggatattttttgccggcagaaaggtcatattcagcaggagtatagatcactaccgtgcgatactgctgcaacacgtgcgaacgataagtacaatagtgcactttgccgtgaggcaccggattgatagtatacaaagcatcgggatcgggcatctccagcaaactggatttgaaagcatcggtaggtgaaagtagtttattacccgggtcgttcagacgcgttccgtccacaataaagttataaggataaatatccgccttttcgggtttcactgtcacactccatacacctttgttatcctttatcaagggaatatctcccaccataaactgtccgttcaccaatacacttttggcataaggagcatagtagcgaaatgttacagagccgtcatcgctcacaatgggcgaagtaagcgtgccgtactgggcactcaaagttgcgcaacagcacaaaatgcacaaccacacaatcagttttttcttattcatagtaaatcagttttaaaattatcaataaacttggagacaaatgtaacagttctctaatcataagcgatgaagatttagaacagatgatgacactaaacagacttcctgtttataatccgttgtttctgcttgaatttgtgttatctatattgtattttcgcaccataaaagaacaattattatgatgaaacgaatacttcttggattattgtgcgcttcaatgagcctatgtgctgttgcacaaaacagagtgacaaaagtcttgatacccggtgcgagaggtctgcttgctgcagaagtccaaatgcccgaaaataagggaacagggaaatgccctatagccattcttgcccacgggttcggaggagacaaaaactggcaattaatgaaattggtatcagactctcttcagatgcatggcattgcctctatccggttcgactttaatgggcatggggagagtgaaggcgactttaaggatatgacagttcccaacgagatagaagatctgaaacatgtcgtacgctatgctctgcaattagatgagtgcagcggcaagataggactgcttggccattcgcaaggaggcgtagtggtaagtatgacagcaggtgaaatgaacgacaccatttcggcggtcattcttctggcaccggcagcagtgttgcgtgaagatgccatacggggaaatacattcggggtgctatacaaccccattaatccgcccgaatatgtcaagcttcccggcggccgcaaattaggtagggagtatattctgacagctttccgtctgcccatttatgaaacagccattcgttaccaaggagcagcctctcttattcacggcacaggagaccgtgtggctccctattcctatagtgagcgttacaaaaacatctggaagaacagcgagctgcatctcatggaagaatacgaccatggattctcccgacatatcgaagagattgccgatttagcctcgaattttcttataaagcatttgctatgaaagagatattgacactaatcatttttataagtaatgtctttcaggtcgaaaatgattcggttcttgtcaatatggccaatttttctggttatgcagaaggtgaatattttaaaggagacatcctgccgggagctgtggatacgcagactgtcctgcccggtggaagtacccatctctctgcacgctacatgctgaaaggtattgatcaaaatgaagacagctgccatatttatataaacaatgaagtgacaagcgacacccccaaaggatacactcaacctaccattgttacagacagtagactgttatcttcattgattaccggcaaacttgtcggcaagatggacacaacaggaggcggttttaagattcggatttttgtatcaggaaaatagccgtgcatgtccggtataggaccataaaaggggctgtccatttgccggatagcccctttcccattaaacaatctttaccactgacccgtcggtctttatcctgctttatctttgaggcccgtcgtaatcgggtctcgtgaagtactgcgttaaagtatatcccatatcagcagcctgatctactgcatagttgggaatagggaagtactgtgatgtcggtgtgcagccaatcgcatccatgatagtccagtacttgttgaatcggataaggtctatacggcgatggccttcgtagtaaaactcatgacctctttcctccaacagggcatctaagaaagcattgactgatgtagttttctctgccggaaggtctgccaaccctgcacggtggcgtacctgattgacacaatcgatagcagaagtggaaaccgttttattcagacggacgtcggcttcggcatacatcagcaatacgtctgcccaacgggccaacggataatcggtactttggaaagctgtttccgtttcaatgggatacttgttcaaaatgtaaccgtcccatctcacaccgatatcttcctttgtcacccagccataccaagcactgtaataggaagtaaggataccctctttacgcatgtcgttctcctcgaatgtttcataaaactgaggatctacattgtagtattgtccccagcctccaccttgattgacgaacggggtgggattccctttttcgtcatacttggatgcatcgtagggaagcaagtaccaagataaggggttaaagtttcctcgcttaccgctaccatcggcatccgaaccacaagatacagccataatggtttcacagttaaactcattggctatcttgaactggtctaggtaaggattctcgcctgaagtgaaaagcgagtaagagccggtaaactgatggtagaggttgtaggccttctgataatatccatccatgtgtgcaccttcgcacaggtaatggcgcatcagacagaaacgggcataatcggccgtgtagcgtcccacttccgattgtgtctctaccatgtgctcagtagcatactccaaatcggctgtgatatattctgtcatttcgtccaacgtaggacgtaccatttttttctctgcttcaagatcgcctaccagcatcggatcaaggataaccggcacaggaccgtagaagtgaagcagataaaacatcgttaagccacgcaggagacgagattcagccaccaactcctgttttttcttatcagaaagaacagtactctcttccaaggtgcctataatcttcgtcatacgggtaatatcgcgtaccttgtcaaagtgggaaggcaaaatattactataagtactggcatacttcatgtcctcaaactggccttgtgccatatagatgcaagggccaccccatgaaccgcccaaggtccaaggtgcacagatatcagagggcgtgtcgagcatacggttaatgccgccttcggccacgtagaagttgtgctggttgctgctaccccagttataagtccaagtcaaggtgaaagggatgtagcaatccatcatgtagctttcatagtctgcttccgactgaggaaaatttgttgtagagagcgaaccatatatcttggcatcaaaattattttcacacccgaatactgtgagtatgcaggcaagaagcgagagatgaatatatttcttcataatagtatgttattaaaattagaatgataatttggtacctaaagagaatgtacgtgtctgcggatattcagctttaccgcccttgtaattgccacctgtattcacttcgggatcgagaccagtgtagccggtgaaagtaaaaggattttgaacatctacataaactctgatgccgctgagaagcttactcaatgtgcccaattggttcggtttaaagttatatcccagtgtgatgttgcgtacacggacaaatgaggaattttcgtaaccgatatctgttccggcaccaccgggcaaagatacagaagccatctcatacgcaatgcccggaatggtaccattaggattcagctcagagtgccatacatccttgatgtagacggacatgttgttcgtctgattgcccaatcctctaccgcttgtccaagaatatacatcgttgtacttgtcaacacccagttgcgagtaaatgaaaacatccagatcccagttcttgtaagtgaacgtgttgccgagtccccagtagagagaaggaatcacgtttttcatatccacgtcttccacggtaatctgtccatcaccgttcaaatctacgataataggacaacctggcttttggtatgcttccggttgataagaaggcatgttgctcttgtctaagtttacaagaccgttcgtacgatagtagtatctggcatttacaggctcgtccttacgtatctggtattcgttgtaggtatgattaggcatacgttccttccagatagcgttagtgtgggacaaggtcagtatggaagtccacttaaagtcctttgttgtgatattgaccgtattcaaggtggcatcccaaccatagcggcggatatgtgcaccgttgatgggataagaaccaaacatggaaaggccgtttgaattggcataacccagcatatccgtaatgtcgttccagaagtagtcaaagctaccgcttaccctatcgttcaacagagaaaagtccaatccgatgttcttcattaccgttttttcccaagtcacatcaggataatcctggctcttcaagtaataggggatgtattttacagagttttcgttaaacataacatgagtgccaaaggcatcgtacgaaccatggagcgaggaacccaaattgtcattacctgtcactccataagaggctctcaatttcagcaagttcacccattctacccttttcatgaactcttcgttgaaaatcttccacgctacagatacagaagggaaccagcaatatttcttgcctttgaaaaatttgtcagtaccatcgcgacgtagagtacctgctatcacatacctgtcgaacaggtcgaagctggcgcgtgcaaattgcgaacgtttttcgtcctctctatggtaagaggtgggcgtaaatgttccagctgctgcaccaatgttatcattagccagaatgtcgttattgtccgtatagcttacggccataccggtatatttgttcaagtagcgccccatacccacaacggcatccatacggaaattctcgccaaatgccttgttaaagttgatggtaccctctatggtagtgttgtatcgttcgttacggtttacggcacctctcgatttatacatttggtcaaagtagatatccgaaggaatatagacgttgcgctctgaattttcgttattatagccgaacaggaacttggcagccaacatgtttttaatgatatctacatcaatggtgaagttcacattgtatccattgttcttggactcgttctgcatatcttccatagccacggggttaggaatgatcttgaaaagcgtatagttgccgttctcatcacgtaccggcatgttgggcaggtaggacatggcagctgccaaagcaccggacgcctgctcgccgcgactattggaagcaccacccaccgtaccgttctggtagatgttacggttaatattgaaagccgtagtcaacttcaagaagctggtaagctgtgcggaaacattggagcgcaaagtgaaacgttccatttcagaattagagacagatccaatctgttgaatgtagttaccggagaggtagtagtttaatgtttttgttcctccttgcactgtgatattgtgtctggatatactgccgtccttcagtacaaggtcacgccaattcgtggttttcgctgaagcgatatcgctgtctgagaaaacatcgggaaaaccgttatcatatggagtagagccgtaagctcccatgttatggtcgtgcatatactgctcacggccgaaggcattcacatatttcatataggaaggagcatcgagcatatccagatatggatagttctttatcaacgacacgttaccgtcgtaagtcactttcaccttaccttctttacccttcttcgttgtaattaataccacaccattggccgcaccgataccatagatagaggcagaagcatctttcaaaacttcaatggactcaatgtcttcggggttcagaccagccaaaccagaacggttcacactggagggcattacagtagtactgccgccactgtcaccttccaacgcagatcctggcataaccataccgtctaccacgtagataggttcacctgcaccacgaatcgaaatattgatgccaccacccggctgagcactggccaccgttgcctgcaaaccggctgcacgtcccagcaacatttgcgacatgttgctggtagcggccttattcacctcatcggcttttactttgacaatggaagttgtcagatttttcttagatacggcaccataaccggttacaatcacctcgtcaagcaacttcgtatcttcttttaatacgattgcataagccttgtcctctgtaacctgtatccgcttgggcgcatagcctacataagagatctcaatggtggctctcttaggcacatccaatacgaagttaccatcataatcgctgatggtaccaatcgtgctatccactaccttgatagcagctccgataatggcttcctctgcttcatcggttactctaccggttactttcacattctgtgcgaatatattgatcacacagaacagacaaagggccattaacgaataggttcttcttagaaaagattgttttgcatcatgcaaaagtcgaaaagattgaatttcgcttttgccaagcattctttgttcgttcatagcttaaattaatttggttaataattaatgttcaatgagtgcaaatgtaattatcctaaggatattgtaaatggagattcaggacagatgctaacacaaaaaagacaccatcaaagaaatctaaaaggtggaaaaagatggaaattatgtgctataaattgtccattggatacgattccaatgtagaaaaaacaagtatgtttgcgaacgtatcaaaaacttatgtatcatgaaaagaatatttgttttagttttgtttgcatggagtctgcttattgcacttcaagctcaagagttggtctttcaagacaaagacggcatagttcgctggaaaaaagacaatcaggaagtggcattgttcggtgccaattattgtctgccctcatcatgcgactaccgtgcggcaggctatgtaaacgccgaccgcaaagcgatggttcgcgaagacatggatcattttaaacgcatgggatgggatgccttgcgcgtctgcttttggggagattttcagaattccgatcctgacgggcatctgatagacaacgaccacttgaacatgatggattatctcattgccgaagccagcaaacgaggcatctacatgcttttctcgcccattgtgacgtacgattcacagttccccgaaatgaatgacaactccaataccggctatgccaaactttttgccaagaacacattgatacacgatgaaaaagcaattaagtgtcagataaactatatgacggacatcttaaaccatatcaaccgctacacaggacgttgcatcaaggacgaaccgaatatcatctatgtagaaattatcaacgaacccacacagtttcccaatgatattccaggcatggtgaaatacatcaaccgcatgtgtaaagctatcaaggacaccggatgtaaaaagttgatatactacaatttgagccagaacttcgatgtagcgccagccattcagaaatccatggtagacggagctacctacgcctggtatccacaagcgctgaacaacggacaccgtttcatggacaacggacttcactttgtagacagatatgagccactggtagaagatgggctgaaaggcaagagccgcctcgtgtacgaatttgatgcaacggacacggagaacggctatctgttgcctgccatgacacgcgagtatagacgcggaggcatacagtttgcaaccatgttctcttacgacgaacatcaaacagcttcacgtaatttaagctggcaaacacatttcctgaatatggtatacactccagccaaagctatcggcggtatgatttctgctcaggtgatgaagcgcatacctagaggcaagcactatggatattatccgcagaataacaacttcgatgactttaaagtggatttttatcaagatttgggacaactgaatgccgaagatatgttctactattccaacaataccactgaccagcccaaaaatgtaaaggccctgaaacacattgctggtgtggggtcatctcccgtggtacaatatgaaggtaccggaatctacttcattgacaaggtagccgataacgaatggaaattagaggtttaccccgacattatgaacgttgacgatcccttcaaggcaggaagcgtgaaccgggttgcccgtcaggccgtctgcctcaatcgtaacatccacatccagttgcccggcctacaaacagcactttgcatatatcccggcaaatatacattcaagaacaacctgttagtaaactacgaagcacttcccaatcaggaatactataacaaggaagccatgaaagactggaaagtaaacaactccacactggcagaaatgccgcaaagccgcccaggagttttttcatgtgaggtgtatggtcccacactgcccgaacaagtcaatctctacatcctgtcaggctggagaggtggaaagcgcatccctatggagcacaagagtggtttccgttatgaggcagaagtagacctaagcaagtatccattaggtgaaataggctatcacttcggcatagaatataccgatggcaaactactatttcccgccaagaccatcggtgcagccgacgagtttggctactatgaacaggagcagtacaacctgcgcatcgtgaacaataatactaccctcacccttttggacaagaatgataatataagaaaactgaggcgaagtagaccacacaatagccccgacaaccaagtcgaacaggtctatgtaggcgatgagatggtcaaagctttccggctcaccacccccgacttagagcgtaaggatacttacaaattaccttgcgatgtcaccctctccaaatacatatctccccttattgacagtcgcgattggaagacatctacgcccaagtacatccgaatcgaagcacaaggactgactaatacagacaaagctatcatcaactttgttgatacggaaggccgtggctatggaaataccttctctatcaagcccgatatgcagcagattctcattcctgtttcagctctaaggccaaccaagggagttatcctacctcaagaatatcctggaggtattactccatattattatcccgcatctatccgagacaatgacaatgtacttctgaagtggggaaatatagatttcgtacaaatatccttgcgtgatgaaatctatcctgtggaacagttgaaagacaaaggaataattataaagaaaatccaattggtattttagatgctatttagacgttttgttcagacttttttagggaaataatcatgtaataatggtttgttagttacttaatcgacacttatgcggtaatagccaaaaatctaatcctttcttcttatagttttcgatttattaaatctctaatatggaaaatgaatcgggatattcagaaaattccataagtaaagatttggataataagttgataacataacaatatgatgaaagtgtccgaaaagaatgctttcatcatagttgttacagaattttttagaaccactttatctttctgaaaataacaaaagccaacgcagacaatgtgatggatgccaaaataataaaactaaaagcatgtggtaatgcatctacatgtacatctacattcattccatagaaactagctattaatgtgggtaccatcagaatgatggaaatactggtcatgcgtttcatgatggtgttcacattgttggatatgatggaagcaaatgcgtccatggttccggttaagatatcactgtagatattaaccgtgttatatgcttgttttaattcaatgactacatcttctaccaaatcgcggttttgataatctttttcctggaagatactttgcaatttacctaccatcacctcatttccacgaatggacgtattgaaataaaccaatgttttttgtagtttcatcaatctgagcaggtcctcattacgtatgctcctttctaattctttttctgcggcagctacatcattgtttatttgtttcagatatttcaagaaccatacggcagatgagtaaattaaccgtaaaatcaattcaaatttattaggcacaatgattcctttacgtcgggtgtggtcaataaaatcaggaatcatttcagtggagtgataacacacggtaacaatgatttcattatttgtaatgataccgatggggatagtgatataagggatgcttccctgttgttgcagggggattcggataatggtcagtagccagttgtcttccgtatccgttctcggacgttcatccatatcggcgatgtcctctaaaaaagcttcgggaacttttaattctttagtcagaaactcaaaatcactttggtcggggcattctacattcacccagcagtttggcatccattgtgacttttctacaaagccattctcacaataaagatattttctcatcttattgcctcctttcgttcgtttatatccgttcagaggcattcagagtagtgattgccctgtcggatcagttaatactattgcacgttcgtggtattgaatcgtccatttttattgattgttttttgtttaaagcggtacaaaagtacataaaacctttaaaggacagatagaagtcaggaggcttttatattttttttaagaatatcaccggaaagcaatcagtgccggagcaatgatggttttgtcgccatagctcagttctaacgtactgtgtttaccgattaagttccctagcggaaactattgttgttaaaacatttagcatccttttaattacatgcaaaattcacttaaaaaatcgtttgtccaatacctatttatgatgaatcttgttctatataatcctaataattaggtattgtggaaggtgctgaagtcggctacctttgcaaatgtaataattacaatttaaaaatcagttttaatttaaaaataaaaagagtatggaaccaattattaattcacaagttcctgaatttaaagttcaggcattccataatggagagtttaaaaccgtaactaataaagatattgaaggtaaatgggctattttcttcttctatcctgctgactttacgtttgtatgccctaccgaacttgtagatattgctgaaaagtataatcagttcaaagaaatgggagtggaagtatattctgtaagcaccgattcacatttcgttcataaagcatggcatgatgcgtctgaaagtatccgcaaaatcacttatccgatgttggcagatcctacaggtgctttgtcgcgtgcatttggtgtgatgattgaagaagacggtatggcttatcgtggcacttttgtagtgaatcccgaaggtaagatcaaattagctgaaattcaggacaacagcatcgggcgtaatgctgatgaacttcttcgtaaggtagaagctgtccagtttgtagccactcatgatggtgaggtttgtcctgctaaatggaagaaaggtgctgagaccttgaaaccgagtattgatttggtaggtaaaatttaaagtatagaactcatgttagatagtgcgataaaagatcagttaaaaggtctttttgcccaattggaagcgcactatacttttgacatctttgtccaccctcagcacgaaagtcgtgccgagttggtggacttgttggaagaagtggcttcctgttcggataaactttcctgtcggttgcaggatagtgaagggctgaagtttatccttttaaaagaaggaaaggatacgggaatcacatttcgtgccgtacctggtggtcatgaatttacttctttgttgatggctgttctgaatgctgacggcaaaggaaagaattttccggacgagtttattaccagacgtatcaaggcgttacaggggccgattagtttgaccacctatttgtctctcatctgtaccaattgtcccgatgtggttcaagctttgaatatgatggtacttctgaatggtcagatacgccatgaggcagtagatggatctataaatgaagaagaagtagaacggatgaaagtacaggccgttcctactgtatttgctgatggtgaacagattcatgtggggcgtagcagtatgggggatctgttggagaagctggaagcccgttacggttcggtggaattggaagctgttgagacaaaagaatatgatgtactggtagccggtgctggtcctgccggtgcgacagctgctatctactcggctcgtaaagggttgaaagtagcaataatagccgagcgtattggtggacaagtcaatgaaacgatggggattgagaacttgatatctgtgcctcagactaccggtaaacagttggcccaggatctgaaaaaacatttggcggaatatcatattgatattttggaaaatcgccggatagagaaagtggaagtggcagagggcatgaaagtgttgtctgtgaaaggtggagaaacgtacaaggctcccgtattgatcattgctaccggggcgaattggagaaaattgaatgttcccggtgaagaaaaatacatcggtcatggagttgctttctgtcctcattgtgacggaccgttctataaaggcagggaagtggcagtcataggtggtggaaactccggggttgaggctgctattgatttggcgggagtctgttccaaagtgactgtattcgaattcatggatactttgaaagcggatactgttttgcaggagaaagctaaaagcctgcccaatgtggatattattactaatactcaaacggtagaggtgttaggaaacggtgataaagtggtggggcttataaagaaagaccgttcatccgaaaaagaagagatctttgccttggatggtatttttgtccaaataggtttgactgccaatagcgctttgtttaaagaattgctggaaacgaaccgcatgggtgaaattctgactgataaaaatggccggacctctgtaaaaggtatctatgctgccggagatgtaacggatgtttcctataaacagatagttatagcaatgggggaaggcgccaaggctgctttagctgcattcgaagaccggatgcgcggaacgatttattagtgataagtggttggtggtgaatagtgggtgcatatcgcagtatttaccactaatcttatcactaaaaaatgcactctttgtatgtatattggtgagaatatgctttctttgtaggtgaatcaccgtttacagcattgatatggcagaatcgagacgtacttcattgaaagatttggcacagatattaggtgtatccatacctacagtatcccgtgccttgaaaaatagtcccgaaatcagtcgggaactttgtattaaagctcaaaaattggcaaaagagatgaattatcaccccaatccttttgctatgagtctccggaaaaatactccccgtaccattggagtaattgtacctgatattgttactcatttctttgcgtctattttaagtggtatagaagataccgctatagcaaacggctattttgttatcatcacgacttcccatgagtcatacgaccatgagaaaagaaatattgagaatttggtcaatatgcatgtggaaggtattataggttgtttatctcaagaaacaacagattatgcccattggttgagtttggatgatatgaatatgccgcttgttctatttgatcgtgtttgcatgcctgaccgtttttctacggtagtggctgatggagtatattctgctcagatggcgacacagcacttgttggatcatggaagcaaacggattgcttttatcggtggtgcaaaccatctggatatagtaagaaagagaaaacatggttaccttgaagcgttaagggaaaataagatacctattgagaaagatttggttgtgtgtcggaaaattgattttgaagaagggaaaatagctacagaaattttattatcgcttccggagcctcccgatgcaattcttgccatgaatgatacattggcatttgccgctatggaagtgattagaaatcataatcttcgtattcctcaggatatagcgcttattgggtatacagatgagcaacatgccaattatgtagtgcctcgcctttcggccgtctcgcatcagacttataagatgggggaagccgcatgtcagatgttgattgataagattaagggagataaaaaaatcaggcaaatcattattcctacttgtttgcaggtgagggaaagcagtataaaaaggaaggattgagaaccgaaatgtattttaagaagagaataaggctgaactcttcacaaagagccaaccttatttctttatatattggagtattattgagtgaccaacgtaataatggaacgtgccggaatcacaactttttcatggtttttgatgcttcccaccggtagaagattctctccatctttatccgaagtacgatagattttccagttttttataattccgttacgctgatagaaagtaaactctttatcttccgctgcataattaatcataacgaaaacctcctttccgtctgtattttggtatgctgaacacattagtccggttacatctgtatcgccttcaggaatgattttccctaggttgtctttggctataattgctttccgaacagctcctgggcgtataaatctactgtagtttcccaaagcccacattaatttggagtctttcacctcaccattcagaaaagtcggatcactatactcacggattaatccgtccttataatctccaccgatagatcgccaccattgccaactgcgagcacctgcatatacaatgtcatgatgaatgatccgtgctacatataatgctgtcttcatggtgaagtcatatcctccgcctccgccgatttcttcgtcattgcccatgatacaggtttctgtctgccagaaatccaccttatacttgtctaaagtatcttttaattgacaacggatatcgtgtaaattattcagaggagtattagtccaataactatgccctaccatcagccggggaacattgggagtatcacccagataggtggctgtactgtccggattaaagaaagactggatttgatacccccgttcccaattagtcatgtgagtatcgaacatacaacgatagtcagaggactcattgactagaatctgtgtgtcaatttggttatttacgaactctttactgatgaggcgtatggcacgggctatttcgcggttggtagccggtgtaccttcttgtttggggccaatccagttccaatgcccatcgggttcattgaatggacagaggtaattgaacttgattccatcgtgtttctccaccccttttatgacattggcaagaaaacgggcaaaattcttataatgctcttcctttaagtttaaggttcctccacggcctgtgttggtggcaagaccgttttgtgtgaaatatacgggaggtgaattaagaaatgccaaaaatttgtttacaccccgttcttttgccagacgcaggaagttgcgctgcccttgttgtttattccaattatagttaccatctgcctgaaggaaacattcggcacgcatccagggagaggctatctggctggcttctccttgttccgcacttccggctcctacattgaaacgccataaagacagaccgattcctttaggttgtccgttttcatggttttccgtactgaacagccagtcggctacttggttttgtttttcttgcggccataagccgataaattgcatgctccaacagtctgatgctccgaaatagtccatggtttgacagggttggtctgtttctatttcaaagtgaatggcaggatgttgagcaaacaggtttgctgttgcaaataaagagaataataatgctttgtatttcataaagttgagggattatttcagattataaatgacagttgtaacactttccgaaggcacaattacttgttggtctgccgtgacgtgtacctcttgcaaatttttgttatttgttgttgtataagtagtgatggagcttatttcacttacccattctttatgaatttcgtttagccggactcctttttctgataggttggtataaacagcaacaattttatcttttttcggtgaaatccatgctgacccgaagaaactggatgattcattcatgttaagcatgatacggcgataacccggtcggatgaataggctgtagttacctaatacccaaagtgtgggagtagctttataagtgccttctttctctatatccccataaactccatcggagggttccagtgaaatcagtaagaagcggtttttgtgtccccagcgggggatatccattgaggtccagtaactccaggaggaaactcctgctatagttaggtcattgtgtattacttttgacatataaagtgcaatgtccatttcggttgcttggtcatagcctataaactcggaagagctgtatccgtcgcctaacatactccactcactttgccatatttctacatcatattgttgggctgcttgggccagttgtttccggacattacgcataccatcccatgtgccatctgtccagtagctgtggccgcagataagtttctttacatgagtcaggttgcctatataggtggaagttccaggtgtgaaaaatgctgaaagtacgttactatgggcggcatcattcttaaatttgtagagatattcataatctccagattcccctggaagaatatcaatagaaagaccggcagaagtgatggcggtatccaattcacgtataagtttggctacttcatcattagtccatccgctgccttcctggccgctgtcccaattatattggggttcgttaattggtgagatatgtgtcactggatatccttcgtttacatagtattttgctacatctgacatgtatctggcaaagtccgtataacattcatccttcaaattagaaactcctccgctattggagaatccttttccgttggaggtatattgtacaggaggggtattgctgaaaagtactatactctgacaaccaaactctttggcgcgctgcaagaagtagcgctgccctttacagcgtgtccagtctaatgttaagtcatcagtcagataagattctgctctgcgtgatttgtcttctattccacttgcttcaccttgttctgcactgccaccacctagattcacacgccacatggagagtcctatacctttaggttgtcctgattgtatttcagaagagaatagcagttcactgattttgtcacgattcgttatccagctttttcctacgaaggcaggtgcccaacaatctgatgcgccaaatcctgtcagagtctgaaaagattgtccggcatctatggttactgttttttctacgtttatgctgctgtccggttgccccgatgtatccggtgtttggggagaatcgtcactgcaggctacagtagaaaagaacagtggaagagtaaaaatatattttagtttcattgttttagatggattaaaaaatagtcgcggataatcctagcaaactatccgcgacagaatataaagacctattgaatgtttaattcctgtaacaatctgttctttttggaaaatgattaattccagcccggattttgggtgatagaaccattagacattgtaatctcatataaaggtatcgggaataccatatcccggttttcgttgaagctgattcctttatcacttgcctcaccttgattttcccattcgtaaatgtcgcgggtagcgggatctgtattgtattttacaaatgtaccgtttgctcccatcaggttacaaatcattttcttgccattgtcatctgtccaacggcggatatcatagattctgttttgttcccatgccagttccaaacgacgttctagccggatagctttgcgaagctcgtttccactggatgtgacagcaggtaattttacacgattccgtacctcattaagataggtacgtgctgtaccatcttcgcccaattcgttgcaggcttcagcatacatcaacaatacatctgcatagcgtaagatacgatgatctaatggaattttgtcgatattgtatacttccggacgtttttcaataggtacaaaatacttccggacaatacgtgctgatttatgttgtgacggatctataatataacattcgggatcccaaccgtacttttcgatataatctttataattggcgatttttgtgttgttttcaacgaacttgtcgaagttattctctccggcaatttctgtacaaccggttttaatgatagtccaacgtaaacgttctgtatctcctgcatcgatgtaggcttgttcaaggttagcggttggctgtccccaagaccatccgtcgccgggaccactacgggcaccggtaataacagtcaaagaaccacccaatgcataagttccatcatacatatattgtacttcaaacagactttcttcgctattgttatggtcaacatcccatacatcaccgaagttgtcgagtaatttatattcaccttcgtcgatgactgttttcaatacatcatgtgcctcttgccatttgctttggtagaggtaaacctttcccaataggcctaatgcagctccacgggtagcgcgtcccatatctgtagcagcatattgactacgttgtggcaacacatcagcagcggcttttaaatcatcttcaatgaacttatatacatcttcggccgaagcgcgggtaataccttgtatttcttcgggcaacaggaagcctgtaatgagaggcacaccaccaaaattcttcacaagttcaaaatagaagtatccacggagaaaacgtgcttcggctacaagccggttcttcatttcttcatctgagaaatcagcttgtgaaatgcgttccactgcgatattgcaacgtagaatgcctttgtatcgatactgccaaaagttggagatggcaccattgctttgtccggtaccttgatagtgggccaaagaaatatagtcactttgactttggctggtattgcccatccaaccgtcatcactacacatctcggaaagcaaccatactgtgttgatattccaccatccgccaaaagtaatggcctggtaacaaccagtaataaatgcttcggcttcttctgcactttggaaataagtatccaaattttgttgcccgcgcacttcctctgttaggaaatcctcacaagaagtgaatgtcagcgaggcaatcattgttaatattgttaatatctttttcatggtttataccttgagggttaaaattttaaatcaattccaaataagaaagtacgtgggttaggataagcgatgccgtcaataccggtttcaattacactgccatctttaccaatctgtggacgttcaggatccatacctgagtagctggtgatagtgaaaggattttgagccgacaatgagagacgcaattcggttccgttcaaccacttcttggggagtgtgtaacccacttgtaatagtttgcaacgcatataagagccgtcttctacaaagaaacttgaaacgcgtgtgtaattctgattcaaatcattgtaggacagacgaggaatatcgttgctggttccttcgccatgccatgctttctgcaatgtacctgtccaaacgttttgcccacttacgccggagtataaacctttggtcttattgaaaatatcattaccgaatgtaccatagaagttggctgtgaaatcgatgtttttatagctgaaacccaagttcaaacctaccatcaaatcgggatatgggttaccgatccatgttttatcattttcatctagcactccgtcatgattcaaatccttaaagcgaatgtcaccgggttgggcattggattgtaccagcttgccattttcgttggtgtgagcataaacttcatcccaattttggaaaataccatcggctacgtagccgtagaagcgtgaaatcaagccaccgtcttcattacggataatttggtcgctgttgaaacctccagtttgaataggaccgtcaccggagaatttaacagctttatttttcactgcggaaaggttcaatcccacattatatcggaagtctgctactttgtcgtgccagttcagacttaattcccaaccgctagctttcatactacctatattcatccatactgtactgttccagtcggggtatccgatggcgaagatattttgtttctgatagagcatatcagaagatttcttttggaaatactcaaaggtcatgtctagacgggagtcaaggaaggacatatccacacctacgttccagtcttctactgtttcccattttagcaaattattgccaacgcctgataccatagtacctgaaacacgtcctggagctgtaccgaatacataatcagattgtcctaacaaagtcagcgtagcatcattatctatgttttgattacctacacgtccccaacctccgcgtaatttcaagttactgaaaatcttctggtcttgcatgaaactttcactgatgatacgccatgaagcagaaacagaagggaagatggcatatttgtttcctttggggaaacgagaagaaccgtctgcacgaatagaagctgttagatagtaacgattgtcatagttatacatcacgcgtcctaaataagatactaatgtgctgtaagcagttttaccttctgacttttggttttgtgtaccggcatttacttcctgcatttgatccatattattaggaacatcgtcacgtgaggcttttgattggaattcagcaaagcgttcagctgtaaagccacccattacattaatattatgcttttctgcaaaagtcgtgatgtaagtagcagtattagtccagttccaatcaagccattcctgcatttcacgggaaacattacttaatgtagattgttccaaagcatcaatatagaattcaggagtgaatttgtctgtacggcggaagtgtgcattagcgccgaactgcgtgcgcagggtcagtttttgaatagggtttatctgtaaataagtatttacaattgtacccatttcacgggagtgggaattttggcgagccaatgaaccggcagggttccactcctggttgttgtaagaacgctgatagttattgaattcgttatccacccattgatcttccggcttgaatataggagttgtggggtccatagacatggcagctgaaaaaagatcgggggtatcatcccatgattctacacgtggggcaatgtcgaaacccatttttacatatttattaaatgtatattctgtattaaggcgtgcgttgattttgtcccaataaccatagtcatattgtgaattgttacggtagtaacccatactcaggttataaaccagtttgtctgaaccaccggagatattgagtgagtaattttgcactaaagcagttttgttgattacttcgtcccaccagtctgttcctccgggattggtagtagcgcctgtatcattccaaatagaagttcctccgtcatttgtgtatcgggtattgaatacttctttatattcggcggcattagccattttgggttttgacaatgtttggaaacctgcagatgcattaaaactgatatttgtttttcctgccattccttttttggttgtgattagaatgacaccgttagaagcacgtgttccgtaaatggcagcagccgaagcgtcttttaaaacttccatagattcaatgtcattactgtttaggaagttgatgtttgtacctaccggcatgccatctactacatacaaaggatcggttccgtttactgttgttacaccacggattagaacttttggttgtgcgcccggaccaccaccactggttacttgaacaccgttgattttaccttgcaaggcgtccattgcattaccggttacagtttcggtaatttcttttccttttacggtagatatagaactggtcaggtcactttttttcacggctccataaccaataaccactacttcgtccagtaattcactggcatctttcagcactacattgataacggtttgtccgtttacctttatttcttgagtctcatatcctatgctggagaacacaagtacggcatccttggcaacatcgtttagtgaataatcaccatcaatacttgtaatagtacctgtacctgtaccttttacttgcactgttgcaccaatcatcggttctttatctgaagccgaggttactacaccttttacagtgatggtctgcgcatagctacatagacttgtcagcgcaagacacaataataatatttgctttttcatatcttaaatctaatgttacttgttaattggccggaatgagtttagctctttccaaatgagcgtcgaatataagtttataattccctgtgacgttcactgttggttttgcccaattgtcacctacatgatcgggtctggtccatgccggattggtatatttggcttctttaccataatatccgaagatctccggttcgtctgagttgtctacacgccacgtgcaataattccaccatccgtcggagtgccagttatgaataacgaaattcattttagtacctgcctccaggaataggggggtatccaaatagaacaggtgaggattggtcttatcttgagtgaaacgcaggacttcagttgggctactggtcatatatccgaaatagaattcctgtaaccacgaaccaccgtcaccccatgtgtcaaggctgatagaaccgtatgtgtgaggtatggggtctacagcatcggcaattgagtaagttttcagattgtatgtactgttcttcacatcaatattaatttcataataaacattggcttggtcaagtacgattggcattgctgtttcgggatcgtctgtcagtttggtgttatcctctggatcaagcccgaaacaaataggagtgaagtcactcttttgtggtaagaagaatattttagttccggctttttgacagtaataatttgctttatactgatattcacctgtatgttcaattaccatcggtaccccgaatatatcactattcagttcttcggcagttgccacatctgccagatacattttgggaaaatccggcatttctgagatattcaatacactggtggtagtggttgagttttctttcttgtcaaaagcggtaattgtcacattataacttttcggttcattggggaatactattatttcggcaaagttcaatgaactttttccatcagcatctacacggcggttgtcaaacccgtctatacctggaatattaattgtgacataatccaatgcacgatcatctgtagccgtgaaccgaagattgaatttcgtttcatttttcattaatactgtaacagtggcatccggggcagcagaaaataccggagctgcaaaatctccgtccattgtgattaatacatcttgagatatactgcgtcctcctacatcggttacagtaactttgactgtgaaacgttcgccgatttcatttcggtttatgtcaaagtaataacttaaatcataactctcttgcggagcaccatagatttcgattaaatcaattgtcttgttcaaatgcaggtcggcacattgtaggctgatagaagcaataccgtctttgtcttctaatgtcccttcaatagtaaatcgatgtcccgctccggactcgatgtggtctgttgctaatgtcattgttggattttgcccgtctacatcggggtagtcgttatcatcactacatcccgtacataggtttgcagttacaagaaaagcccataacatggcaccatacaaatgtttctttttcatattttattagtatttgaagattaaacatctactctaatagaggacgaattaaattcgttagtggtgcaaatgtacgtgaagaagaattaaaatcctgatataaatcttgcagaaaagggaggtaaatcttgcaatgcatgatttatgtatctaaaatacagactttatttgtatttttgaaccatattatttaacaatgtgtacactgatgctatgagaaagatattcgtactttggctcttgctgctgtcggttgtttcattggcacaaccttattctgttaagcagcttggtatagagaagggattatccaataattatgtggtgagcattgctcaagacaaacagggctttctgtggtttgccacggaggaagggttgaacaaattcgatggtacccgtttcattacttatttgaagaatgaagatttgacaaggcagggtataacaggcaatgaactgaattgtttgttggatgatcctcaggattctatcctttggataggcacgcaaagggccggtctgaatgcgtatgactatgtaaataacacttttctttgctataggcatgatggcgagaaccccgaaagtctgataacggatgatgttactaagattgtggcagctacagatggtaatctttggattacgacatattggcggggagtagattatttcgataaaaaggctggaaaattcattcattacaatactcaaacagttccgggattggctagcgataatatttggtcggttgttgatggaggagatggaaagttgtatatggggcatgtgcatcatggattcagtgtgttgtctcttaaagataaaaaagtaaagaactttatgcatgaccctgaagatccggtcagtttgccaggtaatggggtaacttgcatttataaggacttaagcggtaatatttggctgggaacagaccgggggctggcactgttcaatccggaagccgaaaattttatccattttcatcatagtgaggacggggttcctcataccgtatttgatatcagacaatttgatgggaataaactttggattgccatggaatttggaggaatagccattttggatttaacgcaacgtatgtttctttctcctgaccaagtgcgttttcaatatataaaggaaggggatgatgaatacagtctctctaattctactgtacgttgtttgtttcaggactcctttaaaaatgtatgggctggtatgtggggaggtggaattaattttcttagccatgaatcttcctattttaatgtttatagttattctcctatccagcattcgggtagtagcctgaataataagacagcaagtagtgtatgcgtagcaagggatggaaagttatggatcggaaccgatgggggaggcatcaatgtatttgataaaggcaagcgggtggcggtttataaagaagaaaccggtgatttgactgataattccatacaggctgcactttgtgattcggaaggaaacctttggtttggatcgtttatgggaggagtggatttttatgatgtgaaaaagaaaagctttcaccagatttttcctaaagataaaacaggggaagatgtgcgtgcactgtatgaagatgcagaatatgtatggataggaactagtaatggcatctataaggtacgcttgcatgataaaggcattgcagatcattatacagtagagaataatctggtgagatgtatctcgaaagataatcttaatcgtttatggattggtactttcggaggaggattaggggtttttgatgaacattttcagtgcgttaaactttttaacgtgacttctctttttccctctaatactatcaatactgtttatatggatagtcagaacagaatgtggataggaacgggagaaggtctggtttgttttccatcctctcagagttgggactataaagtatatcgcagtgaggagggtttgtccaatgtccatatacgtgccattacggaagataatcatggaaatatatgggtgagcaccaataaaggtatcagctgcttgttgaaagacaaggaggttttctataattacgatcattgggataatgtgcctatgggcaatttcatgagtggaagtgtggcggaagctaaggatggaacactttattttggctcaatcaatggcttatgccgttttaatccagatcaggtattggaaaaacgagagtcacctgctgcaattattacggagatgcgtatattcggcccgttgcgtgatacggacagtaatgaaaaggtgatggcgcttgaaggccagtcggaagtacgtttaagctatatgcaaaataacttcagcgtcaccttcaatatacagaattatgccttggccgatcaagtggaatatgcttatatgttgaaagggttggaaaattcatggtatacagtaaccgatcctaataatgtgactttccgtaatatacctccgggaaattattgttttcaggtaaagacaagaatacggaatcaggaatgggcggatgagatagcttctctggatatccgtattgacccgcctgtatggcttacgtggtgggccaagttattttatattctttcgggtgtttctgtcctgtattttattcttcatgcctataaaaagaaactggatatggagtctctctatgagttggagaagaaaaatcatgagcaggaacaggagctgaataatgagcgtttacgtttctataccaatatcacacatgagttgcgtactcctttgacgttgattctgggaccgttggaagatatgcagaaaagtaattctttatcagggaaagattcacagaaaatatcggttatccatcaaagcgccatccggttgttgaacctgattaatcagatactggagttcagaaaaacggaaacccaaaacaagaaattatgtgtaagtcgtgataatctggcagcccttgtacacgagatcggactgaagtataaggaattgaaccggaaacctgagattgatttctgtcttgagattgagcaggaagatatgtctttgttttttgataaggaggtagtaacgattatgctggataatttgatctccaatgctataaaatatacagagaaaggaactataactttaggattacatcaggtggtccggaataatatacaccatacggaaatcagtgtgagtgacaccggtttcggtattgctcccgatgcattgcctcatatttttgaccgttattatcaagagggaagcgaacatcaggcttcaggaacaggtattggtctggctctggtaaagaacttggtagttttgcatgagggggagatcagggttgaaagttctttgaatgtgggaagtactttttatgtcagtctgctgacggataacacgtatcctcatgtgctgcatgctgactcgacggagaaaacttccgatgaaaagggcgaaaaagaagaaaatatagaacctgtgcataatggtaagcgtattctgctgatagtggaagataatagggacatctgtgattatattgtagaatctttctcggacgattttgaagtgaggactgccgccaatggtgaacaaggtttggaacaagcgttgggttgcattcctgatattatagtcagtgatatcatgatgccggtgatgaacggtatcgtgatgtgccggaaattgaaagaagacttgcgtaccagccatattcccattattttgctgacggcaaaggattctttgcaagataaggaagaagggtatcaagtgggtgctgactcttatctgacaaagcctttcagtgctactttgttgcatagccgtatccataatttgcttgaatcccgcaagttgttggcagagcgttttaatacgaattccatactcattgacaaacgtgcggcagtaaccgagtctatgaataaattggataatgagttccttgagaagattaacaagctgattgaagatcgtctttcttctgagaagatagacatcggctatttgtcggacgccatgtgtatgagtaattctaccctatatcggaagatgaaggcattgaccggactttccaccaatgaatatatccgcaaaataaagatgcaatatgcggaacgtttgttattagaggggaaatacaatatttcagaagttgcgttcaaggtgggaattaacagtacggtctattttcgtcagtgttttaaagatgaattcggtatggctccttctgattatctgaaaaagataaaaccggaatagagtggttgtgtaagctgtttcttccatatagttaagcctttttttacagtcatctgctacagtctccgccagtggactgtaaggtctgcttgggtgaactatacagtctgctgcaatggactctacggtccattggcggagtctgtagtaagtagccgtaagaagtagtcaagcaggcctgcaggaaggaacaagctcaatatctccagtggagtcgcgggggtgggaagcttctgtctcatgcgccaaagataaggtttttaactaatttccccaagttttcaaactgagccgccctgatccttttatgatatgtatgataacaaaaaaggctcgctatctgcgaacctttgtgctcttcgtcttggacttgaaccaaggaccctctgattaacagtcagatgctctaaccgactgagctaacgaagaaaatttgcatttgactttaaaagtgctcttcgtcttggacttgaaccaaggaccctctgattaacagtcagatgctctaaccgactgagctaacgaagaaggtttttctctcaaatgcggtgcaaagataataggtttttccgaaatatgcaatatctttgcagaaaaattttagataaatggataaaataattggaatgggcaatgcattggttgacgttcttgttactttgcaagatgattcgctactagatgagatgagtttgcccaaaggaagcatgcaacttataaatgaagataagtttttgaaaatcagtggtaaattctctggtatgaaaacgcataaagctacagggggaagtgcgggaaatacagttttggcgttagctaacctaggggcacacccgggatttatcggaaagataggaaacgatgattttgggcaatattttaaaaaaaacggtttgaagcagggaattgacatgaaattgctcgccggtgatttgcctacaggagtggcttctactttcatttcaccggatggggaacgtacttttggaacttatctgggagctgctgctactatgaaagccgaaaatctgacgttggatatgtttaaggggtatgcatatctatatatagaaggatatttggtacaggatcatgaattgattcttcgtgctatgcaattaggaaaagaggctggattgcaaatctgcttggatatggccagttataatattgtggaaggagatttggaattcttcgatattttgataactaaatacgtggatattgtttttgctaatgaggaagaggcaaaggcttatacaggcaaggatgcatggggggctatcaatgaaattgcttctaaatgcagtgttgtaatagtaaaactaggtgcccaaggttcatgtataaagaaaggtacggaatgcatcaaactagaggtacctccggtaaaaaaagtcgtggataccactggcgcgggagattattatgcagcaggttttctgtatggactgacttgtggttattctttggagaagtgttccattataggttctattttagcatccaatgtgatacaagtggtgggtacaaccttatcaaagaaaaaatgggacgaaataaagttaaatatagaggcccttctacaggcttgaatagaataatgtattaatttgcggttcacaaatacataaagtgatgaagtggaatagtaagaaaatattgttaatgatttgcgtgggcctgacaggtagcgctttgtttagttttaataaaggtgatgaccgtaatttccagatagcaaaaaacttggatatcttcaatgcgatattcaaggaattggatatgttttatgttgatactattgatcctgagaaagtgataaaatatggtattgatgctatgttggcgcagaccgacccttacacggagtattatcctgaagaagataatacactaaaggaaatgactagcggaaagtttggcggtatcggatcggtaatacgttattatactccccgaaagcgtgtggctattattgaaccttccgaaggaagccctgctgccgaaataggactgaaagccggtgatatcatcatggagatcaatggaaaagatatggcccagggagacagaattcccaatgatctgacctcgtatgtcagtgataatttgcgtggtgagccgggaacaacttgtgtgttgaaagttgagagacctacttctgatagtacttatgtgccaatggaatttaaaataacccgttctaccatccgtacgaaccctgtaccttattatggaatcgtaggcaataatgtgggatatatcgttatcagtacttttgctatagagaactgttcaaaagatataaagaaggcattgatagaattgaaacagcaaggtgctaaatctattgttctcgatttgcgtggcaatggtggcggtttgttgggggaagcagtgaatgtagtgaatttctttgtaccgaaagggaaagagattgtggtaacaaaaggtaagattaaacaagctggtaccacttataaaacaatgaatgaaccggtagatacagagattccgctggctgtgctagtggacggttctacagcttcggcatccgagattgtttcaggttccttgcaggaccttgatcgggctattgtggtaggaagccgtacgtatggtaaagggttggtacaggtacctcgtgaattgccttataacagtagcatgaaagtgactactgcaaaatattatattcccagcggacgatgcattcaagccattgattacgctaaacgtaatgccgacgggtcggtggctcgtactccggacagcctgaccaatgtattccatacagcagccggacgtgaagtgcgtgatggtggcggtattcgtccggatgtggaggtgaaagttgaaaatttcccaaacattatgttttatctgcttaatgatgatatgatttttgattatgctacccaatattgtatcaagcattctcaggtaggggaagtgaaagactttacaataacagatgctgactatgttgattttaagaagatgttacataagcgtaagtttacttatgaccgtcaaagtgagaagatgctgaagaacttgaaagaaatagcggagtttgaaggatatatggatggggcaaaagaggagtttgctgctttggaaacaaaattgacgcataatttggatcatgaactggacaggttctcgaaagagataaaagatgctattgctcaggagattttgaaacgttattatttccaacgtggcgcgatattgcaacgcttgaaagatgatcctgatttgaaaaaagctattgagacattgaacaatcagtctgaatatagtaagatactttctgttatgaaataatcaaatgaggggcggatgtacgaatctgcccctcattattgtatcatgataccattgatgatgctttatttgaaccgggaagtatctattggtttatgctgtttttctttataccctccgaacttgtaggtaaaggataaagttatgttgcgtgaatagttgttggtgtgcatgtccatgtattgtcctttattacgtagtgtcacatctatgttgccttccatcgaattgaacagatcattggccttcacttggatacttgctttttggttggcaaagttccaacgtattccggtatggatggcccagatatgatttaaatcataacttccctggatagatgggctcaaataaagtccggtcagttccatgcgaatatccggtttggtagaaagtattatattattttgtaacatggcgagtccgatccacttgctgtggttgaaggaaagatcgaagaatttgttacattttgcttgacggtattcagcttgcagtgtgacgtgactgtccaaccaatgtccgattttgaagggaatgatagtcgtggctgagaaactttgctgataatcccagtttaaggttttgtaaatcaaagccaggcgttctgtgctttgataggctagttgctgaaataaatcgggttgataatcataagccaggctgaagatatacttgttctttaaaatataattcagatttgcggaataatcggtggatggctttaacattggattgccttgtacttcttcataaccacttatatagccggtactttcgctcagatcccagtagctgggataggtcttatctgatgtgaatgaaagttgtagaatatgtgctggggtcattacgtatgttaattcggttgtaggataagccgcccatgcatgataacgggccgttttgtaatattctccggttatggacgcgctgaaagacaaatgttctcccatgtttttgctgaatccgacgtagaagtcatatgtatattcattataacgattgtttgtattgagttcgctcatgtctgttccgttttgggtatgatagaactgagtattatggtcactggcataagttaaagaggtgccatagtttaaggtccactctcgtggtagtgtgtgtgactggtctacgtatattttccagtggtctattgtttgtccgctagtcgtgtgaaattcgcttgtttggttcttgttgtctttgttggtgaattgctgatgactttcggaatggtaggaggtatagtttattccagctttcataccgaagctagagagataatctaaagcgatattgtgcattcgagtctccttttttgtccggttgtctgcggttgtgatgttcccgtcggaatatgaatgattatcgttgttagggttgaagacaccagtataggctagattgatatgagcattatcattgaatttatattcagcgcctgttcgtacataatgtgttattcctttcctgtcaatatcattgtgttgacagatatcatatatattattttttagggtgtgatgtgagtacgtatctgttgtttgtctgttttgttcataatgggtattatatagcaagtctatattccatttaggagtggtgtaaagcaggctgattcctccttgtgtgccacttctgtaattgtatagatatccggcgttaacttctccttgcaacccactttcttcaggacggtaacctttcaaaagtaagttgatggcagcacctcttacatgatattgcggcggtgtgctatacataatttctgccttttctacacgtgaagccggagtgttttttaataaaatggtcaactgttcgtgactcattgttgtgggccttccgtttaaaataatgctcagattgtgtgtgcccgctaatgaaaggttgccgtttatttcctgtacaccgggtaattgctgaaggatttcataggcattgctcacgatcttatgtgtggtgagctgtgacagatcataggataattttcctccttccacttttacaagagggcgttcccctttgacgataacttcgtccaaagcataatctttacttttcagggtaatcgtgcctgcgtcttctcctgtagttgtcaataagagggtttcgtacatgatgtgttggaaaatcagccgataagatgctggttgccggttgaacttgaagtagccggtggtatctgtgattacggcgtccacaaaagtagaatcaatggtttgtaggatgacggttgcaccgtcaatggcttgtgcatggatgtttgtaacctttccggtaatggtttgtgcagtggttgttcctataacccaaaataaaaatagcgatgtgatgataaaattttgctttttcatatctatttgtttttaatattttctttaactttgacgaaacaaaagtagggagacttttttccttacgtggttaatggcaggttaacacaatgttaacaaagtatggataggatataagtgtatgacaatcaaacatattcgttgggtagcttgtatcggactgttggcaatcatctgtttgcagtacgtttggcttgtaaatacctataagctaactaaggaaagtatacagttcagaagcaatgaagtatttagagatgcaacgatgcgtgaggtgttttatcgcatggaagtatatcaagattctttgcaaaagaagtataaggacaaagatacttccattatggttagaataaatctggatgaagattatgatttttttgaggatggcagaggtgataaaaatgtgaaccaatggttgatgtccaatatgcaggtttccatgcaagagattgtcaagagggattataaattgtctgtttctttgtcaagtttagattctatttatcggacaggccttgctgccgaaggattggatgcagaagtaataacttgtgtgacagattcgctggggaatattcttagaagttcccgttccatacaggtaggggattatggcttgttgaaaaccggattacaacctatcaattataaatgtacggagaatcttcaggcttttattgttaatccttattgggttattttccagcagatgaccttgctcctcattgctactgtcttgatgatggcaatgatcgtctattgtcttgtttatcagattcgtattattgctcatcagaataaaatagctaggatgcgtgaggatttctcatacgccatgattcatgagatgaagactcctcttgcctgtattttgatggggacccgaatgttgaaatcaggaaagttggatatttttccggataaacgcgagaagcattttcagatattggaggacgagagtgaacatttattgtcactgactaacaaagtgctgacgctgtcaaaattggaaaatgctcaattgaggctttggaaaaaggagatacaactccgtccgatgttagaggatcttattgagaaatatactgctaaggcagataaaccagtacatttctctcttcatttggaatcggaatgggtatatgctgatgaagaattcttgaaagaaactatcggtaatttggtagacaattctataaaatattcaggtgaagaggtggacatacagatttcatccttgcgtcaggactataacttttatttgataaaggtaagagataacggcataggtattccgttgaaggaccagagtcgtattttcgagaagtacgagcgtgcttcggctgccgaccgcagccgtaaaggcggtgcgtcaggcttcggattgggtttgaattatgttttccgcgtggctgaagcgcatggtggaaaagtgtgtgtagaaagcattgaaggggagtatagtgaattttttctttttttgccgagtggggagaagaaataaatattttttaaggaggaagatgatatgataaaactgttgttggtggaagatgatgccaatctttgttatattattcgtggtggattggaggatatgataggtggatacgaggtgatgaccgcttctaatggcgaagaagggctgaagatatggaaggagcaacatcttgatatcattatttcagacattgagatgcctgttatggatggttatgaaatggtacgtcgtattcgggaaacggatggatttattcccattgtttttacctcgggcagggtttcgcctaaagatgtggtgaaaggttatgaattgggggtgaataattatattaagaaaccttttttggcggaagaactggatgcgcatattggtgctttgttgaaaatgaagcggggaatgggagccgctaatgaaagtgagatttatcggattggtgaaaattatacatttgatgctgttcatgcggtattaaagcattcgttgtgtgtacaaaagacaatgacggaacgcgaagcgaaattgcttcagatgctttgtaaaaagaaaaatgaactagtgagacgggatattattctttcaagactatgggatacggaggatgatttttttgcatcacgtagtctcgatgtttttgttactcgacttagaaaattgtttgctgatgatgaacggatacagataaagactgtgaaaggagtgggtttatgtctttcggacaaaggatgaatatgtgtaatataacatttattgtaagttcttttggcattttccggatactaaacgtttttaagcaactcgaaaagatgtgcattggtgaaacgaccgttcttgaaaatggattttgtcattatcccgactttgttgaagccggccttttctaatactcgcatggaaggaaggttgtgttcaaagacaagtgcgaatatacgtattgtattcgtataagtgaagtaatggtagatggcttcttgtaatgcgtcggttacaataccttggttccaatatttttctccgataacataccctacttcggcattgaagcattccacatctgtgcctggtgtaaatccgatattgcctacggcttttccattaacttcaatacaaaaatcatgaatgccttcttttttctggatgaggtcaataaaggtttccgcatgctctagcctgtaagggtgggggaatacgttgcggcaattgtcccaaatctttttgttattcagttcttgaactaatgaatgagcgtcttctgtttgccaagtacgtagtgtgtacttgttcttttgtacaaatacagcatgatagcgtctcatgggggtactgcagagcctatggtaattttgtttttctcctacgacagcaaatcccagactctggtagaaaggaatagcataagtagaagaattaaccgttgtttcaatggaaggatggaggcgtagtggaaaagtttttttcctaatccgtgcctgtgatattctggcttgataaaaaatagggagatatgtttgccattactttttatacctaaaatgcctgttagagcttcattgtcaaaactaccataaaatatgatttcgtttatatattttttgttataaataaagcttttgaaaaattccaatccctcattgttgaaatcttctttgccggtgatggtgaaaacttgccaagatagttcgatggcttttgggtattcatcttttgtgagttgtcgtatgttattcatggtatgccatattgtagattagtgtaaaaataggtagagcaggtatgtttttagtaaggtgaagaaggataaaggtgcatttaaaaacaactttatccttctttggctattaactagaaattataggctacgccaagattgaatacggcttggtctaggtcgctgattaattggtatttaatatcaaagtttaaactccagtttttgtctaagtcaaactccatacctgctcctaaattaactccaaattttccatcacttccactgacatcgtaatcgcctgctttccctaaatccaaatgccagttagtgtatgtaaatcctgctaatggatatagactaatattgcttgctatgggaaaaaggtagtggatatttgcgttgatgtcaaacatgctaagtccatcatttttaaagaagtaattcatagacggctctattctgatttgatcagtaatattatattgatatttcagaccaataccaacgctctctatttcagttccataacttagatttccaccaatagcttgttttccttgttgtgcaaaaacagaaccacaacctaaaagtgccatgcatgcggcaataataatttttttcataatcactcattttaaatgaatactaacttttctttatatgtagaattatttttcttcctccttaaaccaggaagcatacattaaatatccattggctattttctgattgagttctttgctttgtgcctcgggaatctttttgataaatttggctggaactcctgcccataggcttccaggttcgatgacggtgttactgagtaccagcgctccggcagctacaatagctccttcacctacgaccgcatggtctagtatggtagagcccattccaattagagcgccgtcttttatagtcgcaccatgtatggttacattatgtcctacagaaacatcattcccgatttcgacaactgatttttgatataatgtatgtactacactgccgtcctggatatttacgcggttacctatgcggatagcattaacatcgccgcgtaatacggcgttaaaccaaatgctgcaatcttttccaattacaacatcgccaataatagtggcattatcggctaaataacagttctcgccgatttttggagtgaatcctctcactgattttataagtgccataattaatttctaccgttttaaaggagatgttacttcttttaaccactcgcgttcctcgttgttcaattccggattcaaacaattgtaaactttttcatgatattggttgaaccatgttatttcttcatcgctcagcatatctgtcaggatggcttctttgtcaatagggcagagggtaagtggctcgaatttatagtaagtgccgaattctgtctcttgtgacggaacaattaacatggtattttccgtacgtactccatggcgtccggttttatatataccgggctcgttggttactgtcatgcctggaacaagtaaggccggcatgtggttcatgcggaattggtgaggaccttcgtgtacattcagaaaacaacctacaccgtggcctgttccatgcaggtaattgattccggctttccacatagggaggcgagccagcgcatctagttgtgttccgcaagttccatgtggaaattgagccattgagagttggataaatccttttaagactaatgtgtaatctgttttttcttctttcgtgagtgctcctaaaacgatagtacgagtaatatcagttgttccgtccaaatattgtgctccactgtccagcagcagcatgccttcaggttttaagggaatatcggtttcgggggttgcttcatagtgaacaatagcgccatgagctttatatccggcaatggtgtcaaaactgataccattgaagtggggttgtccggcgcggaattcgtataatttcttatctatacttatttcggtttcattttcagtagaaacagctgctttcagccagcggagaaatttaaccatggctactccgtcgcgtttcattgcgcgatggaagccttctatttctgtttcattctttatcgcttttaaaaaaagtacaggcgaaggggctatttctattaaggaatgggcgcaggctgctgcatggacagcggcattgatattagctgacaacaggagtttgccggtaaaatcttttaaatctttttcaattgttgaataaggccttactttaatttcgttttctgttagatagtcttttacttcatctgacagtttattctctattatatataaggtagaactatattccgtgatgagaaggtaacttacaaataccggattgcagtgtacgtcacttccccgtaagtttagggtccatgccacttcatccagtgcggaaattaaaatgcctgtgcaactgttacgacggattgcttctcgtatttgagtgattttatccttgcaactgagaccggcatatttcaattcatgtataaacactttgttattgggcaatgcaggccgatctgtccataattcattgaatggatcgggagcaagggttaagtgtatctgttttttttctaattctttctgtaagttgcttgtttcttgatagctgttcacccaaccgtctatacccacattgtcttctgcattcaatacacagcccaaccactctacaatggaaggagtttccggtaatcgttccttgaataaagtaatacctgtgttttccaattgttcggccgcttgaagaaaatagcgtgaatctgtccaaagtccggctttatccagtgttacgacaaccgtacctgccgaacctgtgaaacctgatatccatttacgtgcttcccaatgtttggggatatactctcccgaatggggatccgtactgggaataataaaggctgaaagcttgtgtttacgcatgaaattgcgcagactagctattctatttataatttccgatttcattttaataggtttataatggtttgtactagaaagcaaagatacgatttctagattattttaaataaataattgcggaaagttttgtaaataaagaaagtatgtgtaattttgcgccgcaatttgactatcggaaaatattaataacaacatatttaataattaaaaacaatgattgtagtaccagtaaaagaaggcgaaaacattgaaaaagcgctgaagaagttcaaaagaaaatttgagaaaacaggtgttgtaaaagaactaagagctagacagcagttcgacaagccgtctgtattgaacagactgaaaagagaacgtgctatctatgttcagaaacttcagcaagtagaagaataattaaaaactcgcacattctttgaataattgaattctttttcatatattcgttgctgaattgataagcgacgtttcttatgatgacagactcttttttggattatcttcgatttgaaaaaaactattctgaaaaaacaatagttagttatggaatagatttgaccaagttcgaagagtacttcaaggggaaagacgagaaagtcgattttacaacggtagatgctgatttggttcgtggttgggtgatgaacctgatggagaatggatatacatctgcttctgtaaaccgaaaactgagttcactccggtcgttttatcgtttccttctaaagaaaggtgtgatagaggaggatccgatgttgaaaatcattggaccgaaaaataagaaacctcttcctgtatttctaaaagaacgtgaaatggaccgactcttggatgatgttccttttaaggaggattttacaggttgtcgggatagaatggtgttggaaatgttttatgctacaggcatgcggctttccgagttgatagggctgaatgatgtggatgtcgatttttctgcgtttctgataaaagtaacgggaaagagaaataaacagcgtttaattccttttggagaagaattgcgaagggcgatgtctgtttatctgaaaataagaaatgaagtgttgcctggaaaggcagaggcgtttttcgttctaaaaaacggaaaacggatgtatcctggaaaggtgtatcttttagtgaaacggaacctgtcaaaagtggtgtcgttaaaaaaaagaagtccgcatgtgttgaggcatacttttgcaactgctatgttgaataatgaggcagagttgggcgcagtgaaggaattactgggtcatagtagtctgactacaacggaaatttatacgcatacgacttttgaggaacttaaaaaagtttatgaacaagctcatccaagagcgtaaaaaaaggaggtatttatggaagttagaattcaagccattcatttcgatgcaacagaaaaacttcaggattttattcagaagaaaactgctaagttagaaaagtattgtgacgatataaataaagtggaggtgtcattaaaagttgtaaagcctgaaactgcgatgaataaggaggctagtataaaagtgctggtgcctaatggtgaattttttgcagaaaaggtgagtgatacatttgaagagtcggttgatgtatgcgtagatgcgctttctaagcaattgacaaaatataaagaaaaactacgcggtaaataaaaaaaa

SEQ ID NO: 3870 - DNA, 69663 bp, Unknown
  gut microbiota DNA sequence
gggcgacaagatagaatcgcggagacgcttacctgtcatgaagaatagatgaaggatatctatagcgatccttcattgcaacttatttatattcagcaagtaatgcgctgatgaaggatttgaaggaaataattccttcattgtatcttgacgtgtggttgagatgggtactaaaactatctgtcggataaatagatcaatgtactagaattgacaatttcctgatcactatttgcgcaaataactatcgcttgttgtctgtatgcttttcgcacgttttacttttactttcttgccaaagtcaaacttatatataaggtttaagcacgctccttgataaggggttttattattttcttctattctgcttagattgttattggtaattgtggtcagatttcttcttttattcaaaatagcgtaaactgataaatttatgcagaacttttgatccaggaaatatttgtaaaggccggcattcatattgtatacactgtgatatattgtttcgcttctacgtgttcttctttctgccatccttctccactctgatatgcgtaatacatttggttgttggtatggttattataatagtcgccaccccatttcaacctggaatgtttgttgagcaagaagatataatttatttctgctttccataaatcagaaacagttccggtgttgctacatttattatcctcttcgtttttctccggatactgataaagataatggtgattcagttctttcgtttcatcacttctcaaataatcaagaactgtttgcaaagtattctttccgttttttgatttccaattatagttcaaactagcctgatatattttgtcattccctttccctttactatggtaggaagaggtatattccttttctgtttcttgtgtttcggaaaaagaagaagattttagtgtgcttccagcctgttttaccatacagttaagtccgatgctttgcagggtagttatatcatataacatgctgaatgtttcattgattcttcttatatttttacggtctatattttgatttacaatatggatattctggtggctgttatgggttatattttccgtgatgtaaggatctcctgcattagaaaggaccagattgttgtaaaagttccatttcccaagccgaaggcttaatggaaggcccaaacgttcccaatgactatttctttttctcatctctcctagcaaagagggtgaaccattgcctccgccatctgcatttggtggaaatatagggtatgatactcatttctatactcatcagcatggaaagggctctctttatgttaatcttaatacgtatggacattataaaagattgtcatggaatctttatgggaattatcggcctttcagctatggtgtgaataacaaacggaaacattatgggtctgaatcggaactgacggtaacttggcgtgtgaacaaacatttgggaattactggaaatatgaggtatttgttgggcactttggggtatgattccactacgcacgaaggaacttattacaatttctcatccggcaggatgaaggaccgaagtttctgcttttcattaggattcaattattatatgcaaggaaagaatttcaaatataggaataagaagagtttgcagagtacggagcaggggataaagttgtgaaataatttttgtttgatatgttgcaggcacgggatgcgtatgatattagaatcgcgggaacgtttacgaagagcgcatgaggaatgcgcgaaacttgagagtgtcatctgatgtcatagtacaggctacagggcttcctgaagaagaaataaaagccctttaattgaattgcaaagggtttggccggaaagaatagtttctattcgtattcgtgtttccgtttcggattcatcggaaaccagcctttcagcacgcgttcgcgttgctcgaatatctccttgatagtccagaaagaagagaaggagaagacacccaataaagaggaaatcaggatgtcactgataagcacagtccctataatgcctgctatgcccagtaccaaaaatatccaccagcaccgtgtaccccaataatattcggccttgaccacgatggggtggaaaagaccgattattaaaaaggtacaaatgccgatggcaataccgcctaaatggtattcattcagccattccattctttcttagctttgaatgggtatttcttttttgatgctctgctccagagagatcagggtctcggtagccgtaacgccgggaatttcctgaatctttgagttcagcaagtccatcaaatgctcgttatcgcgtgaataaagtttggtcagcatggtatagggacctgtagtgaagtggcactccacaatttcgggaatcttcttcagttctgccactacgtttttgtacatggaacctttttccagcttgattcctacgtatgtacaggttctataccctaaactcttagggttcacatgatatcctgaaccgataataactcccaaatcaattaatctttgcacacgctgatgaatggctgcgcgtgaaactccacattctgctgcgacatctttaaacgggatgcgggcattttgggatataatttctagaatttgtctgtcgagactatcaattttctccataatataccgattttaatgttatcaatctgtaagcaaatataggaatactttttaatttatctactattttgcaagaaaaaacaggatttctttgaaaaaaagtgcaataagaggagctaatcacctattttcttctctatttcgccgattttccctcttctttcaaatgagaaggtatcgctatgtgtatctaaatagttcaacaggaatagcgattttcttaacaaatatttttgttcttcggactctttcaacaaagcatcctgatagagcagttcggataacatgtcgatgcgcgtgagcaattcctcgccaccatagttctgtcccatctcgttcagtatatattccgcatcctgatcataatagaaggtggaaggatgattgaagtaggcacgataaatgctttgaagttgcaattgcagctcgggaccgtcctttttatctctttcttctaccaacttttccaatgcttcgaaaaattgttgaagcaaccgcataatgtaatctctttgcagcatgttaattgtcctcttcgtttttatgggttagtgttactaatactttatctatccgggctccgtccatgtcgactatttccagtgtgaagtcattccattccatggattcaccggtcttgggaatgtggcctagttgttgcaggatgaggccgctcaacgtgttgtaattataatcggggtataaatcctccatttcgaaatgactcagaaagtcatagaaagaacattggccgtctatcaaccagcttccgtccttgcggggaacgatatcggggtcttccgagtcactgggcaaggtgcctaccagggcttccagaatgtccttcatggtgatgatgccttgcagactgccgaattcatcacagattaatccgtatttgatgttgtgctggcgtatttgttccaatactttatatacatccatgttttcgtggaagtattgtgccggacggatcacatcacgcagattgaattcgcaactgttcagcttcccgaagaggtctttcaggtaaactactccgatgatgttgtccagggtgtttccttgagttacagggtaaacttggtacaggtgttggcatacgatgtcatacagctgcttgttgttcatgtctatgtcaatggatacgatatcgctgcgataggtcatgatggtgttgatactgcggtcgcccagagagaaaacacggtccacaatatcctgttccacttcctgcacttcaccgttctcggttccttcgtctatcatggatttgatttcctcttcagtcactttttcttccgctgtgttgatatgcagcaggttgaagataagtgaagtgcttttggcaagtatccatacaaaaggagaggcgatgacggacagccagtacatgggacgtgccaatagcttggcagcacgggtggaggcactcatgccaatgcgtttgggcaccagctcgccaaagataatagtgaggtaagtgaccaggatgacaatcagggtttgagccaataaataggcatatgtggcgggtacgccggcgtcagtcagtatgttcccaaagtcggtggccagcacgtcaccggagtaaataccggtcaatataccaatcagggtgattccgatttggatggtggataaaaacttgtccgggtcattggcaagctttaaagcgatacgcgctgtagagcttccatgacggatatcattggacaaactacttttacgcgctgagatcagggcgatttcggacatggcgaataccccgtttaataagataagtgcgataataatggcaatttccatgtaagaatttacgttttgttttgctaacaaatgtactaagaattgtgttttctctttcttcttttagatttaattaatgaattatctgtcatttgcgctatctttgcggtgtctatacttagaaaggagtaattatgcatccgttggaactattcaaatattgtccgaagtgtggttcgccgcactttgaagtgaacaatgagaaatcaaagcgttgcgctgattgtggctttgtgtattatttcaattccagtgccgctactgtagcttttatcttgaatgataagaatgagttgttggtgtgccgcaggggaaaagaaccggcgaagggaacattggacctgtccggcgggtttattgatatgcatgaaaccggcgaggaaggtgtggcacgcgaggtgttggaagaaaccggcttgcaggtggaggaggctgtttatcagttctcattgcccaacacttatctttattcaggatttctggtacatacattggatctgttctttctttgtaaagtgaaagataccagccggataaaggcgatggatgatgtggcggagtctttctggcttccgttggatgaagtgaatcccgaagaattcgggctggattctgtgcgtgaaggagtccggcgttttttgaaagaacataaactttaatgataagatatgaaaagaaaaaccttattgatggccgcattgatgggaggctgttccttgcagggaatggcgcagcagatcactcccaaggatgtggcaggtgacaaggaatataaccgggtatgccgggaatatgagttgaaaggcggggacagcatggagctgttacaggcttatctggacaaatatcctgattcccgccataaaaacagggtgctgtcactgattgcctctgcttattttatggagggaaaatacaaggaggccattgccctgttccggtcgtgtgatctggaggctttgcctgataaggaaagagatgattgtgccatgcgtctggccacctcttatctgaaagaagacaacctgcgtgaagcggctgtatggtttaccttgctgaaagaggtaagcccattgtatcaggatgacgctgtttataatctggcttatattgattatgtggagaaacgctatgacaaggcgctgaaaagtttccagtctttgcagaatgatgccgtatatgcagcattggttccttattatataggagagatttatttggtgaaaggaaattatcagcaggcccgtactgtggcaaaagcgtatctggagcaatatccggctaaaaaggatgttcctcagatggaacggatttggggagaggcttgtttcggattgaatgattaccaagcggcgatacctcctttggaaagataccgtgaaagtgtttcccacccgcagcgtaaacctttgtatgaactcggtatgagttattattatactggtgtttattccaaggctgccgctactttgggggaaatggcttcggtacatgatgccttgtcacagaatgcttatctacacatggggctggcttatttgaacttgaaggagaggaacagggcacgcatggcattcgagcaggctgccaatttcagttttgatccgaaagtaaaggaacaggctctttataattatgctttgtgtattcatgaaacctcttattctccatttgccgaatcggtaaccgtgtttgagcgttttctgaatgagttcccgaattcaccttatacggagcgtgtcaatgattatttgatagaggtgtatatgaatacccgcagttatgaagctgctttaaaatctatagcaaagattgagcatccgggcacacgcattatggaggccaagcagaagattttgttccggctgggcacacaggcatttgcgaatgcccgtttccaggaggctctggagctcttcaaccaatcgcttgctgtggggcaatacaatcaggcgacaaaggcggacgcttatttctggaggggggaatccaattatcgtctggaccgttttccgcaggcgggtaacgattaccgcttgtatctggaatttgccaccagtaagaacggacaggaatatggtttggcgctctataacttgggatatacttatttcaaacagaaaaattatggaaatgcgggcacttggtttacccgttttgtggacaggggaagtatcaatgaacgcaccatgcaggcagatgcctataaccgcataggtgactgcaacttctatgaccgccgttttgaacaggctcgtcaggattatgcccgtgcggtggagattgatccgtcactgggggattactctttgtatcaggaggcgtttgtgcgtggtttgcaacgtgattacaatggaaaagtgcagacgttgaaccgcttgatttcggattatccggaatcacaatacatggatgatgccctttacgagcagggacgtgcttttgtgcagatggaggataatgccaatgccattgcccgtttcaatattctggtgaagaaatttccggagagcaatgtcgcacggcgggcggctaacgagatcggtttgctatactatcaggatgacaagtatcctgaagccatccaggcttataagcaggtcatagccggttatccgggcagtgaggaggcgcgtttggcgcagcgtgacttgaaatcgatctatattgatttgaataaggtggatgagtatgccaattttgcttcaactatccccggcggtgccaactttgatgtgaatgagcgtgactcattgacctatgtggctgccgaaagggtatatatgcggggtgaggtcgccgaggcccgcaacagctttacccgttatttacagactttccccgaaggtgctttcagtctgaatgccaactattatatcggtttgatagactataatcagaaagcttatgaaagtgcagcccggcatttggataaagtattggaatatcccaacaacaaatattctgaagatgccatgttgatgggggccgaaatggcttatacggcgaaggattatgaaaaagccttgcatatttacaagcaattgaaagataaagccgcttctatggagcgtcgccggcttgcaaaaaccggaatgttacgcagtgcgcatatgctgggaaatgaggaagagattatctttgccgcaacagatttgctggccgatactaaactggcgccggaattgtctaacgaggcacattattaccgtgcaaaagcttatttggatgccggcaagacggatggagctatggaagatttgaaggtcttggcgaaagacacccgtaatgtatatggagcggaggccaaatataaagtcgcccagatttactttgacggcggacaaacggataaggcggagcaggaggtgctgaattacattgaggtaagtacaccgcatacctattggctggcacgcagctttgtgttattggctgatgtgtatatgaagttggggcgtaacttggatgctaaacaatatttgctttcattgaagcagaactatcaggccgatgatgatattgccggaatgattgaaagcagactggagaaattgaaaacagagaattaaaaattaaaaaataagtgctgaatatgataagtaagaaattgtcaattgtccattgtcaattgtccattatattggcttttttgcctctgtctgttgcatatgcgcagcaagatagtacgttgaaccgcactgtggtggtagagaatgagtataatcccaatatcatggatgcctcaaagattaatgtcctgcctaaggtggaggagccggctgtaatgaagaaaggcatagaatatgctacagccttgcgccctgtttcggcctggacgtatgaaagtatgtctcctataactcgtgaatgggctatgaaccgcgcgaaacgtggatatgtccgtgccggatatggaaattatgggaatgtggattttaaggctgggtatctgtgggatatcaccggaaaggaccgtctgaaagtcggggtatctctggatggcatgaacggaaagctgaagcattggaatgctgaggattggaaatcacgtttttattctactgagttccgtttggactattctcatgatttcagcaaggtaactttgaatttaggtggcggcctgcaatcacaagtgtttaactatatgcctgattccgaaatgcatacggcttctgccagagctactgataaacagcatcatactttaggcgattttcacataggtgtttcttccagagatgaatcgcttcctttgcaattcactttgcagaccggattgaagtattttggtatcaaatatccgctggattattcaggcaatgcatctacaggtaaggagaagattgtccacaccgaaggagatgtatggggcaagctggataatgagcaacgggtaggcatccgtttcgagatggataacctgttttattcttcggacagtttaatgggcaactatacttcactgggtttgaatccttattatatgttggaaagtgatgactggcgggtccgtgtcggtgctcatgtggattggcagtcgggagaggacagtggtattgatgtgtctcctgacgtgaaagccgaatacttgttctcggagagttatgtgctttatttacatgcgctgggagggcgtgaactgaatgattatcgccggttgaatgctttttcaccttattggtctttaaacgcccggatgccttctacctatgtgccactgaatgctacattgggttttaaagcatctccggtaaatggtttgtggtttaatgtctttggtggatatcggatcagtaaagatgagttgttttgcaatctggtggatgcggacgggtattattttactcatttcttgcaggataaagcgaaaaccgcgtatggaggtgctgaattgaaatacggttataaggactggtttgacgcttcattgaaaggtacattttatagctggaagacagacaatgaaaatgaagagctgtatttagtgaccaagcccaagtttgaattgaatttctatgctgaggctaaggtttttgaaggattgaaggttaatttgggctatgaatatgtacagcggaaagaatatgtgatagaagaagggaatagcagcagggattttggtttgggcaatatcagcaatttgagtgtgggagccagttatactttcctgaaagatctgtctgtttttgggcgtgtgagtaatctgttgaataaacaatattattatgagtacggctatcctgctgaaaaactgaatgttctagccgggctttctttggctttttagttaaataggcactcggaaaggacttttttaagaaaaaaaagcagaaacataccttattatataggtgtgcttctgctttttttctacttttgccccaaaataaaatggaatacatagtattatgcaaaaaaatctagtaatagttgagtcacccgccaaggctaaaaccattgagaaattcttgggcaatgattataaagtcctttccagttacgggcatatccgggatttgaaaaagaaggagtttagtatcgatgtagagaatgggtttgagccgacttacgagataccggcagataaaaagaaattggtagccgaattgaaagcggaggcaaagaaagctgatatggtatggcttgcatccgatgaggaccgtgaaggagaagctatttcatggcacttgtttgaagtcttggggctggaccctgagaagaccaagcgcattgtattccacgagataaccaaaacagcgatactaaaggccatcgaaaatccgcgtgacattgatgtgaatctggtaaatgcccagcaggcacgccgtattctggatagaattgtaggttttgaactctcaccggtattgtggaagaaggtaaagcctgctctttctgccggacgtgtgcaatctgttgccgttcgtttgattgtggaacgtgaacgtgaggtgcatgcttttgtcagtgagccgtcttatcgcgttacagcagtgtttgaagtacctgatgtcgatggaaatgaagttgaagtgaaagcggaattgtccaaccgtttcaaaaccaaggaagaagcacaggctttccttgaaacttgtaaggatgcgcagttctctattgaagatataacaacccgccctgtgaagaaatcgccggcggcaccgtttactacttctacgttgcagcaggaagctgcccgtaagttgggatttacagtagcgcagaccatgatggtggcacagcgtctgtatgaaaacggacaaattacctatatgcgtacggattcggtgaacctttcggatctggctttgaataccagcaagcagactatcttgtccctgatgggagaaagatacgtcaaagtccgtaagtttgccaccaagactaaaggagcacaggaagcacatgaggctatccgtcctacctatatggagaatgaaacggtgaacggaaccggtcaggaacagaaattgtatgaactgatctggaaacgtaccatcgcttcacagatggcagatgcggagctggagaaaacaacggctactattgtaatcagcaacagtagcgagaaatttatcgctaccggcgaggtgattacttttgacggtttcctgcgtgtatacaaggaatcatacgatgatgacaatgagcaggaagacgagggccgtctgttgccgcctctgagcaaaggggaaaaactgataagaaaagaaatcctggcgactcagcgctttacccaatgtccgccccgttatacggaagccagcctggtacgcaaactggaagagttgggcatcggtcgtccatctacatatgcacctaccatttctactgtgcagcaacgcggttatgtagaaaaaggaaacagtgaaggtgtgaaacgcccgtatgatatcttgaaactgaaaggcggcaagattacggaaactaccaagacagagatgacgggaaatgaaaaggccaagttgttgcctactgataccggtatcgtggtaaacgatttcctgatggaatactttcctgaaatcatggactttaactttacagcaaatgtggagaaagagttcgatgaagtggcggaaggagaaaaggaatggactggtatgatggacagtttctataaaggcttccatccgttggtagataagaccattcactctaagactgagcataaggtgggtgaaagggtattgggaacagatcctgtaagcggtaagccggtatcggttaagatcggtcgtttcggtccggttattcagattggtactgccgatgatgaggaaaaaccgcgttttgcgcagttggcaaagggattgtcgatggaaaccattacgttggaagaagcattggatgcgttcaagcttccccgtacgttgggggattatgacggccatacggtaacggtaggagtagggcgtttcggaccatacgtgcgctatgacaaactgtttgtttctattcctaaaggaacggatccgatggagatttctttggatgaggcggtagagttgatcaagaataagatagaagcgcaggagaagaagtttattaaagtattcgatgctgaccctgatatgcaggtcttgaacggacgttacggcccatacatcagttatcagaaaaagaattataagattcctgagaatgtagaaccggcagatttaagtctggaggcttgttttaaggtgattgaattgcagaaaagcaaggcggaaacgcgtaaaacgaaagcggcttcaagaaacaggggaaccgtgaatatggaagaggagtccgaaaagcccgaagaatccgcaaaaagtaaggcggcttccaaggtaaagggcactgcaaaagcaaaaaaatgacacgtatatttttaataggatatatgggcgcgggcaaaacgactctaggtaaggcgtttgcccgtgaaatgagtctgaatttcattgatttggactggtttatcgaggaacgtttccataagaccgttcaacagctgttcttggaacgcggagaagacggattccgggaactggaacggaaaatgttgcacgaagtggccgagtttgaagatgtggttgtttcgaccggtggaggaacaccttgtttttttgataacatggagtatatgaatgattgcggtgatacggtgtttctggatgtggaacctgccgtattgttccgccgtctgagagtggccaagcagcaacgtccattgttagcaaataaaagtgatgaggaactgatggattttatctgtgaggcgttacagaaaagacatccgttttattcaaaggcgaaacatctgtttaaggctgatgagctggaggataaaagacaaattcaagcctctgttgacagcttgagaaagaaattgaataaataattatatatagtaaaatacacactctttgtacagaagaagaaatgagaaaatggcgtattgaagattcggaagaactctacaacataacaggatggggaacttcgtactttggtatcaatgacaaaggtcatgtagtggtaactcctcgtaaggacggcgttgaggtcgatttgaaagaattggtcgatgagttgcaattgcgggatgtggcagctcctatgctggtccgttttccggatattctggataatcgtattgaaaaaatcgcgaactgctttaagcaggcatctgatgagtatgggtataaggcccagaattttatcatttatcctatcaaggtaaatcagatgcgtcctgtagtggaagaaatcatcagtcatggaaagaaattcaatttgggactggaagccggttccaaacctgaacttcatgcggtgatagctgtgaatacagattcggattcattgattatctgcaacggatataaggacgaaagttatatcgagctggctctgctggcacagaagatggggaaacgcattttcttggtggtggagaaaatgaatgaattacgcctgatagccaaaatggcaaagcagctgaatgtgcgtcctaacataggtatccgcattaagctggcttcttcgggaagtggtaaatgggaagatagcggaggagatgccagtaagtttggcttgacatccagtgaattgctggaagcgcttgattttctggaaaagaaagacatgaaggactgtctgaaactgattcattttcatataggcagccaggtgactaaaatacgccgtatcaagacagctctgcgtgaggcatcgcaattctatgtgcagttgcatgtgatgggatttaatgtggaatttgtggatatcggcggcggtttgggtgtggattacgacggaactcgttctgccaatagtgaaagcagtgtgaactactctattcaggagtatgtgaatgactctatctctacactggtggatgccagtgacaagaatggaattcctcatccgaatattattaccgaaagcggacgttcactgaccgcccatcactccgtgctgattttcgaggtgctggaaacggcgactctgcccgaaatggatgaggatttcgaagtgggtgaaaatgatcatgaactggtacatgaactttatgagatatgggataatctgaatcagagccgtatggtggaggcttggcacgatgcacagcagatacgtgaggaagcacttgatttattcagccacggtattgtggatttgaagacccgtgcccagatagagcgtctgtactggtcggtgacccgtgagatcaatcagattgctttggggctgaaacatgcgcccgatgagttccgcaaactggacaaactgctggctgataaatatttttgtaatttctcgttgttccagtcgttgccggactcgtgggcgatagatcagatattccctatcatgcctatccagcgtctggatgagaagcccgacagaaatgctaccttgcaggatatcacttgtgattcggatggaaagattgccaattttatctctacccgttatgtatcgcatgacctgccggtacattcgttgaagggaaaagacgcttattatataggtgtatttttggttggtgcttatcaggagattctgggtgatatgcacaatttgtttggagataccaatgcggtgcatgttacggtggatgacaaagggtattctattgatcaggtaattgatggtgaaacggtggccgaggttttggattatgtacaatataacccgaagaaattggtgcgtacactggaaacctgggtgaccaaatcagtgaaggaaggaagaatttctgtagaggaaggaaaagaattcctctctaattatcgttccgggttgtacggatatacttatttggaataatagcatgaaagagaaactgactatcataaaagtaggtggaaaaattgtagaggaagagtctacacttaatcagttgttggctgatttctctgctatagaaggttataagttgttggtacacggtggcgggcgctctgctaccagactggcggcacaactagggattgaaagcaagatggtgaatggccgccgcattacggatgcagaaacgctgaaagtggtaaccatggtatatggcggactggtgaacaagaatattgtagccggtcttcaggcaaaaggtgtgaatgccattggactgaccggagccgatatgaatgtgatccgttcggtaaagcgtccggtaaaagatgtggactatggctttgttggtgatgtggagaaagtaaatgccggttttctggcgacattgatccgtcagggcattgtgcctgttatggctccattgacccatgacggtaaaggaagcatgctgaataccaatgctgataccattgccggagaaaccgccaaagcattggcgtccttgtttgatgtgacattggtttattgctttgagaaaaagggcgtattgcgtgacgaaaatgatgatgacagtgtaattcctgtcattactcctgaagagtttaaagaatttgtagcgcaaggcattattcaaggagggatgattcccaagctggaaaattctttttctgctattgatgcaggagtcagtcaggtggtaataaccttagcatcagccattaatgaaggaagtggaaccgtaatcaaaaaataattcaaaaaaaacaggcgggtgagtgtaactttagtgtaactcacccgtcattattacagagcaatgcgagagatcagtttccgaaacgatattctgcccctgaaagacaagctctacaggttggcgcttcgtattacgctgaatagtgctgaagcggaggatgtggtgcaggatacgatgatcagggtatggaacaagcgggatgaatggccgcagtttgaatccatcgaggcatattgcctgaccattgctcgtaacttggcaattgaccgcagccagaagatggaagcgcagaatttgcaactgacctctgaagtgcgggagatgcctgatacattgacgccttatgaccggttggcgcagaacgaacaaatacagttggttcaccgtctggtcaatgagcttcccgaaagacagcgtacaattatgcagttgagggatgtggaaggaaagagttataaagagattgcagatattctgcagattacggaagaacaggtgaaagtaacccttttccgtgcccggcagaagataaaacaaagatacactgaaatagaggattatggattataaatatattgaacagcttttggaacgttattggaattgcgaaacttcattggaagaagagcaaatactacgttcattctttcgtcagaaggaagtgcctgctcatttactccgttacaagcagttgtttgcttatcaggatgtggagaaggagaaaggtttgggcgatgattttgataccagaatcctgacccggatagaaagaccggtggtaaaagcgcaacgtctgactatgcgtacgcgctttatgcctctgtttaaagcggctgcaatgattgccgtgttgtttcttatgggtacagtgatgcaacacgctatggaaggcggtgatagtgatacggtatcggtacacgatgagtatcaggattctactaccgatccccaagtggcatacgaacctgtattgcctacagatacggtgacaaagattaccgctgatgataccggtacagggacagggaaaacaaattagaacattttcatttgcttttatataaatatgatagttagtgcttattaaaacaactttttaattcgaggctgtgaagtttcaattctctcaaattttaaattaactaactaaataattttaaaaaggattaccgcgtgagcagtaatccttttttgcttggtagataatttaatgtaaagagagagttatgaaatgagttatttgctcttaacgcttccgattccggatttttttagtccggtaacccgaggggcaccgtagtagtttacacttcctactccctgggcactgatatttatcgtcccggatgcataacaagaaacacttcccacaccgttttgttcaactaccacatcagaaacaatcatgtcttttgctttcaggctgcctactccttccaaataatatgtcgcatgaccggcctgcccctttaaattgatactgcctactccttcttgggatactttgatgcaacgtgccattaatgcatttgcttcaatactccccacaccttcggcactgatagaaagatctgttactttcacactgtctttcagataaatacttcctacacctctttgcttgatattgcataaaaccggactggtaattgagatattgatttttgaacttttgaagtttttgaatttgtctttatccatactgatactcagcgtactgtctttgaccatgacaatgagttgggggatgtaattatccggaccgtcggcttctactttggtcgcattcccttgagtaaagacaatgttggcaggtgctttgttctctatcttattgaaaggagttacgctatattttttggtcattttactcttgctgggtttcgggcctgatgatatgtggaaacagcctgtcatcattgtgattgtcagaaaaagactgaaaaaataaatagtttttgttctcatggtaatatatatatttaattggtttctgttaattagacggtgaagattcctggaaagttgcaaatctctgcctttttttattggaaagctgtatctttgtatccgtatggcaactaaaagagtacttccggataaagattttgaccgtattatagtgcgtacacacaagctggcgcgtaatgttactatgcgggtaaagcccgacggactgcatgttactgttcctccttatagtttaagcagcaaagtgctggaggtggtggagcaatacaggcaacgtctgttggaggactggaggaaagtgagcaagaaaccgattgatctaaattttcgtattcacactccctgtttccgtttatggctggagcaaggtaactttacttgcttttccgtacgttttaccgaggagggagtcaagattatctgtccgcggaatgtggatttttctttacctgaagtacaaaggctggtacgtaatgccatcatccgtgccatgaagaaaaatgcacaagagtatctgccacctcttttatctgccttgtccgaacagtatcatttgccatttaaacgtgtgaagattaccggcagcaagggaagatggggaagttgttcggggacaggcagtatcaatctttcctgttatttgatgttgttgcctccccatttgatggactatgtactgttacacgaattgtctcataccaaggaaatgaatcacggtcctcgtttttgggaattgctggatagtatgacaggagggagagctcgtgccttgcgtgcggagttacgcagatttaatactgatttttagaaccattaaatagaattacaatgaaaaacagatttttaagcatgcttattggggctgtcttgttcgttctttcagcagcggccgaaaattatccttatcggagtgatgtgctttgggtaactgtacccgatcatgccgactggttgtacaagacaggcgagaaagcgaagattgaggttcagttctataaatatggtattccgcaagatggtgtggaggttttatatgagttgggaggcgacatgatgccttcggataccaagggaactgtaaaactgaagaatggaaaagcggttatttctatggggacaatgaaagagcccggttttcgtgattgtcgtctgacggctaaactaggaggtaaaacttattcccaccatatcaaagtcggcttctctcctgagaagcttcaaccctatacccagttgccttctgattttaatgaattctggaataagactaaggcggaagcagcccagttccctctgacttataccaaagagtacgtagagaaatattctacggacaaaatagactgttacttgatcagacttcagctgaataagcagaaccagtgtatttatggttatctgttctatcctaaggcggaaggaaagtatccggtagtactgtgtcctccaggggccggtatcaagacgatcaaagggcctatgaggcataaatattatgcggaagaaggctgtatccgctttgagatagaaatccacggcttgaatccggagctggatgaggacactttcggcgaaataagccgcgctttcagtagtcgggaaaacggttatttggtaaacggcttggatagccgtgaaaattattatatgaaacgggtttatctggcttgtgtccgcagtattgatttgctgacttcattacctgaatgggatggtaaaaatgttattgtgcaaggggggagccaagggggagctttggctttgattacggcaggacttgacaagcgtgttacggcatgtgtggcaaaccatcccgctttaagtgatatggcaggttacaaagccggccgtgccgggggatatcctcatctttttaagaatacggtagatatggatacacctgccaagatgaagacccttgcatattatgatgtggtgaattttgccaaacagattactgttcctgtttatatgacatggggattcaatgacaatacttgtcctcctactaccagttacattgtctataatgtactgaactgtccgaaagaggcgttgattactccagtcaacgagcactggacttctgaagacacagaatacgggcatttgctttggataaagaaacacttgaaataaatcgatggaaatagatgtttttaagattataattgctatatttgtttagcatagtgtagcaactatctgtattttgatgttgaacccttaaatcgcaaacagatatgaccgacctcaccattctaatcgctgttattgcattggcattgtggccgcttgcatttttagttcttcgcatccgtcatgagcgtaaaaaacgtagaaaccgtttggaccgtatgacaaaggaagacttggaggatatcggtacggaagagctggttatagctgtgctcaaaaagataggctgtcagccggaaaccaatgaggaaggacatattgtctttaaatatcaaggtgatgatttttatattgcggtagaggatgaggcccggttcatcatgatatggaatccgtggtgggcgtctatcagtatggataatccggctttaccttacttaaaagagattgtcaatctggtcaatgtggattcgttggtgaccactgtctttacggcggatgaggatgagaaaaacgtggggcttcattccaaatgtcatacggtctttactcccaaagaaggccaattggacgaatatctgaaagctatgctcgatcatttctttgttactcacgatgctatcaagcaaaatttgcagcaactgggtagtgccgcttcggaaagtgctaataaggaacggacaaaggtgaaaggatttgctgcttataaagagaacagtacgccactgtcttctgtcgaagaagagaaaaaataaggaatgttttcattcgttccggcttttatgaaagttgctttgatgtatggttcaaagcaactttatttgtgtttatacttatgctaaatcctttttctcttaaggattttttttcttatctttaagtccttgcttcttgaaatcctgaagttcaacaagaaggaagataaggtggagggcatgtttgacaaatgcctgttcgttctgcgtaatctatcttcccttcttgagcgtctgtgtgcgttgcagagccgtgtattcgatcgttttttcgaggctgccgagattgcgaaattcacctctagggagtttggtgaacattgggaaaatttgaagagcttccgtgattggtatagcgtaatgtctaccccattgaagaaaggacgtgaggaggaccttaaagagggactcgaaacaggtctttaggaaggatttgaaacaggtcgtaaggaagaatgctaaaaatgaaacaggtcggtattgcatctgatgtaaattgcccaggttaccggtttatcggctcaggaaataatgtttctttaagttcttttctggagaaattgacttcgtaaagtgattaagttggcttgatgcttgaaacttgttgaccgatttccgttcaaagagtttgttcaaattatttcggtgaatcttttttaaggagagaatctcttttttgtgatagtaatcaattgattaacaattgattgtttccttcttttatatatgcttatttgtatatctcttaccaagagatatacattttctgtgcaaaaataagcaaagttttgagaactaatacatttttggcaaaaaaaataggaatttatataaaaaataagcttccaagtccatttttatactcctttatcctatttgaaataggatataatatgttgatatattgtttattagttactttctatagatctcttggtaagagatctatagaaaatgtcgtttttaagttcctttattatatgataaagtatgtctttgaagcgatgagaatgaatgaaattaacatagagcagatggaatatctatttctaagacgtaaacgaagtagcgccgtttccgagcggcagaagaacttgcttttcaaggccgcccagcggcattgggaggaggagtttgtcggcaaggaagcgaatattcgtaaagtggactgccgtatatataaagctatattgtaccagcttgagatacgtcagatattccttgacacttcgctttcgctgaaaaaactgagcgatttgcttgaaacaaaccagacctacctgagtaatgtagtaaacaaatactttggctgtaacttgaaggagcttgtgaacggctatcgtgtggaatatgccaaggagcttcttagtttcggtcgttgtgcattgaatgacttgcctcgtagttgcggtttcgcttctaaaagcgctttctattcagctttcagtaaggttgcgggtgtgtcacctttgtcttatcagtcacgggaaaggaggaaacgggaactacaggtaataaacgaactaagatattaataatgagattaatatgtataatcaattttagttttttaaatttataaatttaaagtttttctattatgaacaaaaagtttttaagtgcaatcctgttcggagccttgatggtttcgtcaacgggaacatttgtgtcttgtaaagactatgatgatgacattgaccagattaatcagaaattggacggtgttgaagcaactgtcgcagaccttcaaaagaagattggtgatggtgcttttgtaaaatcaataactcctactgccgatggttttactgtgacaatgagtgacggttcttctactactattactggtatcaaaggtgataagggtgaagccggtaaagatggtgctgaatggacaatcattgatggctattgggcttgcaacggtgaaaaaaccacagtaaaggctgaagctgttgacggtaaagacggtcagaaagaagttgaaaagagggaagatggttggtatctgtggaatggtactgcatttgaaaaagtaacggttgatactcctgctgttgtaggtgtaccttactatcaagaagatgcaacagatcctaattatattgttatgcacattttcgatgcaaatggaaagaatgaacagactgtccgtttgccgatgactgaaggtttggctcagattgctatgctaagtaataaagatttgactatctactattctatcgctactgctgataaagctcttcaggcatgggaaggtcctaaaggtgctcctgctaaaggtgattatatgatcacttattctgatgactctttgatggtccaggttgctcctaacaactatgatctttctaaaactgcattgaaattggttaattctaagaatgaggaagctcctgtaactttaggtgctgcggttgcatacgaaggtttgtacactagagctgctgtttcagcaaatggcttgtaccaaattcctttctctattgaaacaattactgatgaaatcgtaaaagcatacagtgaagtagatggaaaacgtcctgctttggcactggtagcaagtgataaagtacgttctacttatgaaacctcattgattatagagaaacctgaatctatagattcttggtctttctatattaacaagaagaataatacccccaataaccgtattgaaccaggtaagactggtacattgaaagttaatggagaaaatgcggataaactgtatgatgctttcttgactatggatactaaaacatatgctaatgccaaggcagactctattaaatatggtattaaaactgatggtttgactatctcttgtagtgcaaatgctaagtattctcttccgtttgttgtacatacactggatgtgactggtaagattatgaaaactgaaggcgtttatgttcaatttagtgaagaagctgctgaatcaactattacattggcagaacaagctcatattgcaacagctaaggttgaagatcagaagttggtagtagatcttgctgcttatttcgataagatgtctgaagctgaccgtattctttggaatgctgatgctagaatgcttcttaataataccaatgtttcgtttgtttatacagatgaatctaccggtaaggaagaaactgtcgatgttgtatctggtttgattgctgggtttacaaaactgaagaaagatggtaagacggaagctactaataatgcagacatcgcaaaattaggaatcaactttgttaataactatggtgaaactatgttgggcaatggtgtgtatactgctaagattaccgtagagatcaatggtgaaaatggaacaaaagaaactcagactattgttattccgttcactatcgctaacccgactactgctgaaatcactagtcagtatacattcgatccagcattctatgcaaatggtgttttgactgtaattgatggaacatcaatcgatttgagcactatgatttctgttaaggacggtgctgctattgactatacaggcttgaaggctgctaaggaattgactgttagcggaacagtcttgacaatgggtgctgacgctaaggctaatacagcttatgatgtgaaaggcttgaaagttacttacttgggtggtcgttcatatgatatgccagcattcaaggttaagtttgtggattctaagacttatattgctgatatggcaaaggcaagtttctcacttgtttcaggtaatgccgaagatgctaacagcgataaagtattctatgcagaaaaggctgattctaaagcaggaattgtcaacttctataaggtaactaatgcaggaggtaaatttgttgctgatgataaagtggttattgtaggatttgatgcattggtagatggtactgacaagacatttgcttctgacttgattaatgttgaagtttttgagaagaatgatattgtagttacagctcagaagagaatcacagtagatacaaatgtcgttgttcctgttaagttgactgtaactaatgcagatggcacaaatgcaactgtatacgcttcattcacagtaacagtaaaagcatacccggttcagtaatcattcaccttgatgattgatatttgaaaaaggtgacactatctctttcaagcggggaaagcatacgtatccggcaacgggcgtttctttccccgctttttttaaaggaaatgactctgaagaatagtttgtttctttcccgcttagagtctgttcattgaatttgtaatcaataaattgtatataccatgaataaaatagaagagataaagaaaaaaatcagggatttgaagttaaagcagaagatgacaactgggcgtttggaatggaacgatatacagagagaaatagacattttgaataatgagttaaagcaactagaaacagacaaaccacaatatggaaaatagattatacttgtacaacttaggtataaagacatttggcggctttgcaacactgggtggggttatacaggctttgcaactatttacgcagcctgatcttgatattaaatcaattttgctttcgtttcctgcgtgggtagtatatgtatttgtatgcctgactattatttttgctatgttgagggaacggtacaaatcgatgagtcaaagggtggaagtattgaatgttaaattgaacgagcaagatgcaatgattcgttcattgcaggaaatgatgaaaattgtgccattcaaaggacgctttttcttgaccacagagtatttatacaatgaattgggggaatatatacagaataacattgatattgattcaatagagataaagaatacaatagaaaaaagaggtatgggaaacaagagagattcctttgtccgattaaatataagaggtgttgtttcgcataaaatcagtacattccaactgctggtggcaggtgataccattgttaactttgaagatataaacatacaagcgttcgagcgtgttggtgggaagcagaaaaaattatgtgcaagaattgctgataacggacaggattctttgttgaagcaggttgttgtttcttatggcaaagtaaaaagtcccggtagtattgttgatttgatgattgaatggtgctggcctaatatgttgaatattacagattgcgactatactacattgcctaattttttggcaggtacggtgaaacatctgaaaatgtctttggaatgtaaagaagatataggttttaaatcggcaagtatatataaatataaagtcggtatggataaggcccagttgattttggacgttgatatgtccgaaatcacagatacgatatcttatgaagaagataatccgttaatgaattctacttatatattgtattacgaagttgccagatgattggaaatctgaaaaaatatatagataaggcatcttttatggaacatatagatgccaagctgcggcagaatgaacctatgattatagattcattcgtcagtaataaatgtaatctgaaatgtaggcattgttattttggagatgcccggcccatatcagagtcggtttctttggcaagatggagaagttttcttgatgaagctattggaatgggtatgaaacattttcatttttcgggtaaagaatcttttttggataatagaatctttgatatcctgaatcttttagcggaatataaggaagataggagaatattttatggagttgtttcaaatggaatgagtatggatattcaggggtatgacgaagttcttgcaaccaacatctcataccttgaaattagtcttgagggctctggaaaatacaatgatttgataaggggtgagaatggatacaatacggtttatgagttgattgaaaatgtggagcatcgagataaaataaacattacttctactatttttgatgataatggagctgatttattatccatgttgcttgcatattggaaattaggagttgataaatttaattttgctcctatcatgtattattcaccatttgaaatgaaaccattgaaaagtttgtcgtgtgaatccttgcttggttttgtttcgctctgtcttgattttatgaataatgataacagtccggatgctattgatataaggatttgtatgacgaaagcaatggcgtatgaactgtttctgaaagaaaatatattaaccggaaaaatagaggaatatatatacagaggcaataaaatgaaatatcagagggggaataaggtgttggagtttagttatcctttactcagcattccattccttaatgaattggtcgttactcatgatggttacattatatcctgtgcagatgatattcattataagtatcttgataagatcgctttaccgaacgtgaatatagtaaaaaacagttttgcagaaatattgcaagcgagaaacgaatttattttgtgttatttagacaaagaattatcttaatatactaaatgtttataattatgaagacacaagaaattgtagatgttcgggtgggtgaaagcactcagccggattacggttatgaattgagtgataggtgtataataacgaaaagttcaaatgctgtcgctagcggagcaggaagcaaaggcttgttttcgtataaaagtactaaactgaaaagtgctgaatgtaaaatcaatcagagtttacgggatgttgataatggagcaggaagcaaaggtttgtttagtgtgaatgttgattagtaagcatggctttgtagagaggtttgtttgttctttttaacttctgaacgtgaagctaaaatgtttgacctcttttgcatgtggcaacaataaattgacataaagcaagtaatcattccttttcttataaaagtgtgctaaaaacacttatatctgaaaacataacaattatttttgtacgttttttaattaatggattgtttttattcaggtatgaagaagagtttgacggctttggcgttcggcacattgggattgggcattgccgagtttgtaatgatgggcattttgcccgatgtagcgaaggacttgcatataagtattccgcaagcaggacattttatttcggcttatgcactaggtgtgtgcgtaggagcaccggggatggttttggtggctcgtacccgtccgctgaaacatattctgttaggtttgatggttatttatatttgtggtaatttgtgtgctgccgcttcagtgaattattggatgatgttgatgatgcgttttatttccggattgcctcatggcgccttctttggggttggttccattgtggcggaaagagtggctgataaaggaaaaagttcgcaggcagtggcattgatggtgtcgggtatgacgattgccaatctttttggtgtacctttgggtacgttcatgagtaatataatgtcttggcgtattccttttctctttaatggagtatggggactgattactttgttctatatttggaaatgggttccttcactgcctgctttgccagatacaggtttgaaaggacagttccgttttttgaagaatctggctccatggttgttgatatttacgactatgtttgggaatggaggtatcttttgttggtatagttatgttactcctttgatgacacatgtggcaggtttcagtgagaacagtatgactttcattatggtgctggcaggtcttagcatgactgtaggaaacttgatgggtggaaagttttctgatcagtatggggctgcccgtgtggtaaaatatacacaggttattatggcttccggtttgttcgccattttctttgcggcttctgtttcttggttggcagtaatattgatgtgtatatgtacggcaggattatttgctgtttcggctccacaacaattattgttactccggaattcacgcggaggagaaatgatgggagcggcctgtgtgcaagtcgcttttaatttgggcaatgccattggtgcttatgccggtgggctacccatagatgccggattgggttatcggtatccggctttggtgggtgtctttatcgtattgatcggctttgtcgctgtttccctttattccaaaagggaatcggcttctctttccaagatataaatcacatctccactctttttaacctctacccggctaccctccggattcaggttgaaaggtgtggtcttgtctgttttgttatctacgaccatcagtacattatcttcggcaaagcgttttatctccactttcaggttggcgtcgggcatggtttggtccagtagcagactgtcatttagatataccgctatactgtctccggcaaaactgttagtcagttctatgttgtagactccttcataagtctgtactttgtcagccttgcgttggaaacggaaggacatatacaaaaaaatgataataacggcaaagactccaaaagccagcataccgttacctatcatgaactgcttgttcgtatttaaactgtttttatccatagtgttataagtttctgcaaaactacaattttttaatagaatattttgtagcactggtagataatttgtatctttgcaccgaaatggatgaatggtggggcttgattaagccctttttttgttcttaatagtgaataaatgatagataaaaatgtagtaacccggattgttgacgagtggctggaaggtaaagattactttttggtagatgtcacggtgagcccggatgacaaaattgtggtagaaattgaccatgccgagggagtatggattgacgattgtgtagaacttagccgctatattgagtctaaactggaccgtgaagaagaggattatgaactggaagtgggttcggccggtataggacaacctttcaaggtattgcaacagtacttgatacacattggtaaggaggtggaaatcctgactaaagagggaaagaagctggaaggtgtattgaaggatgcaaatgaagagaactttaccgtaaccattgaaaagaaagtgaaaccggaaggagccaaacgccccaaactggtagaggaggatattacttttgcatatgatgagataaaatacactaaatacttaattagttttaaataattatggccaaaaaagaagaaacaatcagcttgattgatacattttcggaatttaaggaattaaagaatattgatagaacaactatggtgagtgtactcgaagagtctttccgtagtgtgatcgcgaaaatgtttggcactgatgaaaattacgacgttattgtgaaccctgacaagggagattttgaaatatggcgtaaccgtgaagttgtagcagatgaggatttgacgaatcccaatatgcagatctcattgaccgaggcacagaaaattgatgcgtcttatgaggtgggtgaggaagtgaccgatgaagtaatctttgccaagtttggtcgccgtgccattctgaacttgcgtcagacactggcatcgaagattttagaactggagaaagatagcttgtataataaatatattgatagggtgggtactgtaatcagtgcggaagtctatcagatatggaagaaagaaatgttgttgctggatgatgaaggcaacgaactgcttttgcccaagactgaacagattccgagtgacttctaccgtaaaggcgaaactgcccgtgccgtagtggcccgtgtagataataaaaataataatccgaagattattctgagccgtacttcacctgtgttcttgcaacgcctgtttgaaatggaagtacccgaaatcaatgacgggttgatcactatcaagaagattgcgcgcattcccggagaacgtgctaagatagcagttgagtcgtatgacgaccgtatagacccggtaggtgcctgcgtaggtgtaaaaggatcacgtatccacggtattgtgcgtgagttgcgtaatgaaaatatcgacgtgatcaactatacttctaacattcagttgttcattcagcgtgcgttgagtccggctaagatttcttctattgtgttgcacgaagaagagaaaaaagcagaagtatatctgaaaccggaagaagtgtctttggcaatcggtaaggggggaatgaatatcaaactcgccagtatgcttaccgaatatacgattgatgtgtaccgcgaattggatgagagcgcgatggatgaggatatctaccttgatgaattcaaggatgaaattgatgagtgggttatcacagccatcaagaatattggattggatacagccaaggctgtattgaatgctccgcgcgagatgttgatagaaaaagcggacctggaagaaaacacggttgatgacgtgttgagagttttaagagctgaatttgaagagtaactcttcagtcccggctcgtagttaataattaaaaaacgagtatgacgattagactgaacaaagtaacaagagatttaaatgtaggaataacgacggtagttgaattcttgcagaagaagggctataccattgaggctagtcctaatgcgaaaattaccgaagaacaatatgctgtacttgtgaaagagttcagcacagataaaaatttaaaaatagagtctgaaaaatttagtcaggaaagacagaacaaggaccgcaacaaagcttctatctctatcgaaggttttgaatctaagaaagagaaagaagaggtggtgaaaactgttattcctgaagaggcacgccccaaactgaagcaagtgggtaaaatagatctggacaatttgaacaagaaaactgcgccaaaggttgtagaaccagctgcgaaagttattgaacaaactccgaaagcagaacccgtggtggaaaaggtggttgagaggaaggaaactccccaacccgagaaggaaacgccgaagcctgtggtggtagaggaaaagaaaccggaacctgctcctcaacctgctcctgctccagttctggaagagaagaaagagcctaaaattgaaaagacggaagaaaagacaccccaggtgaaagagatggaaaaagaaacacccgaagcagcacccgttcaggaaaaagaagaagacgatgtatttaaaattcgtcctactgaatttaaatcgaaaattaatgtagtaggtcagattgatctggctgcattgaatcagtctacccgtccgaaaaagaaatcgaaggaagaaaaacggaaagagagagaagagaaagataagcagcgtcaggaacagcgtaaactgatgaaggatgctattatcaaagaaatccgtaagggagacgataagatttctaaaaactcggttaacgatgatgccgcaaagaagaaaaaacgcaatagaataaataaggaacgtgtggatataaatgctgccggtacaacaaatgctggaggagcatctaataataaccaacgtaacgataacgctaacagaccgaataggaataataactccaaacctaatggcaataacaatcagggtggaggcaaatttaataaagaccgtttcaagaaacctgttgtaaaagcggaagttagtgatgaagatgtggcaaagcaggttaaggaaacattggcacgtctgactaacaagactaagaacaaggctgccaagtatcgtaaggagaaacgtgaaaatgttcagaaccgcctgatggaacaggaggagatggaacaggaagatagcaaaatattgaaactgaccgagttcgttactgcgaacgaattggcaagtatgatggatattcctgttactcaggttatcgctacttgtatgagtatcggtatcatggtctctatcaatcagcgtctggatgccgagacaatcaacctggtagcggaagaattcggatacaagacagaatatgtaagtgctgaggtagcacaggctattacagaagaggaagataacgaagaagatttgcagccgcgtgctccgattgtgacagtaatgggacatgttgaccatggtaagacttcattactggactatattcgtaaagcaaatgtaattgctggtgaggcaggtggtatcacccagcatatcggtgcttacaatgtgaaattggaagacggacgtcatattacattcttggacactccgggtcacgaggcatttaccgccatgcgtgcccgtggtgcgaaagtgacggatattgctattattattgtagctgccgatgataatgtgatgccgcagaccaaagaggcgattaatcatgctatggctgccggtgtgcctatcgtatttgctattaataaggtggataagccgcacgccaatccggataagattaaggaagaactggctgccatgaacttcctggtggaagagtggggtggtaagtatcagtcgcaagatatttcggcaaagaaaggtacaggtgtacacgatttgttggaaaaagtattgctggaagctgaaatgttggatttgaaggctaatcccgaccgcaaggcaaccggttctatcattgaatcgtcgttggacaagggacgcggttatgtggctactatgttggtggcaaacggtacgctgaaaatgggggatatagtcttggctggtactagttatggtaaggtgaaagccatgtttaatgaacgtaaccagcgcatcaaggaggccggtccttccgaaccggtattgattctgggactgaacggtgctcctgcggcaggtgatactttccatgtgattgatacggaacaagaggctcgtgacattgccaacaagcgtgaacagttgcagcgtgagcagggcttgcgtactcagaaactgctgacattggatgaagtgggccgtcgtttggctttgggtgatttccatgagctgaatgtgattgttaaaggtgacgtggacggttctgtcgaagcgttgagcgactcattgataaaactgtctacagaacaggtacaggttaatgtgatccacaaaggtgtcggtcagatttccgagtcggatgtgactttggctgctgcatcagatgctattattgtaggtttccaggttcgtccttcaagttctgccggcaaactggctgagcaggagggtgtggatatccgcaaatattctgttatctatgatgcgattgaagaagtgaaggctgctatggaaggtatgctggcacctactttgaaggaacagattactgcaaccatcgaagtgcgtgaagtcttcaatattaccaaggtcggtttggttgccggtgctatggtgaagacaggtaaggtgaaacgttctgataaggcacgcttgattcgtgatggtattgtagtctttaccggtgctatcaatgctttgaagcgtttcaaggatgatgtgaaagaagtaggtactaactttgaatgtggtatcagtctgacaaactgtaacgatatcaaggtcggtgatattattgaagcttacgaagaagtagaggttaaacagactttgtaatacactgaagtctgagaatatagatggtaatgtcatcctgagcatagcgaaggatctggcacctcgcccagcgcgtgggctggcagattcttcgctttgttcagaatggcattactgctttttgtaataacgataaagatggcgacaatagatattattatattggctatgattggtgtgggtgtcattatgggattaataaaaggatttgtgaagcagatggcgtctattgtagggttgatagccggattgctgatggctcgtgccttgtttggcattgttgccgaaaggttggcgccggttctaggtacttcgacgactgtagcacaggtcttggcttttatattgatctggatagctgtacctttaggttttgcgttcgtcgcctctttgttgacaaaagcattggatgctgtgcacctgggatggctgaaccgttggttaggcagcggattgggagcattgaagtatatgatactgatagggttagctattcatgtgatagaatatatagacccgaacaatgagctgattagtgcaacaaaaaagaaggaatcagtgttatattatcctatgagggacttgtccggtatcttttttccggtatttaagaatgtaacagaacaattaatagaaatataagatagatatgcaagaagaacccaataaatatgtgaaagaactgacgcaggagaagtacaaatatggcttcaccacagaagttcacacagatattatagaaaggggattgaatgaggatgttatccgcttgatttctgcaaagaaaaacgagccggagtggttactggagtttcgcctgaaagcataccgctactggctgacaatggagatgcctgcatgggcacacctcactatccctgaaatagattatcaggctatatcctattatgcggatcctacaaagaaaaaagaaggaccgaaaagtatggatgaggtagatcctgagttgattaaaactttcaataaattaggtattcctttggaggagcaaatggcgttgagcggtatggcagtagatgctgtcatggactctgtatccgtcaagactacatttaaagaaaccttgttggaaaaagggattattttttgttcgttcagtgaagcggtgcgtgagcatcccgatttggtgaagaaatatctgggttcggtggtcgggccgcgggataatttttttgcagccttgaactcggcagtattcagtgacggatcgtttgtatatattccgaaaggagtgcgttgtcctatggaactctccacttatttccgtatcaatgcagccaataccggtcagtttgagcgtacactgattgttgcggatgatgatagttatgtttcttatctggaaggatgtacggcccctatgcgggatgagaaccaattacatgcggccatagtggagattgtggtgcacgaccgtgcggaagtgaaatattctaccgtacagaactggtatccgggagatgccgaaggcaaaggaggagtatataactttgtgacaaaacgcggtcattgcaaaggagtggatagcaaattaagctggacacaggtggaaaccggatcggccattacttggaaatatcccagttgtatcctgagtggagataattctactgctgaattctattcggtggcagtaacgaataactatcagcaggctgatacggggactaaaatgattcatttaggcagaaatacccgtagtaccattgttagtaaaggaatcagtgccggaaagagccagaactcttatcgtggtctggtacgtgtggctcagaaagcagacaatgcccgtaattacagtcagtgtgattctttgttgctggggagccagtgtggtgctcatacattcccatatatggatattcataacgagacagctgtggtggaacatgaggcgacaaccagcaagatcagcgaagaccagttgttttattgcaatcagcgcggtattcctacagaagatgctattgggttgattgtcaatggatatgcaaaagaagtactgaataaacttccaatggagtttgcggtggaggcacagaagctgctggctatttctctagagggaagtgtaggataaatgaagaactaagaatttaatagaattatgttagagataaaagacttacatgccagtgtcaatggcaaagaaatattgaaaggtattaatctaagcataaagaaaggtgaagttcatgctattatgggacccaacggttccggaaagagtaccctttcgtctgtgttggtaggcaatccggcttttgaggtaacgaaaggttcggtgacttttgaaggaaaagatttgttggctttgagtcctgaggaccgcagtcatgaaggtctgtttttgtctttccaatatccggtggagattcccggagtcagtatggtgaactttatgcgtgcggcggtaaacgagcagcgtaaatataaaggcctccctgcattgacagccagtgagttcttgaagctgatgcgcgagaagcgggctgtggtggaattggataataaattggcaaaccgttcggtaaacgagggattcagcggtggtgagaagaagcgcaatgagatcttccagatggctatgctggaacctaagttgagcattttggatgaaacggattccggtcttgatattgatgcgttgcgtattgtagccgagggtgtgaacaaactgaagactcccgaaacaagttgtatcgtcattacgcactatcaacggttgctggattatatcaaacccgatattgtacatgtattgtataaaggacgtattgtgaagactgcgggtcccgaattggctttggaactggaagagcgtggttacgactggataaaagccgagttgggagaataataatttgatgcctaaagaagaaagtgattatgagagcagaacaacaatatattgatctcttttctcaatgtgaggcgatgatttgccggcatagtgccgaggtgctgaacgctccccgtgcgcaagctttcgcagatttcgaaaaattaggtttccctacccgcaaacaggagaagtataaatatacggatgtgagcaagttgttcgagccggattatggtttgaatttgaacagactcgacattccggtgaatccgtatgaagtgttcaagtgcgatgtacctaatatgagtaccgctctttattttgtagtaaacgatgctttttatcgtaaggctttgccgaaggcacaattgccggaaggagtgttgcttggcagcttgaaagagctgtctgaacaatatccggctttggtcaagcagtattatggcaagttggcagatacttccaaggatggtgtgaccgccttcaatacaacttttgcccaggatggctttatgctgtatgtgccgaaaggcgtggtggtggacaaacccattcaactggtgaacatattgcgtgctgatgttaattttatggtgaaccgccgtgtgctggttgtgctggaagaaggtgcgcaggctcgtctgttgatttgtgatcatgccatggataatgtaaatttcctttctactcaggttattgaggtctttgcaaaagaaaatgctactttcgatctttatgaactggaagaaacccataccagcacagtgcgtttcagtaacctctatgtgaaccaggaggcagacagtaatgtgcttttgaatggtatgactttgcataacggtactacgcgtaatacaactgaagtaactttggccggacgtggagctgagatcaatttgtgtggtatggtcattgccgataagaatgaacaggtggacaatcatactttcattgaccacaaggttgctgattgcactagtaatgagctgtttaaatatgtattggatgatcaggcgacaggtgcgtttgccggaaaagtattggtacgtgaaggagcacaacatactaattcccaacaaaccaaccgcaacctctgtgctactcgtgatgcccatatgtacactcagccgcaactggaaatttatgcggatgacgtaaagtgctctcacggagctactgtcggtcagctggatgaaaatgcgttgttctatatgcagcaacgtggtatcagtctgaaggaagcacgtttattgcttatgtttgcttttgtcaatgaagtaatagatacgatccgcctggatgcattgaaagaccgtttgcatctgttggtggaaaaacgtttccgtggtgaattgaataaatgtcagggatgtgcgatatgtaaataagacgccatgtacgatatacaaaaaataagagaagattttccgatattagatcgggaggtgtatggaaagccgcttatttatctggataatggggctaccactcagaaaccgcgccaagtggttgaagccataaccgatgaatattattcggtcaatgccaatgtgcatcgtggtgtgcatttcctgtctcagcaggctaccgagttgcatgaagcttctcgtgagactgtacgtcgttttatcaatgcacgcagtagcaatgaaatcgtgtttacacggggcacgacggagagtatcaacctgttggcttcttcttttgccgacagtcagatgaaggaaggcgatgaagtgattgtttctgtcatggagcatcatagcaatattgtaccttggcagttacaggctgcgcgtaaaggaatcgtgctgaaagtgattcccatgaatgacaggggagaactgttgttggatgaatatgagaaactcttttcggaacggaccaagctggtgagtttcgctcatgtaagtaatgtgttgggcactgtcaatccggcgaaagagatgattgcgactgcccatgcacacggtgttcccgttttgattgacggggcgcagagtgttcctcacatgaaagtggatgttcaggatttggatgccgacttttttgctttcagcggacataagatatatggtcctaccggtgtgggggtgctttatggaaaggaagagtggctggataagcttccaccttaccaggggggaggcgagatgatacaaagtgtcagcttcgagaaaacgacttttaatgaattgccgtttaagtttgaagcgggaactcccgattatatcggcactaccgccttggcaaaagcgttggattatgtatctgccattggtatggagaacattgccgcccatgagcatgaactgaccctatatgccatgcagcgtctgaaagaaataaacggaatgcgtatcttcggagaggctgagcataagagcagtgtcatttctttcttggtaggaaatattcatcatttggatatgggtacgttgcttgaccgtctgggcattgccgtacgtaccgggcatcattgtgctcagcctttgatgattcgtatggggattgaaggaaccgtgcgtgcttctttcggtttgtataataccaaggaggagatagatatgctggctgccggcattgagcgcgtcagcaggatgttttgatttctccaaacgaaataagtcgcctgccattgataaacattatattaatggcaggcttttttttgtataacaagaatcagcggaacttcccacaagattgggagaaacttctcacaagatttgccgcatcttgtaacaagatatcaggcatcccggtttcttgcgtctttttatgttcttttctgtgggcatattcctcttccggtagaaaatatgcccctcccgaagaattgccccaaaaatccttcagaagtttcagcctctccgcaaactccctgttcatgggatttccggctgaaggattggcttttaaaattcttcagccgggtatttattctttcagccggcatatacgttttttcagctatggctgtgtacttttcggcatcttcggagttttccctatgtacctgcgtgcttttcaccttccggccattgggcacgctgaaggattttttttcagtctgaaagatttcgaggtatcaattcttcagccggaatgccgatgaacaaagcgtttgcggagaggctgaaacttctgaaggaaaaataagtgttttgctatgtgtatataaagaaacaggagaaacaacgggacgtattaataaaagctcttgatgtttttttaatatgtcctgttgtttttaaaaaaggggcagatgttttgaagtttcctgttgtgaagtgtgaacacatacggatgtataggctgaaggatatatcatgttgcagccggaagatatataatcttacacctgtaacatgatatatgatagatgagggtttaagtaaattcccggttgaaaccgttggctgttgttaccttaaactttgccattttgaggttctttcattacggtgaattttattcgggtgttacaattgcatgtgtaaaataggatatgctttaccttctccatccaaatctgaccttttatatatgttaaatcctatatgtttataaaagccgacagcttgaatattctgctcattcacatcgacttttgttacttgtaaattatcgatggcataagtaattaattttttccctactcctgtgcctcgataattgttgtcaataaatagcatttcaagatttccttctgcaattcccataaacccgattaaggttccttcttgttcaaatccgaatagattgacatactggaaatataccggaagttgtcccttgtaatatataaaatcttcctctttaagaaaatcatgcgtactcaatacagcactttcccaaatttccatcaagcgtggataatctgtaactttaatttttctaatcattatggttattgttatttaatgtcgcaaagttaggaataaatattcactgaatctatttttcataagttttgatggctgtgaaagcagggggccgcattcatcacgagtgcagccctccttggtattgtattatttatattaaggtaaaaagagagagtttatttgccgtaatcatcgtataacatcagcaaatgtgacgaactccaactgaaatggggagcttttaacaattcaccggtgtgtgtgccatagttttcatgtatcggtgcgccttctttcaagccttgcagacggtcgaatacctggagggtgtattcatccgccatcttgttatacccataattgcgtaagccgcggatagcgaagtaagtctggtccaaccagataggaccgcgccagtagccgcgcggattgtacttcggattgtctgctgccactgtggggaagggaatgtatgtagaaaacttggctgtatcggtcagcaggggcagcatggcttttacctgatcggccgtggcaacttttgtccataagggggtgtatgcttcgcatcccggttcctgtatgaagcttccgtcttttaagcggcgatcgaagaagaaacctttttctttgtcgaagaaataatcggctacctggctgctgtaatccggaccatcgaaagttactcccaaaataccggcgaactttttcaataacttgcattccaaagccagataggcattcaggtcaacactttcctgatccatgctccatgcatcctccgcaccgtcatttttcagcatcttggcatcatcgaaacggatggcgttatccatgccgctttcccatgctgccgcttccagtgtactatcggtggaaccgtattcacacataccgttgcggttatggtcacgcttgttgtaccaccatttgtaataggccatcaattgcggatacatttcgctgatgaatgccgtatcattggtatgggtgaatatttcgtctacagcccaggatacgagaggaggtttgctgtcgcgtgcattgttctcggcaggatcggtgtagatgcagtctataatcatgccgtccggttgctggtagtcaaacatggcgcggatgttgtctttggcaagttcaggatcgaattttgccagggcggcagagaaacgccaggtgtcccaagcccagaatcctacgaagtagtatgcggcatgactcggaacaattccttcgtggagcaatccgccacggtgggtacgccagttgctgataagtgtaacaactgctttcacggcgatacggtcatactcaggtttcatatctttgcgcagaatcttggtgagataaccttcccagcgttctttgttggctttgagcccttcctgcggattgcttagagccaattgcgctttctgtaatccggcagaaagttctttttctccggtatagaaagaaatggctacgtaggtgtcgtgttcgctgccattgatttttgcctggtaattattgtcagtgccctttacgctaacatccggggtaaaagttaatgctacaatctcaccggagggatgacgggcgatgacggtattctggtctgtttggacttgtatctcttttccccattggctggcagttaaggagagttcctttcctgcatcggagtgaatgcggagcaatgcggtagaagcatctaaaaaattcaagcgttgaatgattttaccttcctccgaactggccgagagatataactcaccgggaaaataacaggtggagtccggagtgaatactgcatttgcatcatcgttataacctacggtgacagcggattgcgccatccattggcgccggttcatgtccagactgaacggaccgcagaaaccgttcacccagtgatctttttgcggaagggtgaatcccatccaggaaccggcgtctgtaaaccatcccccgcaacgtgtcagtgtatcgggggtataggctatatccagtatgttattgaattcatatcttttgcctgtgggggtgttctcaccggcaggtgtgcaggccgttgtgagacctgcgactactgctgtgagaagaatgattttggtaaatttatatttcatgtcatttcgttattattttaaaaccatttcttatgcgctttttcagcggcatcgtcttgattgctcaaaggttgcatggtaaagctgtattgccattcgtgcggagtgatggtatattccggatgtacttgtgctccccaggtattatctccacctacccccatatgacggtggtcgatgtttaaccatatcatgtctttcttcataatacttccaccatgacggcgttcggtattgaatgccacatagtcaatatcctccaacgggaaattccatgcgctgacattcagcggttcctcacctgtaatcaacaggccttcccctgctttattacgcaatgcaacccatcgtacatcggttttgttgccggtttcctgtgcacggacatacggatggaattgttcccatactgtagcggtatagagcccgataggataacccgtcttgcggtctgcatagttttcttgtggtccgcggcccagccaggtcatcacatcgtattctgccggaagaatcatacgcatacctagacgtggcatttcaggaagggatttgttaccgggtacaaagtgcatacttactttgactgctccatttggtcgtacttgatagacggtctgcaaagttgattcttgtgcttccagcttataatttacagtaacggttgccagttgtttgtttgaatcttctttcaggtcgatactttgtaacttggcgttcttgcctgcaaatttccagatgccgcaacgctccaggtggttgttggcaacatcattgtcggttaacgcacgccagaaattgggttgcaaaccctcttttatcagattctttccattatacaagagctctgtcatttcaccatcagcagtagagaatgcgatacggaagttctctcctgtcaaggtaatggcatccggagtacgttcggtatttacagttttgtctactagttcccgggcagtccatgtagcattcagcagccgttctccttccggattcagttgccattgctccatggctacctgatgtcccttcggaactaatggggcttcctttttggtaaatgcttccaatttcaggaagtattcttttccatcgttaggaatcaagttcatcgggatagtgatgaaggcagaagaacgggcggccataaccgggaaatccatttcaccgctttgtacagcttttccgtctgtttctacagtccagtgtagtttgtaatcttccaaaccgataaaatcatgccagttagtcactttaatttgcttggtggtaaaggcaaccggctcaaaatgaatatattgatatacttttttcacttcccagatgtgcggatgaagtgaacggtcggcagctaccaatccgttggcacagaagttggagtcattaggaacacccacgaagcccatatcgcctccgtaggcccaaatcttgtttccgttcttgtctttgatatcaaaagtagcatctacccagtcccatatgaaaccaccttgcaactggtcatatttataaatcaaatcccaatagtcttgcaggttacctacactgttacccatggcgtgggcatattcacatagaatcatcgggcgtgcatcgcgttggtttacatggcggcggagcgcccagacacgtgcatacatcggacaataaatgtcagatttggcatcataaccacctccttcatattgtacagggcgggtaggatcgaacttcttggtccagtcatataacgtttcaaagtgttttccgtagccggactcatttcccattgaccaagtgacaatggcagtgatattgcggtccctcagcaccatgcggctcatgcgttgcataaacggtacttcccaatcgggattattagctagtgtgccatctttatgcgcctgcataccatggctttcaatgtttgcttcatctaccagatacaaaccgtattcgttacacaatgcataccattcatagcggttggggtaatggcaagtgcgtacagcattcaggttgaattgtttcatcaactgaatgtcttttatcatgctctctacggtgatggtacgaccatgatgcggatcgtgttcatggcggtttactcctttaaacaatacggctaccccatttatcagttgcatgccgttacgcatttccacagaacggaaaccgaaaggctgtgtgaatgattccaaggcttttccttgagcatcgtaggtgctgactaccaatgtataaagattgggtgtttcggcattccaaggcaatatggccgggaacaagtgtttctgagcgaataaagtatctgtagcagaagttatttcctttttatgctggtaaattacattgcctttgtccataacctttacttccacggttcctcccggatgaggcttgtggagtgtgatatccagattaaaatctccgtctttataaccatttgtcagaccggctaccagtttgaagtcttgtacacggctttgaggacgggcatagagatatacatcgcgttcaataccgctatatttccagtaatcctgatcctccaggtaggaaccgtcactataacggaaaactttaacggccagtttgttcttcccggcttttaagaacggagtaatattgaaatgagccggaagacggctgtcttcactgtatcctgccaattcaccgtttacccagcaataaaaagcggactcaactccttcaaaatcaaggaagatatccattcctttccaatgggccggtacggtaaattcacgtacgtatgctcctaccggattgtaatcggttggaacatgaggcggattggcagggaaggggtaagctacgtcagtatagatgggggagtcaaatccttgcagttcccagcttcccggaacctgtatgtctttccagcgtttggtgttatacctcattttataaaaatctgtcgggcattcctcattgtttttagagaataagaacttccaggttccgtctagtgaaatgcggcgttctgtagcagggtttactgcaaaacgctgggcggcaggtaaagcctgttgtttcagtgcattggcctcattcgtataaggaatgaaatgggcatgggcaggttcacggtttatttcatttatttgtggattctgccagggcacattttcaccccaggcggaagcacaaacaaacaatagtgtaagaacagtatgaagagagtgtttcatggttattgttattttaaatagaacagaaaagagtcacaagaaaaggtacgctgaagtctactacaaagccgtgaaatatagaaaccactacgaaactttgaccggaatagcgggtgatgatgggtaatgttgtatccatcgtagtggctcctccggcagaaataggggctagattgccaaaccagcgtactagcaacggggcaaaaagcaaagtgataatctcacgtgtgatattggataataatgcaatggttcccaactccggacctttatattctgtaataaagatactggatagagagtaatagccgaaaccggcacctactgccatacagtctgttactgagcggtgcgagagaaacagactgaccactgcgcatcctgccagtgttcccaatatggtcatgaccggtagaaagatcaggcgggggtttaatgaacggaaattacgtaaagtctgcggatcattacctacactgactcctacactgaacattaacgcacacaaggcgtagaaacttagcttactttgtgtaaagtcgtatggaataaggtgatataccccacaaagagctcccagtacaaagaatccgacgataatcaaacttcctttcatacttgtccctccttatttcttttgtaaagtacataccataaagcccatgctgctgtaacactgcccagcactgctgccaaggtgatgacaatggcttccaaccctatagtgtgcagaccattgataattttctgattgccgcctacatctatacccaataaaaagagtagcaaccaaataagaacggtgatgactttgtgtattcctgaaagcttctgcttgcgaagcaggaagccgaggagcatccccgtgagcattaatccaataattgtaaacatatctatgtcgttttatttataggcaaagatacttcatttttagattacaaggcggtatcactgtagcgaaaaccgccttgttgcctaattatatctaaccaaaaaagaaaatacttattttaaggcatcattagcattcagctctgtaagaggagtggggtagaatgaatttttgtcttcattgaagcctgttcttccggcagcttgcagggctgaggacagtttgccccaacggcggagatcataccaacgatagttctcaagagggaattcaatcatgcgctcgtgttcaatttgcgcgcggactgcttcttgagaagtacctgtcatgggtggcatatccccgtgaacgcttcttacttcattgattaaaggaatagcttgttcgggatgtccctgttcattcaatgcttcggctttcattaacagtacgttggcataacgcatcaaaggaacattgattgcagaatagttttggtttaaaccttcataggtcgagggcatgaatttacggaaggctacgcgttctttgttgtcgaaccagtcattatagtcgtagccatagacacgtccgttaccatcgttataatagtcacaattaaaaaataatgttgcatacatacgcgagtcataacgtcctgtagtagccgtttccccttcttttttgaattcactaatcaatgtttgactgggaagaatctcatcccatcccccaagttcggaaacaccgatccatcgatggaactgagtacgataagtagctccgtttgcagaactcatagagaattgaatttcaaaaatcgattctttactgttcttattatccccgctgaacatagtgctgaaattattaaccagttcatatccttttacttggttgaatgcttctatagcactggccagataagagtctttgttggttgcctcttcataggcgcgtgtcagataggcgaaaccaagatatgcataagcagaaccgcttgtggcacggcctacattatcagcgtcacgtgttgcaggcagactggttgcacgtttcaagtcttcaatgatgaaattccatgcatcctcacgggaagaaaggggcttgcttaattcagccgggtcagtgatatatttatcacgaactatgatttctttccagttcaataaaagttgcatgtggtaataagcgcggataaagtagccttcattgaccaattgttcgcgtgttgctgcatctatattctcatcgggtatttctgcggttttttcaattacctgattagcaaaactgatgcctttatagtagcattgccagtaataactgaactgagagttaccattggtgtaggtatagttgcctaattccacccagttcgggtaattcagagcatcgcttcctaattggataatatcttcacgataggcttctaccggccatttgatttccgggaaagaccacatgtcacccgaataagtcatcaggtaaagttgggagtatgcggcggcaagtccggcttcagcatcagactggttacgccaaaaactgcttgatgtcaactggtcaggagattctaccgtgagataatcgtcacaagcgctaaataaacttgcaatgcagatacttgctatgtataatagtttcttcattttcttattactttaaaggattagaatgtaagttgagctccaacggtgaatgaacgggtaaacggataaatcaatttatcaacaccggtattcaacacactggcacgagagaattcaggatctataccatcatagcctgtgatagtgaacaagttttcaccacttacatagaaacgcagtttctcaatatagaatttctgcatgagtgatttgggtaaagtataacctaactgtgcctgacgcagacggacaaaatcaccgttttcaaggaatctgtctgattctttcatgttgccgttcggatcttgatatactgcgcggggaacatccgtatttctattgtcaggagtccatgcattcaatgtagacttcagcatatttgatttagagttcataccttcatagaaatatttgtttccgttatacaatttgaagttccatgcgctgccaagtacgattgaaaggtcaaatcctttatagccgaatgacagatttaagttcgcttccaatgtcgggatacctgagccacagtattctttgtcaccggcgtctatgcttccattaccatctaaatctttaaaacggatatcacccggttgggcattaggctgtaataattgtccatccttgtttacatgggcatttacttcatccatactttggaagataccgtctgttctataaagatagaatgcaccgataggtttgcccactctggtttctgtcgggaaatgctccgttccatatttcaatccttcaccctgaagaacttggtctacatctgacaattcaaccactttatttttggtggtgctcatattgaaaccgatattgtaatcaaagtcttttatagcatctccccagtttaattcaagttcgaaaccggtattgcgtatctttccgacattcagggtggggttagtcatacctgctgaaggaggtagaacttttgttatcaacagatcttctgtttggttatagtagtagtttaatgtaccggttaatttgctgttaaagaagccgaaatcgaaaccaatatttttggtatccgttgtttcccatttcaaagaacggttttccaatccgcgagcgatgcttcctgcccatgcgttatcaccgttgcctttcacgtatccttgatacatttcattgtatgtactaatcagcgcaaggaagtcataatatcccaaagcattttcattacctaaacgtccccaactgacacggaacttcaaattattcaatgcaatgtctttcgggaagaattcttcctgactgattctccagcctaatgccactgatgggaagcaaccccaacggttgtctttaccaaacttggatgaaccgtcataacgtacagttgcctgtaccaggtagcggtcattataattatagttcagtcggccgaagaaagaggcgcggttatatttccattttgttccgctaccatcaaatgtgccacctgctcctgcacctacagttgagaaagatggatcaagaaatccgcccggaatttcactggttatcaattttccgtcttctactttataaacagtggttttaccttctaccccaacagaattccatgtatatttgcgggcagtcatggaagtacctgccattgcattgacgttgtgttttccaaatgtcttattaaaacttaatacattttcccatacatgttcctcccagtatcctgtggtttcgctatgataaggatagtcacgtttggcttttgggtcggcaacataggccggagtatgataagtctgacgttggtgctcacctctgtatgcatagcttgtcttgaaattcagccatggggtgaagttcatggtcaaggcaacattggctgtggtatgatattttttgtcggtagatttttcataatgctggtcagccataacattacggttactgggcagatcgtcaaagtcacttaagccgaagccatactctcttgtatcatcatagataggaacaagcggagaaatcatgtacatttctttaatggaatattcgggttgtttgctatccgtaaatttgaaagcgatgttagcatcaatatcaaatatatatttgctcatgtggagtttcaaacgtgcattatcttgacggtaattgttacctaagaaaatacctttttcgtcagcatggttatatgaaagtgaatattgagcattttcagaaccgccacggatgctgaacatatagttttgtgaaacaccacctcttagcatggcatcctgccagtctgtatctattcctgtgtttttatttacaaatgcgggcatagtaacctctgtatcatctggatactggttcatgtagttctgatacatttgtttatgaacacttttgtattcttcggcatttagcagttccagctttttggctacgcttgtaaagcttacataagtgctgaaatcaattttcatgtcaccctttttaccgtttttggtagttacgataatgacaccatttgcagcaaccgaaccatagatggcagcggctgcaccatctttcagtacttccattgactgaatatcttgcggattcacattttcaatatcaccgggaaaaccatcaatgatataaagaggttggttgtcaccaaacgttttgacaccacggattttaacctgcacacctgcaccggcattaccaccagccttcataatgtttacacctgcaatcttaccttgcaatgcttctgcagggttggttgtggtgcgctttaccaaatcgtctacatctactgaggaaatagcaccggtcatatcacttttcttcatggtaccatagcccactactacaacttcatccagcatctcagtatcttctttcaaagtcacccggatgttggtctttccgtttacagggacttcttgtgttgcatagcccacataagaaataataatagtggctttgggggatacgcttaatgcaaagttaccgtcaaagtctgtgatgactccgttggttgtacctttctctactacactggcaccaataataggttcgttggcagcatcggtaaccagaccagtcagttgaatcgtctgtgctaatgcaccgaaaggagtcataaaagcaaagagtagaatcaataacatgattctttccttgaaataattctttttactcatgtgaataaattttaaggttaataattgtttttcacatcgctaagtaataggttgtatgtgcaaactcctaattattataccctacaaatgaactacaatgaataaaaaaactctcttttttaatctacaaatataaatgtaatatattgatatatagtgttctatataaagaggtaatatctacaaaatgctgtttgataaaaactgtaaaaatataggttctttaaatattttgtagatagtctgtcaagtcatcctccgaagataagtttagagatttacgtaaacgatatcgattcatgttgattgttttgggaacatttcctgtgagcattgagatttctttggtagatagatttacccgtaataaagtggctagatatttttctccttgtgttaaattgggatgccgttcggatagccgttgaaggaactcctggttcttttcttcgacattcatcagcaaggtgctgttcgttttatctccattctgatattggctgatgaaagcattgactttcttcagatgaggaatcaatgcctgttggtccatcttatatccttgctttatcatttctctgattttctccagcaattcattacggctatgcaggaatacagcaaaactggtagcttcctgacgactgttgtataatgcgctttgtacagattttaattcgagttcttgctgtcgtactttaagttctgccaattcgtgttccgattgctccagattatagcgggtaaccattaactgcatattctttttgcgtttataccattggtatagaaatatactgagtactatcaatgagatgaatatgattactagtacaaacaggttccgtttcagcagttctatttcataagcttgctctcttagttctgctttcctttgttggttttgatattgtttatgggaaatttcctgttctacgatgcgtaatttacttccactttgcaattctttgctaagggtatatagttgcatcaggcatttataagcgtttttatggtctccaagggcatcgtatacccaagataaatattcgtaattatcacaaatcagttctttggcactgatggaagaagcgacctcgtatgctctttgtaaagccatcaaggcattgttgtattgctttgcatagaagtattgttttcccatattgttatagttttcccctaatgaccattgagaattcaagttcttgttgatgataatggcctcattaattaaacttagcttttcattaaaatcaccctcatataaacatagattattcaaattggcggatatccctcttaaatttttctgactgcggtttattataagggcttgtttgaggaattgttcagctgtgttgaactcattcatggaataatggatgatgccacgatcattgtagcatagtgcgattgaaatggaatctccgatggatttaaagattgagatggctttctcattcatttcgatcgctttgttatagtcggtcagtttacaatagagtgctcctatcagtgcgtaaatttgtccgttcagctctttattggcaggagttgcatactccaatgcgtcatatagatttttgatgctcacatcaaaattgcctaatagcttttctgcctgactgtaatagaacattgcttcggctttttgatcattttgcctttcttcaggaaataattcaattaccttggcagcatagtaactggcctgcttcggattattgtataaggcttcaaccgactttttaatcagtgcctcggcttcttgttgtttattacgggcattagcccatgagagattcagcaggcaaaggagaatatatacaagtaggttgtttttcataatcaagcgtatttttgcaaaaatagtgattttctttgtaaaaagacactcttgtttctcttttaaaagaatatctttgcaagcaacaataaagatgagctatgttattaccttatttgaataaagatctgatagaggccggttgtgatgaggcgggcaggggatgtctggcaggatctgtatatgcagcagctgttattttacctgtagattttaagaatgaattgctgaatgattccaagcaactgacggagcatcagcgttatgcgctgcgagagattgtggaaagagaagcattggcatgggctgtaggtgtagtgactcctgaagagatagacgagataaatatccttaatgcgtcttttctggcaatgcatcgtgctgtggatcaattgaaaattcgtccccaacatttgttgattgatgggaatcgttttaaaaagtatcaggatttgccgcatactactgtggtaaaaggagatggaaaatatctttctattgccgctgcatctattctggcgaaaacctatcgtgatgattatatgaatgaactgcataaagaatatcctttttatgattggaatagtaataaaggttatcctactaaaaagcatcgtgcggctatccgtgaacatggaacaacgccatatcatcggatgacttttaatttgttgggaacagatccccaattagagattcctttctaatttgaagaatatataggaggatgggataacttctttacatttcattctacttggttgaaaataaagcgaagaatctgtttgattcatatgagtcgtaacagattcttcgtttcacttttttacaatggtcttattcagcatatcaatattttccccgttgataagagcgatgtccataaatcgtgattaccacaaaacagataaatggcaggataaatgaaacatttacggctggcatattccaaatggtattcatatcaataatacttgcttgtaaaggaggaagtacggaacctcctaaaatagccataatcaggccagctgctccaaactttgcatcatctcccaatccggtaagcgctatgccatagatcgtggggaacattaatgacatacaggctgaaacagctaccaggcagtacataccccagatatcctggaagaagatgactccggcggtgaagcagcaacccgcaatggcaagtatggccaataatttacctggattgaggtagcgcaagatgaaggtacagataaaacggctgatacagaaaataaccatcgcaatgatattatattcttgtgatagtacttcggcagctttctcctccataccttgtgacatgaacaggcgtgtgccgtattggataatgaaggtccaacacataatctgcgcacctacatagaagaattgtgccaccactccttcacggtaatgatggatggagaagatacgcttcagtgtgggaccgaaattgatactgtgagactggtcaccatttttgggcatttgggtaaaacgtatcactagaagcataactaatatgactattccgatagtgagataaggagcgatcagtacggacaggtccgcatctcttaccgttgcaaattctgccgggtttagttgggctcgttctgccgtatccatcggatttagtttcgcctggataaagttcatggctacatacattcccagtaaagaacccatagggttaaacgattgtgccagattgagacgtcgggtagcggtagcttctgttcccatggacaagatgtaagggttggaactggtttcgaggaaggagagtccgcaggtcagaataaaataagctaataagaacggatagtagctgcctgtcattttagcgggaaagaataataaggctcctacggcataaagtcccaatcccagcaggataccggctttataagagtatttacggataaacatagctgccggaaaagccatggcgaaatatccgccatagaaggcaacttgcaccaatgcgccatcggtgacactcatccggaagattttagagaatgcttttaccatcggattggtgatatcattggcgaatccccagagggcgaagcagcaggtgactaatataaacggtagtacgtaactgactccatctttgtgcaggatgggttgatctgtatctttcatttcttaaattaaagattgagaattaaaaattaagaaatgagaattgaaaacaaaaaaaggataggcatatgaccctttctcaatttttaattttcaattctcaatttattaactatttgtaaataggtccataagttgagcaagctctgtagtcggaaccttccttatccataccgaaggcattccatgatgccgggcggaaaatcttgtcgtcttctatattatgcatacaaacaggaatacgtagcatagatgccagagttattaaatcctgtccgatgtgtccatagctgatggcgccgtggttggctccccagttgttcattaccgaatagacatcacggaatgcaggtttgtcgcataggcggggtacaaaccaagtagtaggccatgtgggatctgtacgcatgttcagtacctgatggatttccggatcaatatctactgtccagccttctgccagttgcaatactgggcctaagccttttaccagattaagacgcatcatggtgacaggcataccgcctttagacaagaaattggaagagaaaccgcctccacggaaatagtcgcgatctgccggataccaggttgtagctttcagacaagcttcgacatcggcttcagtcatttcccagttgggcttcatgcagggctctcccgcttcattatggctctcaccggtagcgtccagagtggttgcaccagagttgataagatggatgataccgtttttagccattccggtaagttctttgccggtgacacgttttaccgcttcggggctccagtaagtacggatgtcggagaacatctgtccacagccactcagcaggtgaccgaataacatggcaacaccattgcaagcatcattttcggtagccagaacgtatgcttcgcgaatgccgttccagtcgaaagtggtgttgagcagtgcttcactgaagtcaccgtttggtttccagtcagtccattggcgttgcccttggaagccggctgcgatggcattatggccgatagcttcttctttgaatcccatttcaagcaatttcgggttgccgaccatcaagtcacgcatgatgatggtcatttttacaataaattcccagtcggcatccttctcttcacgggttttgcgcttttcgggacggttcttaaagtcttccccttcgttgggcttgcaatatttttcagtccaggccattgccttggcatattcttcatggtcatagattccttcttccatacggcgcaggatctcagtttcgtccacgctttcattacgtattcccagatattcctggaaaaagtcaggatcgacaatagagccggcgatacccatgcagacactaccgaaagaaagatagctttttccgcgcatattggccacagccatggcggcacgggcgaaacgcaatagtttttctgctacatcggccggaatcgtgttgtcatccaaatcttgtacatcgtgtccgtaaataccgaatgcaggcagccctttttgtgcgtgcccggctaatacggcagccagataaacggctcccggacgctctgtgccgttgaatccccagactgctttcggccagtgcggatgcatatccattgtttcggagccatagcaccagcaactggttacggtaatggtggcacctactccttcgcgttcgaatttctcggcacaagcggcgctttcggctacacgaccgatggtgctgtctgctattacacattccacggggcttccgtcaccgtttttcaagttagatgaaatcagttcggcaacagcttttgccaggttcatagttttgtcttcaaggctttcgcggacaccaccctggcggccgtcgatagtgggacgaatcccgattttaggatactttttcatgatatacataggttttagttgttaaattgaatttcttaaatggacttcggtagggagataagttcttatttcctgtccggttagtacaaattctgcggctttccgccccagctcttcccagttgatactgagtaccgtaatcccttggtctattacctcgtaggcaggagtgtcattgtaggctatcagtccgaaatcttctccgcatttcagcccggttgtccggctttgcttgattatattgactacctctatctgacggattgcaatgtatacttctcctttacggacttgtatccggtctgtattttccacaatggctgaatcaatgtgataatcctgacagaaacaattgaaatactgacaactgctacgggggtgtttgatgtcttcgggaaataaaagtactagtctctgatattttctcagatgttctttcaatgcggccaatgcatgataaaaggaatcgtcaaaatcctgacatacgtatgaataatcctttttatcgaacttcccgaaatccaacagcagcaacttagacgaatctattttgtaaagatggggggatagtttctcattgtcgaagttcatcacaatgtatttattgtatctgcctattgattcacgtaagatggtattgaaaagtcgttcattatattgatgaaacaataaatctactttgtagttaatggatagttttttgataaaactattatataacgagtatttaaagggagaatactcgtccagcagaagcagaatgtttgtaagcttgttggtaacgtagtaaccttttcccggagtagagtctattattccccggtcttttaaatcaatgaatgctttgaacaccgtatcccgcgacacttgatactcacggctcagtttgttgatggacggtaatgtgcagtccgatttatatttgcccatggaaatctcctgactgagtaaatcagccagttgtttcactttagtggtctgctgtccaaaggtaactttcatgaactgtttaaggttttacgcggacaatgcaaactgtgctgaactgtcccgatgcaaaggaatgcaatttattcataaacagcaagatgaaaaggtatgttttataacacaagaatcgaagcttctatatcgatttccggaagaatgtgtagtacgtactaatcaaataatataattagagtatttgccgaagtatattaaccgcattacagaacaaagggggggagtcgtgtcttgccggtgcgccggatattgttttgctggtttgtgaaatgattgccgggcgtatgaatgcaaaattgactcgggatatggaatttaaagacggactgcattttatcatcgaacttcctctataaaaaataggtgaaacattattcattgacagggcttttttgtacctttgcacccggaaaaagcaaggataaactttaaacaaaataagattatgagtaaaaaagcccttttaatgattcttgatggttggggtatcggcgatcaaggtaaagacgatgtaatctttaacactcccactccttactgggattctctgttggcaaactatccgcactctgaattgcaggctagcggtgagaacgttggtttgcccgacggacagatgggtaactccgaagtaggacacttgaatatcggtgcaggacgtatcgtttatcaggatttggtaaagattaaccgtgcatgtgccgacaacagcataatgaagaatcccgagattgtttccgctttctcttacgcaaaggaaaatggcaagaacatccactttatgggattgacttcaaacggtggtgtacacagttcattcgatcatttgttcaaactttgcgatatctctaaagaatatggcattgaaaatacatttatccactgctttatggatggtcgtgacacagacccgaagagtggtaaaggctttatcgaacaactgactgcgcactgtgaaaaatcagccggtaaaatcgcttctatcgttggtcgcttctatgctatggatcgtgacaagcgttgggaacgtgtgaaagaagcatacgacctgttggttgaaggtaaaggaaagcaagccaccgatatggttcaggctatgcaggaatcatacgatgaaggtgttacagatgaattcatcaaaccgatcaataattctaccgtagacggtaccatcaaagaaggtgatgtggttatcttcttcaactaccgtaacgaccgtgccaaggaattgactgttgtgctgactcaacaggatatgccggaacaaggtatgcatactattccgggcttgcagttttattgcatgactccgtatgatgcgtctttcaagggtgttcatattctgttcgacaaggaaaatgttcaaaatacgttgggtgaatatctggctgctaacggtaagactcagttacacattgcagaaacggaaaagtatgctcacgtgactttcttcttcaatggtggtcgtgaaactccgtatgatgccgaagagcgtatcttggttccatctccgaaagtggctacttacgacttgaagcctgagatgagtgcttatgaagtgaaggataaattggtagaagccatcaagacccagaaattcgatttcattgtcgtgaattacgctaatggtgatatggtaggtcatactggtatctatgacgctattgaaaaagcagtgaaggctattgacgagtgcgtgaaagatacagtggaagctgccaaggctaatgattatgaagtaatcattattgccgaccacggtaatgccgaccatgcactgaatgaagatggtacacctaatacggctcactctttgaaccctgttccatttgtatatgtaacagagaacaagaatgctaaagtggaaaatggtgtattggcagatgttgctccttctatcttgcacattttgggcatgccccagcctgccgacatgaccggacgggatttgataaaataatgtagaaagtatatttatttgtcattctgaacaaggtgaggaatctgtaatgaagcatggattcgtcactttgtccggaatgacattttaatttaataagagatgatacagatagatgatgttgtaatctcccttgatgtgtttcgtgagaaatttctttgtaatctcgatgcctgcaaaggtgagtgctgcatagagggagatgccggtgcaccggtggaattggatgaagtggaaaaactggaagaggtgcttcctgttatttgggacgagctttcacccgaggcacgggcggtgattgataagcagggagtggtttatacagatgaagagggcgatttggtaacttccatcgtcaatcagaaagattgtgtatttacctgttatgacgagaaagggtattgttattgtgccatcgagaaagccttccgggcaggtaagaccgatttctataaaccaatctcttgtcatctttatcccatccgtataggtgattatggcccttataaagcggtgaattaccatcgttgggatgtatgtaaagccgccgtgttattgggaaaaaaagagaaccttcctgtatacaagttcttaaaggaaccgttggtgcggaaatttggtgaagaatggtataaagagctggaggttgcggcagaagaattgaagaaaagaggaatgatttaagcatcttcggtttttattatccctgatttattacattaaccgaaatttaatactacgaaaataccccatgaaaagactactcttgtcatgctgtatcttattatgcgtcgtattgactttgaaggcgcaagaacagccgttaatcagtccggatgattctatccgtagtttggtgggacgtttgtttcctaatagcaatccgaatctttcggcacacatgaacctgcaattctccacttcgggagttgccaactttattgaaggagatttagaggatgcctcttttaaactgaatcgtgtaaaactggagatattaggttctttcagtaaacaattttcttatcatttccgtcagtcgtttaataaatacagcaatccccactcgttggataatttgtcctcttccattgagtatgctttggtgaattggaaaatgtctgataaattcacgttgactgccggaaaacaagatatcgctttgggtggctatgaatattatgtcaatgccatcaaagtccgcgagtatagtgagtttaatgataacatcagttgttatcaggcaggagtggcgggaagattcaatctgtcatccaccaatgagttggtgcttcaggtagtaaataaccgtagtggagaaaatgatgaaacctatctttacggtttgccgcaaggagtggaaaaagctaaagttcctgttctgtcaacagtcaattggaacgggttcttctttgataacgcggtacaattacgatatgcggcctcatatgggcagctggcggaaggtaagaatctttgttgttttacggcgggtaatatttatgagaaaggccctgttattgcttatattgatttaatgtattctcgtgaagggctggatagcaaaggcattatcagtgatttgcaaggccctgttctgtcggctccgtctacagcgcagcatgcggaatactttactaccgtggtgaactttgactatcgtatccatcctaattggaatctttacctgaaaggcgcttatgagagggctggtatttataagacaaacgggcattttgagaaagggctttatcgtacgacatggaatgcgcaggcttgtgtggagtatttcccgatgcgcaatagcgaactgcttctctttgcccattttttatataaaggacatcatttggcccggcgtgcgcaggccttgggaggcatgagtccggatacccaacgcgtctccatcgggttggtttactctattccggtgttctgatacacacaactgtcctcatgctgcacgctaaagcgtttttgctgtatggtcaagaccttttatacagaaagctactgcatccttccatagcaagatgtacgtctcacagtggaagaacgtagtaattgataggaggaaaagtcttaaggatgaggtttcctcttttttattgtaagatcgggaaaatacgctatatttgtgaaataattaaatacttcaattaacaacacaagatagtataatgaaaaagatcgtcttttttttcctgatgactatattgatagcctcatgccatcaagaagaactttcttctgttccagatgaaccggaagggaaacagcctgtttttgatttatcggaagaagaggtgcttcagggttgcatttatgtgaaattgaaagaagaaccagccggagaggtgcgggtaaggagcataggcaacacggtaacgacaggagtcaaggtattggatcgggctgcttcttctttgaaaatcgagagaatggaacgtactttcccttatgctggcaagtttgaagaacgtacccgtaaagaggggcttcatttatggtataatgtctggttttctaaagagacatcggccacccgtgctgctaccgaagtggcttttctggatggtattgaaacggctgtacctgttcctaagattgtatccagggcaacgccggaaacagcgtggagcctgtatggcgtccggacgggagagtggctgttcaatgatccggatctgtccagacaatggtatctggataatcccggtacggagtcttggcagaagaagggtgcggatatccgtttgtttgatgtgtggaaacaatataatgggaatccggctgtcattgtagcggttgtagatggaggcattaatcaggaacatcctgatttgcaggataatctatggacgaatccggatgagataccaggtaatggtatggacgatgatggcaatggatatgtggatgacatacatggttataattttgtggatgataatgcgactttggttcctcaccgccatgggactcatgtggcgggcactatcggtgcgacaaataataatggaacaggtatcagcagcattgcagggggggacggaacttccggcagtggggtgagactcatgagttgtcagattttgaaaagccttacctctatcggaggagaagtagcttctgatccgtttattgccgccgcgattaagtatggcgctgataatggagctgtcatcagccagaacagctggggatacgctgccactagggcgggaaggaatgcttcttcgtatattaatcctgtacataaggaagctattgattactttataaaatatgccggatgtgataacaaaggagagcaacttgacggaagtcccatgaagggaggtattgtattgtttgcatcaggtaatgcgaatacgtccgatcccaggatagcggcaccggctgattatgaaaaggttgttgcggttgcagccattgaggccgattataggaaagcttcttattccaattatggcacttatacggatatttctgctcccggcggatcgttggatggagacggacggatttggagcacgactacggaacgatccaataattatgaatacttggctggtacatcgatggcgtgcccgctggtcagtggtgtagcggccttggtgatagagaagtatggggtaggcaagaaagggtttacaccggaggctttgaaggagatcctctatcagagtgcatacgacttggatgaatataatccgcgatatgccggtcagttaggacacggatgtgtggatgccgccgccgctttagagatcgatgtctccaatcttcatccttttatcttaaaatccaatcaaataactgataatatgctgatattcagtgtgagcagtagtatgtccggaaatgggaaattgattttgtataatggcatcggcagcaaggtgttggatcttcatctgaaacttgaagccgcatccctgcatgctgtggacataaccaaactctctgccggatattataccttagtctatcaggctaaagggatggaaatcagagagaaatttatcaagtactaatcccaaaaaataaagaatatgagacgaataggattaggtctgtttataataggcataacttttgccaaggcttatggtcaggaggattacggacctgtcaataccggagcggcaaactatctgactatatcagccgatgcgcgcagcgcggccatggggggagtcggtgtggcggctccgggaggagatcatgccgtttttcataatggtgcggcagctttatcggatgtgacgcgcagaggtggggttgcttatacttattctccatggatgcgtgactatgagtccggatactctcttcatagcctgggtagtttttacaaaatcaatcagcgtaatgccattctgttaggtctccgttatttcggctatccggagatggatggaacaggggagggtgcttcgggcatacatcccaaagaaatagccgtggaggctggttatgcatacgaggttataaagaatttttctgtttccgctactttcaaatacttgttttcggatatgggcaggataggcaatagccgtggcgcaagttctgtggcgtttgatttaggagtattgtataagtgcgggataaatgattgggagggtgccggctggtcggtcgggcttcatgtgagtaatcttggaccgaaaataaactatctgacttctaaagatgctcttcctgcaacggttaaagtgggaggtgctgctgacctgccttttttacaaatgcataaattgactttgactgccgatttgggttacagactttcacctgccgacgtacaggcgttaagtgtaagtgccggcgcggaatatgcatggagggaactggtgatgttgcgtggtggttatcattgcggtgataagaagaaaggagatgccagttatgctactgctggagcgggagtggaatatgccggtgtgcgtctggattttgcatggctgtttgcagggcatgaataccttgcccgaaatacgttctgggtgtctttaggatactctttttagacagaacgtaagagcagtgcttgcagtaaccgtcggatcgttggctgtaggggcgggttgaatttgcccggatacaccttctttgtggtatcagacagaagcattccgcccctacagggaacacgatggtagtgaaaaaacttatcagacagcctcgccaagatcaacaattagttgaggcatgggaaagttgtcagaatacggtaactgtgtgccggaatttccattttctgagttgcatctttcacttcaacctcatcaccgatgagataatcataccatttgcctgtaacggggaaagtaacggtatatgctccatcggtcttgctgaagtttccggcaactaacatgtgcttggttgtggaagataaagtgatgaatcttccttgtccccagtcgcttgtaccgacttcccatgagaattggctggtgctggtaaataattcgggattatcattgcgtaattttatcagccgtgaataactatcgtgtaaagccttgcggtctttgttctccagatattcccagtgtagcggtttctttcctgtccggccgttctcttcgatggaaacatcgtatcccatctctccgaactgccagatcattttagggccgggtacagtgaagaagaaggatgcgttcacttcaagttgccgcatacgggtggttaagtctgttttcaatgcttcatctccccattgggtttgcttgtaggcggctcgttcttcgtcatggctttccataaatcctatccatgcggggatactttcgtacagtccgtcaaatgcgctgtcatcgttccaacccatggcggtctggcaataggcgttattcatgttccgccataagtgcataccgtcttcggccagttctttttcttctttgctatcacagaaatgttccaggataacgtatgcctcgggtttcacttctttgatggccgcgtggtaatctttcagaatctcgatgcggctcttgtcgtaattggaagcgctactttcggttgatgcggcttgtgtaaaacctttagtcaggtcgaaacggaatccgtctatatggtattcattcaataagaattgcagattgcgtttcacgaatttacgtaccaaaggactttcatgattgaagtcgtggaatacgctgtaagggtgaggtgcgtctacgttaaagtagggattgtttggggctgtcttattgtttgcgctgttccagtacaatttggcaaacggcatacttccggttgcatgattgtaaactacatcaaaaataactgccattcctgccttgtggcacgcatcaatgaagtctttgtacattttctttgttccatacgctttgtccagagcaaagaagaagcatggattatatccccagctatcgttgccgtcaaattcctggacaggcattaattcaatggcattaacacccagtgatttcaaataatccagtttttgcatggctccattgaggtcattacttgccgtgaaatcacggagaagcatctcataaatgactagttgttccggattgggtaccttgaagtcagatactgaccagcggtagttatcctgctgtatcttgaaaacggatacgattccttttcctccttcgggataacttttgttatccggataagtggaagaggatatataggagtcattatcaggatcgagtatcttttcgcaataggcgtctcccagacggatggtttcaccatttctggtacctacataatattggaaggcatattctttgtttgcatccagatttctgagagtgatccaccagcaaccgctggcatcatcgcgatacatctggcaattgtcttcgttgctaagttgccaatgattgaaatcacctaccacatgggcgaaatctttatggttcccgtccgtgtctttatcgtaaaggacgagggtgactgtagagttgtctataatgttgatgccttctgctacattttcaggcaacgttcctttcttgatagaggccggaacaaattcttggtaagtattgtctgtgacaggtataaagaggtcttcggtttgcagacttccatcttcgttgcggagtacgaatcctaattttttgactggggtcttttctgaactgtaccattggcggatggacggagataaggtaagcgtccatacattattatccagtttggacattttacacttgtccgtgttttcattccattcactttgtacgtatgaccaagagccttcacagataatgcctgtatgtgcatatactgttccctgatagttatataggggagaagagctggcggctctgtagtagatggtcagcggtcggtcggcatcaggctcttccaaagaatagctgagtccttcgggtatgacaatgggtttgggggtttgggagatggtgaacgatttttgtgcgcttcccgctatcaggttcagatggacattccgggtgtcatcgctttcgttttcattgacggtgatgctgacagtaacagttccggcttctccccgggtcggagttacgatgcaccagttgtttgctccaggttcatccagtgcagcctgccaggctctgccggctgtaaaagtgatgcttcttactccgggttgtgaggcgaatgtcattccattggcaaagaagttctcactttcaggagccggagtgatggaatcggtcaagttatcgtcatcggaacaggcagtgaataaactcgcaacgagtcctaggaaaaaaagaaaagtatattttttcataatcttgttatttaaggggtaagatgaaaaaagacatcaggcaccatcggataaacggtaggtgcttgatgtcttttcggatcaattatttagcgtttgactacagtggcatgatagttgcttgcgtctcctaattttagagtaatgacataagtaccagcttcggtagtgatattgtctcctccataagtcagatggttcaagtctccacccagattaatatcccatttgttattggcgcggaatttatagtttccggctgccagttcggttgttatactccattcaccggtttccgcattcagtgtcatgggggttgaattgtcccatcctccttgggtcgcgtcgcctattattccccattcggttttactgaatttataagtcaaggtggacaggttggcttctatacgataaaatccggtttctgtgacactcaggtttccggctcctccatcggtgctcagttcggtatcactggcatagccatagtttgtaccgtcccagtctttctgtgaggtaagtttaaatgtgttatccgcatccatatagatatagccgtcataatgagtcatatccgtagaataaagataaggcgccgtctctggtttccatccttggtgtccgcccggaacgtaaaggaacgggctgatatttcccaatgcttctatcttataggtatattccagcatgttcaaggtgattttcacccatcctttggcagggatttttccggcttgcgggttttctgtcactaacaggccgctctcagagtcgtcaccgtttgtggctacgcccagtgcccccggtgcccaaatatctccgccatctacattgctttgtggaataatcttccagtaacattcatccttgggcatttccacaatcatgctgaaaaccggatcttcatatacatcttttccgctatgaccgaattttatcaatgcttcggaattccatttatttacatcccctatcaagtaataggcggtgtcgatgaacaaagcttcgggagtcgcttcaatttttcccagtgttattttttccggaagggctattgctgaggtgtggcttacgatatagattgtcgcgcgtgcatagattgtccgtgcatggggagctttgccatagatctcttttacaacctcttccagctctcctgcagtgacggaggctgttccgtttttaacgctacagggcaaggggactgcttgggtaaaggtttcatctttcgaaacttccacttccagattgatggtgtctccttctgtcagttccggatggtcggtcagtttggcaacttccagcagggttgcatcatccaagtccttgaaaaggatcggggctgtgcatgaacttcctaaagacagggtgaacccttctacgttttgtacaggttcttgcgggttggtctgtggcaatgcgaaatgatcgttgacgttgtcatcgcagcccgtcag

SEQ ID NO: 3871 - DNA, 58348 bp, Unknown
  gut microbiota DNA sequence
ggcgacaagatagaatcgcggagacgcttacttcatctgaaacatttatgaaggattctattacgaatccttcataacaatacactatcaatcagctatctacaccacaatgacggatttgaagaattttccgtcctcttttaattaatatactcttacaggtttaaagctcccccagcctttttcccaataccggatgcaccacatccgatgcaatctccgccagcgggtccatgacaaacctccgttcagtcatcaggggatgagggatttccaattccggcgtatgcagtattaaatcgccgtacaacaaaatatctatatcaatcaggcggtcactataattacctcccgccgacttcttcatccggcctaattcacgctctatctcctgtgtttcccgcaatatatccaagggaggaagcacactctccacgcaacaggcggcattcagaaaagaattttcagaagaaaacccccaaggggcagtaacataaaaagcggaaagggcagtaacctcccctatccgctcatttatcttccggacagcaacatgcagatttgattctttatcacccagattggttccaagtcccaaataaaccctcatacgctgctccaaccggtattacttatccaaaatcaacatagcgtcgccataagtaccgaaacggtaatcttccttcaacgctgtatgataagcctccatcaccagatcataaccaccgtaggcagctaccagcatcagcaaagtggagagaggcaggtggaagttagtaaccatgctgttggctaccgagaaatcataaggagggaaaatgaacttattggtccatccgtcaaattctttcagatgaccatccgtacctaccgcagtttctatcgtgcgcatcactgtcgttcctaccgcacaaatattctttccttcatccttggcattattcacaatacggcacgcatccgcattgacatacatctgctccgaatccatcttatgcttggtaaggtcctccacatcaatctcgcggaaattacccagtccggcatgcatcgtcacaaaagcaaagtctatacctttgatttccatacgcttcatcaactcgcggctgaaatgaagtccggcagtgggagctgtcacagccccttcgttcttggcaaagatagtctggaaacgttcggtatcttcctcttctaccggacgacggatgaaactgggcagcggagcctctcccaacgcatacaatgctttcttgaactcgtcgtgagaaccgtcatacaggaaacgcagggtacgtccgcgggaagtggtgttgtcaatcacttcggccaccatggaatcatcgtcaccaaaataaagcttgttaccgatacggatcttacgggcaggatctaccagcacatcccacaagcgaagttcctcattcagctcgcgcaacaaaaatacctcgatacgggcaccggtcttttccttatttccatacaaacgcgcagggaaaactttcgtatcattaaagataaacacatctttatcatcaaaatagtccaggatatccttgaataccttgtgttcaatcttacctgttgatttgtgaacaaccatcaggcgcgactcatctctatacttagccggatgcaaagctattttatcctccggcagtttaaatttaaattgcgacagtttcatcttatctctccttattcgtttataacttcttcaatctcttgttggtcaagccattccggaaaactttccaccgacaaacagtcttccagtctcacatcccccacccgggtacgtatcagccctgtcaaatgagcaccgctattcaaagcttcgccaatatcacgggccaatgcacggatataagtgcccttgctgcacactaccctgattttaatctcaggcagattacattccagcaactctatctcgtctataatcaacgtcttggctttcaactccacatcctcaccttttcgagccaaatcgtaagcgcgtttaccatctaccttacaagccgagaaaacaggcggaatctgttctatcctgccgataaaacgctgcaaggcttcctctaccaactcgcgggtgatatgttccgtaggataggtagcatctatctccttctccaggtcgaatgaaggtgtggtagtccctaactgcaaggtggcaatgtattctttggtatgatactggaactcttcgatgcgtttcgttgccttgcctgtacaaataatcatcaccccggtagccagcgggtctaatgtcccggcatgtcccacttttattttcttcacgcccagtttgcggcaaatatggtatcttatcttgttcaccactgcaaatgaggtccatttcagcggtttatcaaagtataatacttctccttctttaaaattcatccaattacatcaatgtgcacgctatcgtaacggcaccggctatggcacaatagatagcaaaataaatcaacttacctttcttcacaatattaatcatccacttacaagctacacagcccgatatgaaagctgccagaaaacctacaaccaatgacaatacagatatatctgatgtgccggctgcagctccttttacaatcttcataccatccagcaacgcctcacccaatataggaggaatcaccatcaggaaagagaactgagccagtttcgccttgttgtctcccaacaacaaaccggtagcaatggtagtacccgaacgggataatcccggcatcacggcacaagcctgtgccagacctataataaacgcatccttcatgctgatgttctctttcaaacgaggttttgcataataagagaaagcaagaagcaaagctgtcaataacagcatacaacctacaatgagcaagccggaaccgaaaatttcttccacataatctttaaaaaacacacccacaatgccgataggaatcatggataccaggatattgatcacatattttgtctccgcattcatctcaaacttgaacaagccgcggaatatccagcctatttctttccataatataaccaaagtactgagcaccgtagccacatgcactgctatggtaaaagtcagattatcttccccttgtatgccaaacaatgccgaaccgatagccagatgaccactactgctgaccggcaaatactctgtcaatccttggagcacaccaaggatcaatgcctcaaaccattccattctttaaataaaaattgagaattaaaaattaaaaaaatcaagagttaaccacttctgtcttgtcctttggcttgcggacaataccataaatcataaagataaagccaaagaaacatactgcgggcgccactttgatgcgacgtacactaaaaatatccggctcaaaatatccttctgtcgaactaggtcctgtcatcagcagaaaaccgacaataatcactgccatacctatggcaagcaatataaaattagttttatcaaaggcgaatttttgtctatccatatccttttattattaaatgtaatacaacgcactagctttcatgcgcaagtatttgttgattgatatatatgcacacataaaggtaataaccacaccaaacacaaaaacagaacccattaccataagcatggtcataggggtaataatctcaatcaattcgggttcatatcttaccaacgcataggccattcctatcaatgccgcatctgccatagcagcggccagtatccctatccatatattccgcaccaaaaaaggacgacggataaatccccagcttgcccctaccagtttcatggtatgaatcagaaaacgtttggaataaatggccagacggatggtgttattaatcagcgcaaaagaaataagggtaagcagcgcagccagtcccaatagcaaaaaactgattttccgtatattgctgttcactgcatccagtaaatcctggggatagttgatttccattactttcttgttctgcataattttctgctctatccaagaaatgctgtccgaattggcataatcggcattcagttttatttcaatagaagctgtaaaaggattatatcccaagaattcagccgggtctgtacccatcgcttcgctctgctctttcaacgcctgctccttcgatatataggaagtttctttcacaaaaggttcctcattcaattttttctggaatttcaaagcgtctgcttctttcatatcatcgctgatgagtacggagaaactgatgttctcgcgtacatacttggataagttattggcagacagcacaaagaataccaccatccccaacaagagcaacaccagcattgtactgatgctggaggtaatgaactgcatatcgaaaaaggaccctgatttttttcccataatcacttctttctgaatacataaatcattgaactactgcgttcttttttcgccagtgaactgaaccaggccaacaggcccgtccacattcccttcaaaaaggacaaacggctgcctttatatctttccgtcaacatggatacataaaaagcatcaaaaggcatcggatgctgttccgctaatttaaaaccatgcttgacaccgaattgttgcatgacggaaggtgtaaaatgccataaatgacggggcacatcgtatgccgcccaccattccttatacttttccgcatcatacgaactgggattaggcacagccactatcaatactcccctctctttcaacagcttgaataatttctcccacgtttcattcagatgctccagatgctccatcacatgccataaagttatggcatcaaaagaatgatcggcatatcccgccaaagcatcctccgtatctacatccaattcaaaatgctctttggcaaacgaacgcgcctgcggacttttctctatcgctttcacccgccatccgcgctccttcatagcattactgaaatatccggtaccggtacctatgtctaacaaagtacctttactcaaaccggatgtccgttttatcagcttggctttgcgtgacagcatatacttgcgtacctcatggtatacacggttcatcagccccttgcgggtatcagtgtgtgaaatataatcgggggtctcataatatcgccctatctcggcttccacgggtgcaccttgtgtaaaaataaagccacaatcatcgcagcgaaccaaattgaattgttcacccgaagcatagtgatccgtacaagtgattgcatgtcccaaatgttttccgccgcacaacggacaagtatttattttgagtatatccactttttgccctaatttgctgcaaaataacaaataaattgaatgagaaggactatcctttaagtacttttaagagtataagttaataattcgtttttacttttcctacatttgtgcagataacttaaaaagaaacgaaaatggaaaataaaaaactgacccgttccaacaacagaatgctagccggagtatgtgcgggactggctgattattttggctgggatgttacggtagtgcgcattatctattcatttgccacggttttcacagccttttcgggcattattgtctatataatcttatggattgttatgcccgaaaagaaatatcgtgacggttacgaagaccggatgaatgacagactgcataaccgataaccggaggcattatgcaatgcccagcagttccacctcaaatattaatgtagagaaagcaggaatcggcccgcttgtacggttgccatatcccatagtataaggaatataaaccacccatttatctcctacatgcatacgttgaagcgccagctgccatccctctatgacatcacacagccggaaagcttcgggacagttacggtcataggaattatcaaactcttttccgtttatcagacttccccgataatgaacggtgacaatacttcggattgtaggtgaaactgtacccgtacctgtctgcaatactttataaaacatattacaaggtaaaggacaaataccttcctgtgtagaaagaacttgcaaatattgcaagttcttttccttatattcttcttttctccccatcagaacacctcttctcctttcaatgtagccgaactggcttcagtaatgcgtacatggacaaaatcaccgatacgatgattcccacgatcaaagaccaccaccttgttttgctgtgtacggccaaaaagctgctctctggaacgcttggaaacaccttctaccatcacttcgaaggtcttgcctacatcacgggcattactttcggcagaaagacggttctgcaattcaatgatttcattcagccggcgtatcttaacctcttcgggtacatcatccggcagatgcttggaagcatatgttccgggacgttcggaatatttaaacataaaggcggaatcgtacgcacactcacgcatcaaggatagagattcctgatggtcttcttccgtttccgaatgatagccggagaaaatatcagtactcagaccacaatcgggaatgatacggcgaatagccgctaccctttccaaataccactcacgggtatatttgcggttcatcagcttcaatatgcgcgaactgccgctctgtaccggtaaatgaatatgcttgcatacattaggcgtttccgcaatgacttgcaaggtttcatcactcatatccttgggatgtgaagtggtaaaacgaacacgcatgtccggaaccgcctcggccactgtgcggagcagcatcgggaaagtaattatttcaccctctttctcaaaacgataagaattcacattctgtcccagcaacgttacttctttataacctttgtctgccaagtcacgcacctcattcagaatactttccacatcacggctacgctcacgcccacgggtatacggcacaatacaataatgacagaaattattgcaaccacgcataatggatacaaacccggagatatgattgccgcaaatacgggacggaattacctcacgataggtttctgtagtagaaagctccacattaatggctttctcccccgcttccaccgaagcgaccaaatcgggcaaagtgagataggcatccggtcctacgacaagatctacatgatggttctcgatcaaatcatcttttacacgttctgccatgcagcccaacacaccgacaatcagattccggcgtttgtttttcttcatagaatggaaaaactccagacggttcagaatcttttgttctgcattgtcgcgaatggaacaggtattcataaatacagcatccgcttcatccaatgtttcgcatacatggtagcctgccatttgcataatagaagcaaccacttcactatcagcaacattcatctggcatccgtaagtttcaataaacaatttcttgttttcggaatcagttgcagatttaaagtctgctcctgttgtttctttcatattttctctgttttatggtttcgtaggcaaagatacggagttaccgacaaattaaacgaataaaagagccgaaaattgaatattataagagatttatgcatttaactgttaaataattataaccagtgaacaaaaaaaaccgttaacgttaccaacatattattataattcgcatatttgcttccgaaaaacattagattttttcatagttaaggtttaggttaaaaaaataggggaagacaactgtgaagttctcttcctttttttatgcccttttatagagttagttatgaaatatttttctaactttgagcattcattatataataaggaaagtatggatatcattcaggttatcatatttataataatcattgttgcagccatcgtgcaacaaatctcaaaaacaggcaaagagaagaaaacaccttctccaaagaaagtgcttgcagatatatttcctgaaatagagcaggagaacatagaggaggaccttcctgtttcttccgttcaaacagtccgcacacctcagactccccgcatgcagcatcagccgatggtcaagaaaccaacagattcaccccggaaagagaacaaaagggaagaccggactcctataagactgagtactaaagaagaggcacgacgtgcttttatttattcagagatttttaatcgcaaatattaataacaactatactaataagaataacacattgaatatcatgggatttaatattatttccgcagccgaagcagccagctatatcaagcatggctacaacattggactcagcggctttactccggcaggaacaccgaaagccgtaacacccgaagtcgcaaaaatagcagaagaagaacatgccaaaggtaacccttttcaaattagtatctttaccggtgcttctacaggagatgctacagacggcatcttatccagggtcaaggcaatccgttaccgtgctccttacacaaccaaccccgatttccgaaaagccgtaaataacggcgaaatagcatacaatgatatccatctgtcacaaatggcacaggaggtacgttacgggttcatgggtaaagtagatgtcgctattctggaagcgtgtgaaatcactcccgacggcaaagtttatctgacagccgccggtggaattgcaccgactattgcacgtctggcagataaagtgatcatcgaattgaacgctgcccacagtaaaaacggtatgggcctgcacgatgtttatgaaccgcttgacccgccttaccgtcgtgaaattcctatttacaaacccagcgaccgtatcggtctgccttatgtacaggtagacccgaaaaaaatcatcggcgtagtggaagtaaacacccctgaccaggcccgttcatttaccgcaccggatcctatcaccgaccagattggacaaaatgttgccgacttcctggcagctgacatgaaacggggtattattcctgcaagcttcctgccattacagagtggagtaggtaacattgctaatgccgtattgggtgctttgggacgagacaaaacaattcccgccttcgaaatgtatacggaagtattacaagacgcagtggtggacctgattcgccaaggacgtgtaaaatttggaagtacctgttcattgactgtcaccaacgaatgtctgcaaggtatttatgatgatatcgacttcttccgtgacaaactggtcatgcatccgtctgaaatctcaaacaacccggaaattatccgtcgtcttggtgttatatctatcaatacagccatcgaagcagatatttacggtaatgtaaattctactcacatcagcggcaccaaaatgatgaatggtattggtggctcaggtgactttacccgcaatgcctatatttccatctttacttgcccgtctgtggcaaaagaaggaaaaatcagtgccatcgttcctatggtttctcacgaagatcacagtgaacacgatgtcaatatccttattactgaacaaggtgttgccgacttacgcggcaagagcccggtagaacgcgccaaggctatcatcgaaaattgtgcacatccggattataagaacattctttgggattatgtaaaaatgtcttccaaaggacaaactcctcattgtattccggctgcattggctatgcatgatacgctggccaagaaaggggatatgcgcctgatagattgggcagaatataaatagtcattatttgctgtatctcatacgtttccggtcggtacgatgtatccggccggaaactttttatatctatcccacctttttgtataaaaaacaatatcttccacctttttaatcaaaaaatacacggacttttttcataattattctatttttgccgtgtaactaatcatttttaccattttactatgagaaacaaaattctatatttatttgcttcccttgtgatgctaagcggctgtaacaatcaaccggcttataaagacagcagtttatctcccgaagaacgggcagaggatttattgcaacaacttactctagaagaaaaagttgccttaatgatggacaactccaaacctgtcgaaagattaggcattaaaccttataattggtggaacgaagccttgcacggagtggcacggagcggactggccaccgtctttcctcagcctataggtatggcggcctcttttgagcccgatgccatacataccatctataccgcagtttcggatgaagcccgggccaaaaatgccgcatactcggcggcgggaagctacgaacggtatcaaggcctgaccatgtggacacccaccgtcaatatttatcgcgatcccagatgggggagaggtattgaaacgtatggggaagatccttatctgacaagtgtcatgggggtaaatgtggtgaaaggattgcaatgcatggatgctaatcaaaaatacgataaaatacacgcttgtgccaaacactttgccgtccattcagggccggaatggaatcgtcatgagttcaatgcggaaaatatcaaaccgcgtgacttgcatgaaacttatcttgtacctttcgaagcattagtaaaagaagcaaaagtaaaggaggtaatgtgtgcctacaaccgtttggaaggcaatccgtgttgcggaagtgaccgcctgctgatgcaaattctccgtcaagactggggatatgacggcattgtactttcagattgtggcgctattgacgatttctatcgggaaaaaggacacaaaacacatccggatgctgaatcggcctctgccgccgcagtattaagcggtacggatctggaatgtggttccagttataaagcattggtagaaagcgctaaaaaaggattaatcagtgaaaaggacattgatgtatccgtaaaacgattattaaaagcacgctttgaattgggggaaatggatgatcctgacaaagtggaatggactaaaattccttattcagtggtttgctcggcagaacatgattccctgtcactagatatagcacgcaaatcaatgacgctgttactgaacaaaaataatatcctgccactgaaacgcggtggacaaaccatcgccgtcatgggacctaacgcaaatgattctgtgatgcaatggggtaattataacggtactcccaaacatacgatcaccttattggaaggtatccgctcagccatgggagagaatgacaaactgatctatgaacaaggttgcagctgggtggagcgctcattaatcagaagcgttttcagccagtgtacttctaaagaaggtccaggattctccgcccgctattggaacaacaaggaatatgaaggaaatgcggtagccaccgcacaacttaccacaccgttccgtctttgcacttccggagccaccgtatttgctcccggtgtgaacctgaccgatttctcgaccgtctatcaaagtgtgttcaccccccaggaaacaggagaggttattttcaacttctatagttgtggagctacacaattattgataaatggtgaagaagtaaagaaattcaccaacaaacatgggggcaggggacaagcttacgccatgcatgcagaagccggcaagccatacgatatagaaatccgcttccaatactttagtggagacgcacagttgaatttcgatcttggatttaaagaagaagtcaacattaaaaacacggtagcaaaagtgaaagatgctgatatagttatatttgcaggcggtatatctccaagtttggaaggagaggagatgggtgtcaatttaccgggattccgcaaaggagaccgtactgacatcgagcttccggctgttcagcgtgaattgataaaagcactctgtgatgccgggaaaaaagttattttcgttaatttttccggatcacccattgccatggaacccgaaaccaaatattgtcaggctattttacaagcatggtatccgggacaatccggaggtaaagctgccgccgaagttttgtttggagattacaatcctgcaggacgactgcccgttactttttaccggaatataacgcaattacctgattttgaagattataatatgacaggacgtacttaccgttattttaaaggtgatcctcttttcccattcggttatggtttgagttataccacttttaactatggtaacatcaaactggagcaaacgattaaagtaggggaaactgccaaaattattgttcctgtaaccaataccggtaatcgtgacggggaagaagtagtacaggtatatctgaaaaaacaagaagatgcggaaggaccggttaaaacactgcgtgctttcaaacgtgtacaaattcctgcaggaaaaacagtcaatgtagaattagagttaacacccaaacaattggaatggtgggacgcgcagacaaataccatgcgcaccatagccggaaacttcgatataatggtagggggtaattctaaagatgccgaattacaagtaaagacgctgacactgcaataataactccgaataaaataaatcaagtctgcggcatttttgttttaaatatagaatttgacaaaaatgccgcacttgacaaaataaaaacatcagaacaactcaatctgcttatctgcctttatttgttgcacaaaatagttgtcatgactcaccaccaacaaagtgccttgataatccttcaaagtttcggtcaatatctccatactcagaatatcaatattattagtaggttcatccacaataaaaacatcgggggcctgtgcactcaccataagacaacagagagaaagtttcatcttctcacctccactcagatagctacacttcttgttccatgtggaaacaggaaacaaaaaacggttgagaatcgttctcaattcattatcatacaattcactattgaataaggcaagttgttccaataccgacaaatcattacgaattatagaatattcctgatcaagataaacgtacgtcagcccttctgcctgtatcaaagaaccttgagtaggagcaagacttccggttatcaacctcaataaagttgttttaccactaccattacttcctttcaaatgaatacggtcaccacttttgatggtaaactcaagaggagaagaccacaaaggattttctccatacgaataattcacacttgaagctacgataagtatcttaccgatatgcaaagaagatgaattgaaatttactttcatcgccttcatatcaggtaaagctttatgcagttctactgtttctcctgccaaaaaacggatcttatcagcatgaacatctcctaaacggacagtacttttctcagcctgatccctgaatgtatgcattgccatctttccgactcctttcttcacattttgttttttacctcgcacatcatgcttttgttgacgctccattacctcacgtgcctgctttcgggctttttgtaattgcttttcattctccttcaaccgggtttgcagagcttctacagccaatttcttctgttctttatagaaatcgtaatttccagcataataagtgacaccttttgcagtaagctcataggtagaagaaagtaaattgagtaatgtccggtcatggctgacaaccagtatccctgctgcagcagtagttataaaacggtacagccggatacggctttcgtcatccaaatgattggtaggctcatccatcaaaataaaagcaggagagtatatagtaattcctgctagaaaaacttttgttttctcaccgccactcaacaaatgcatgggataggagagaggtacttctgccaacccccattcattcaaagcagcaaccgctttctcttctatttcccaatcatccgccaaagccgtaaaatgctctattgaagcatcgccctgtaaaatggcatgaagtgcatataactttctttctattcccaatgccccggctactgtcaaatgattaaactgaccaaaatgctgtggaatagaatagggaatatccggacatataatttgtccttcagaaggtaatagctctttagttatcaatcgcatcaaggtagattttcccgaaccgttgtttccgatgagggctactttttgccctttactgatagtaaaactgacattactgaaaagcacatctttatccggatgcatgtaagtaatggactgtacatgtatacacatactctttctaagaattttaaatatgaatactgaaaagttcgtagttggaataagaagacaactattgcgccacaaacgaaattatttcgcctgctgtcccaacataaaaacaaatagttgtatggaaatgaatgttttaaattctcatcggaatatttttaaatttgcgaggcaaagatagcaggtttatggaacataaaaaaatattccccaatctaaatgaatagattgaggaatatcagaataaaaaatctatttattcaaatgaaggcaaagtcacagagaaatgaggattcggagtatgctgtgttctgataatctctttcatttgtttcacaatatccggatgtccggcagcgatatcatggtcttcatgaatatctgtagcaagattgtaaaggaaaggagtcccttttttcactaccatcttccagtctcccatacgtacaccaatctgatcggtttcatcaaattcccaatacaagaaatcatgtttcttctgtccttcctgccctaacaaagtcggagcaaaagaaataccatcaaaataatccacatcttttttcttgttagtgtacttctttacataattcttcacacctgccaagtcacaaaatgtaggcatcaggtcatagaaagctaactggtgatcattaaccgttccttcgggtactttacccggccaacgcacaatgaacggaatacgaatccccccttcataacattgacgtttcaatccacgaagtttgccatcacgaccaaagaaggtagggtcagcccccccttcttcatgggggccgttatcactggtaaaaatcacaatggtattttcgtccagtcctttctcctttaatttgttcaaaacttctcctacataataatccaagcgagtaatcatgccggcaaactgcgcatgggtgtgtaccgacggattatatcttgatccttcctgtccaccccaagttttatcttcaaaaaacttcttttgataacctgtcagaatagaatcttcgggctgcgccagctctgcatgaggaagcgtataagtaaaaataccaaagaaaggttgcttgccatcctgtttatccaaccatttcattgcttcttcatggatcatatccgcagaatattgcggacgtttgaaatagtccttaccaaacataggatagttgatattctcatccatcactacacgaaccactgccgtatcaccagccgatttactataccggttcaggaaattcggataatataaatgagcctgaaactgacaaatataaccataatattcatcaataccccgtttgtccggcgtagacacagatccctcatagccccctgcccatttaccaaacataccggtagtataaccgttatctttcattatttcaggtataatcacatgaccgggatcgtatggatgttgccccaccacggcatattccttattatttccatacatcacaacaggggcatcgcgccagtactctttgttcccacgtacttcacaatgtccggaatgttgtccggtcataaatgacgcacgtgatggagcactcaccggactaccggcatacgcttgtgtaaaacgcataccttctttagccatattatcaatattcggtgtactgatgtaggactgaccataacaccctaaatcaccataacccatatcatcacacataatataaatgatattcggtttaggagttttctgagcataagcgcctaatagaggaaatgctaatccactggttaaaagaaagaggtttcgatttttcatatattctgttttttactgaatttaataattactactcctgctataaacatcggcaatttagagaaaatatcctaggctgcaaagctatagaagaaaaaaatatcattcacctactctcgataataaggattcaatttcacaggaataggagcatgagtttcttgaatccacttcatcagtttctgataaagttctcctcgctttacaggatttgaacctgatagatcttgtgattctcccagatcattcttcaaattaaacagttccatagacttatcttcataatgatatatcaatttccaatcacctgaacgaatactggaataaggttttgcacggaaatctcttcccccgtttaaataagactccaaataagccggaaaatgccagaaaagatcacgttccgtctcattattatttataagcgtaaaaatatcttttccatctaagttagcaggaatcttaccctgtgccaaagtaacaaaagttggataaaaatcaactcctgttattggaacagatgaacggatgcctccttctattttaccagtccaccttataatcaacggcacacggctcccaccttcataaggcattccctttcctccatttaacagataattgtctgtcactggttccgaacctccattatctgaataaaaaatgactattgtacgatctgctattcctaatgtcttaataacttggcatatcctatcaacactatcatctagtttttcaatcattgcagcatatataggattcttatgatatttaccgggagttttattacgatatttatttatcaatgaatcaggtgcttgcaaaaccgtatgtacggcatgatgggacaaatgtaagaaaaaaggaccttcactatgagattttataaaagaaacagcttcttcagtcaaccgatcagtaagatattcacccaatataccttcttctaatcccacatgacatttacttttatcaggcagacaatagggataaaaataagaatagggagctcctgctctattaccgcccacattccatataaatccctgtgacaagggtcctgtaccgtcctcatcatcccccaaatgccacttcccgatatgaccacactgataaccctgttcttgcaaagcctcggccatagtcacaaagtcggcacagacatcttctacattgggaatagctatatatttacgtttggtacgatcaccacggtcgggaggactaactgtatatactccatggcgtggtgtgtacattcctgtcatcatacaagcacggctaggtgctgaattggcggctgcagcgtaagcattgtcaaacaatattccttctgtagcaagacggtctatattaggagtttcataataatcactgcccattacacccaaatccgtccaacctaaatcatcagccaaaataaacacgatattaggtttttcttttgtaactatatcgatagaaaagctctgttgtattcctacggtacacaacactacagtagtcaatcctattttctgaaatctcattttatttcgatttttctaagtttaaaaaccaaacaagaccgtctccatacgttattccgcatttgagacagcctcattcgtatcacactataaattaccaaccaggattctgttccagttctgggttcaataatatttcggtagtcggtacttgatacaaataatatttatctaaccaacctttaccttcttttagaggatcattgaaaagatacaaattaccttccgtcaatgaaccgtcagttccatcagaataaccagtttcaggattatataaagtcatattatttttcattgcctcttctttactcatccaaagaccagttgcaggtttattgaggaaccacggagccatacgccaacgacggatatcataaataccaaatccctcacccatcaattctataatacgttcgcgacgaatttcccataagacaggatcaaccaaaataccactttcattacctttaggatagtattttccacggttaggatcaaaactatcattaatgtcagcaaccaccattttgactacaccggcacgatcacgcaacttattgattgttttgtctgcaaccccttggtcaaatactcccaattcaaatttggcttcagcttcattcaacaggacttcttcaattttaaaaataggtttgtcagctgtattcaaattaccattattaaagctggtttcccagttatcccaattcttccatacatagtagcctgaacggcaagtcacaaatgctccagtacctaatcttggtatttcaggtacaagtgatgcactccagttctgcccaggcaaacgtttcataccaacacccgggttactgcaactttcatttgctcccataatatcaatatattcacggtctgccggattgtctgtatacgaccaggtaggatagtcgccttttccagattttactttataaggaggtataaccgtgtgatacaaacgcgggtcacggtcacgaaataccgcatacatgtccttatttccatggtagcccgatccgtcagccaaaatcggcttgccattcttcatcaaataaagatctaccgtattctggttcatctccacatagtgtgaagaagtatgttcaatataactcatgcccataggatttatatccttcacataagatttatagagaatgatacctggaacttgtcccaaatcctctgttgtccacatttcaccatatccggcaccgggttgaccgtctgttcctgtgtaaagagtaggataagcggccattaataactcggatgcgcgtacacactcttgcagatatttttcagcatcacccaattcatgatatttcctccatgtaccttcacgtaatccgaaacgcgaaataacggcacgtacacaatcttggttaatcgtattgtccccatcctgtgatgtgaaatttccaatattctgttccgcccattgcagacgttccaataccttgtcggctacggtttttctatccacacgaggtccataagcttcgggagaatcttcctgcaatacctggtccacccaaggcacatcgccaaaacgatctatcaattccatataccaaaaagaatgaaaaaaatatcctactgcacgccaatggtctttctgagcctctgtcatactagaattatcaatgtgtgaaagcatgatattgacacggcggataaatgatttaaaatcccagccattaccggatgctacactggcaactgtctgataagcaaattcattgtagccactttcatatttttgctgaaagtatcctgctgccatatcgcccttatactgtccgtcttgtccgaatccttgtaaggaagtgcgaatagtattatttgtaaacatctcataacaaggccacataaaagccttgaagttatcgtaggaattgaatgcattattctccgtcaagtctgtaacaggagtcttttccaagaaactatcattacaactagagaggctgattcctgcgagaattgctaaacttataaataatcttttcatatactcgtactaatttaaggtttataatgtaagattaagcccaaaggatactgtgcggaatgcgggataatcccatttcagcgtttccgggtcgataccctttggcaatgatgagaacgttgccagattttctacactgacaaaagcacgtaactgcgacaaagatattttggtaatccatgctttggggaatgtatatgacaaagtaacattcttgatacgcagataagaagcatcggacaagtacttgtctgactggcggtaattagagccttggttaccatagttgccataaatacgtgggaactcagcattaggattaactgctgtgtaatcaccattggcagcatctaccggttgccagtaatcacccaaacctttatataaaggaataaacttaaagtcagaatataatgggaaagtcaatgtattggcaatccatttatcgcgtttaccggttccttgcaaaaaggcactcaaatcaaaacctttatagtttaatcctagattaataccataaagataacgaggagtttcattaccaatcactttacggtcgcccggattattcaacgtattgttgccgctggaaatcatatttgtccctctttcatcatccattaaattcttgaacttcacatcacccggacgaggattatagccatctatgcttggaacgccatcctttaatttccatgaagaagtatcgacaaaatcgtctacggtataataaccatctgtttcatatccccagatttcgcctaattccttacctttataaaactcccaaaatgtatatgttccacccgtcagcgcattcgtcttttggctgcttaatatgtaggatgagttactgtcatacttcacaatctttgacttgctgtcggacaggttgaaaccgactcggtagctcacctttccaatctggtcgcgccaattgaaactcagttcccagccacgtgtacgcatatctgccgtattctgataaggagcatccgcacctactacagcaggcaattgcacacccggagcaagcatgccgttcgtattacgctgataccagtcaaaagtacctgtaaagcgattactgaacatagagaaatcaataccgatgtctaatgtccctaccttttcccaagtaaagttacgacttaccaatgaaggaatagaagtaatagcggttacataattaccattggatatccaaccattgtatttattattcaccgccatagttggaataaatgaataagcaggcacgttctggttaccaatcataccataagaagcacgtagcttcaaagaacctaaccaattctgagtactttccatgaatttttcctgtgcaatgttccaaccggccgaaacagaggggaagaaaccgtaacgtgattctttaggaaacttagaagaaccgtcataacgtccgtttacttccagcaaatatttatcctgatagttgtaattcacacggaagaatccgccgcgaacagaaaactcattatacttgtccgtagctttcaatgtagatgtacccgaacccaatgaaggcacctcaataacagcttgtccataggataaagcctccattgtttcctgataactggattcttgattgaaacctgccattatcttaaactgatgattacccaatgagaaatcataagtaccatacaagttgattgagttatagtcggtatatcttttctttttttgtagatagtcattggtcggagtcgtgtctttaccaccttgcacagtagtatataccacacttcccgtataccagctataatcatatatattcttgtcgaaagtatattcaaatgctatttcaaatccctttaatggcttcaatatagacttcaggaaaatacgaggattgtcatacaatgttttttctggattggaccaacgtatctgattggacggagtaaagaaaggtaatccatcgcctgcagcagaaataccttccggcatattgccttccggatagaaagaagcaagacgagtactgtaaacagcgcccaaagcagactttggctccattcttttactatgtgcatagctaaaagtggcttcctgagtaaaccattttgtaacattggcagatataaatccactgacattcattcgtctgtatttatccttgtcagtaatcagcacaccgtcattatcaataaatccggcagaaagacgataacggagcttatcagtaccacctgtcattgatatattatgtgtatgctggaaactagtctcaagcatgttcttcaccaagtccttttcattcatataataaacagccccatccgtatctttaaagataccatcgccgacagtaggaatagaagacggattattacgatattgctccaaatatcccatccatttgcttacactaggcgaacccattgtccagaattgatctccggctgcatcagaataggcctgcaaatattccatcaacggtgcctgttctggcaaattcatggcagttgcaaaggcaaagttattattataattcagttggaaagaagtttctcctttcggacgtttggtagtaaccaaaattacaccaccggcagcacgggcaccataaatggcagctgaagcagcatctttcaacactgtaaccgtttcaatatcctcaggattaaccatatccaagtctccttccacattgtcaattaaaatcaaaggcttgatagcactaccataagaaccatcatcatttttaatacctacagaataagcgccacgaatctggaatgacttacttttacctggagcattgccatcactagacacaaacaagccgggaaccgtaccttgcaatgcatcagcagcttgtgacaaaggacgattgcctatcacttcatccatcttgaccgaggcaacggctcctgtcaggtttgcttttttctgcgaaccgtatcccactaccaccacttcatctaaagtttcagtgtcctcacgtaataccacctgaatagtttttgtatcacgtacagttacctcttgagatttataaccaatataactgatttgtaacttcacaggaaattcagaaacttctaaagaaaattttccatcaaaatctgtgatacacccgttagtagatcccattaccacaacagaagcaccaataactggttcttttgccacatccataaccaatccggtaattgcattttgtcttgattgctggggtttataaacagaaatatgctccccttccactttataacggatatttttccctacaaacaacatctcaagcacctcttccacacttttatttttaacatcaatagatactttctcattcatattaatatcattattacgaacaaggaaagagtagccggtctgtttttcaatctcataaaaaacccgactcaaagccactgaacgctgttgtatagaaagttttgcctcctgaataggcaatgcggccatagtgacatttccccatagtagaaatgaaactatccatacaagagagaggcaatgccccctacgaactttacaaaagttttttttcatacttagaatttttagttaacaattatttaagcatgtacttttcacagtactttttatctatcagttaccggtctgtaataactattgtttttcctttctttctccacataaacttattatccacatctaaataagaaagaatttcatccaaagtcagattcgtatctatacttcctgaaaaatattcagtatacactttccgagactgcacaagtatctgtacatcatattttttcccgattgttttcaaaatatcaaataacttttcattaacaaataccagtcttcctgtagtccatgctgcttgagataccgcatctatctttctcatagacaataccttatcatttttattataaacagcttgctcatcaggagaaagaagaatattctttttagcatctgaagtagtgtaaacattcacactaccttccacaaggctcacttttatttccgcatcatcaggataagaagccacattaaatgttgtacctaatacttttatattcaattcccccgtatgaacaataaaaggcttgagcatatttctagaaactttgaaataagcctcacctgaaagaaaaactttccggtcagtccgctgctgcaaagaaacatcatactttaaaaccgtccccccattcagaaaaacaatggtactatcaggcaataataatttcgaactggccccctggggaacctcaatctgacaataagaaggagtaagaacttctggactagacgaatgatataaataaaagaatgttatactacaaccaatcagtaaagtccatatagcaacgcttctccaaacgcttattttacggaaaaaagaatgtttacgagaagaatagaaattcaatgtatcacacaattgctcaaagttttgctctttcctgcgtgcaaaccaagaagaggatgccaatgcataagaacgggctatttcacgatatttttcgcgacaagcattctctcttttcagtaatatagttagtttctgcatatcttcagacgagatttcgcctttcagataatccagcattattcgttcaaattcatctatttggctgttcattttatatctttggaattatctactatagataatacacaagcaacagacaaaacatttaagccaaaaacagatttttttcattctttttttagaaaagaaaaaataatagaatccctactctagatcccaccttttctcttattttatccatggcattttttacatgtactctgactgtattgactgaaatattatttttatctgcaatctcttgaggagtcagattggaataaagatattgctcaaaaatgaacctgcatttatcaggcaaggaagacactatattttggactgatttttccaaatcagctaattccatttcttgcaaaggcgaacactcggaagcacaaaattcttcttgatactcaagtaatgcttcacggtattcatctataattctttcacggctgtgaagcgaacggaggtaattcaaacacccgttctgaatagcacgtatcaaataagcatgaataggaaaagataactcaccacgcctataccatattttagcaaaagtttcattaactatatcttgcgcttccacagggttaaagatataagaattagcacaagcacagagatagacaaaatagctattatataaaacctcaaaagctttttcttctcctttgtttattctttcaatcaaatctttatctactatacttgcatccatctttattaagactattaatattgcaaatatagcatttcttaaaaaacatcatgccaataaaactatttcttattaaaaaactctagtaataatcaactgaaaaaagaaataagttccagctcataatctgaagaataatacctaactttgtttccgacgaaaatcaaaccctaaataaaatgaacaaaaagctattattctccctgttactggcaggaacagctttcaccggacatgccgatgaggctaggttactccgtttccccgctaccaatggctccgacattgtcttttcttacgccggagatctgtacaaagcacctttgaatggaggagaagcacaaaagctgacttctcatatcggttatgaaatgttcgcacgtttttctccggatggaaaatcaattgctttcaccggtcaatatgacggtaacactgaagtatatctgattccaaccgatggaggcgaaccccaacgacttacctatacagcaacaaacagccgggatgacttaggagaccgaatgggtcccaataacattgtaatgacttggacaccagatggaaaaaacatagtctaccgcaatcgtatcagtgacggtttcgatggcaagctgtggagtatatcgaaaaacggaggaatgtccgaagtgattccattacccgaaggaggtttttgcagctattcccccgatggaaaaaagctggcttacaaccgggttatgcgagaattccgtaattggaaatattatcgcggtggcatggcagatgacatttggatttatgatccggctgccaagaaagtagagaatatcaccaataatattgcacaagatattatccctatgtggataggagaggaaatctactttatttccgatcgggatcgcaccatgaatatctttgtttataatatccggaccaaacaaactgaaaaagtaacccactatacggattatgatgtaaaattccccagcagtaacggacaaattattgtctacgaacatggaggatacctctataaactggatcctaaaacgcgcaaatcagaaaaaatctccatcacgctgacttcagacaatatctatgcccgaaaagaaatgaaacgggtagcagataacctgactgccgccagtctttcaccggatgggcaccgcctggcagtaactgcccgcggagaggtattcgatgtccctgccgaaaaaggggtcacccgtgatatcacccgcaccccgggagccaatgaacgggaaggagaatggagtccgaacggtaaacaaatagcctatatcagtgaccgtaccggtgaaactgaaatctggctgcaatctgtcgaagggggtgatcccatccaactgacccaaaacaatgatacttatatccgccaactgatgtggagcccggacagcaagaaaatactttataccgaccgtaaaaaccgtatcgtagaagttgatattgcctcaaaagcgaaacggactgtcatgcagaatccggaaggagagttctatgaagtaaactattcaccagacagccagtggattacctatactaaatccggagctaataacatgagtgtcatttatgtataccatctgacttcaggtaaggaatatccggtaaccgaaaaatggtacaattcttcttcacctgttttcagcacagatggaaaatacctcatattcagttccgaaagagattttaatcccatttacagccagacagagtggaaccatgcctataatcgtatgggaggagtctatatggccatgctcgccaatgatacgccatcacctttattaccttcggatgaaatggtcagcatagaacaacaggcaactgatgctgtcaataaaaaaacggaagccacaaataatgcagttaaaattgatccggaaggcttgcccggaagactgattaaactgcctttacaagcaggtaactacgataatttctattcagacggtaaaaaagtgtggtatgccagtggtagaagtaccaaagtatatgatttggccgaacaaaaagaagaaaccgtggccgaaggagcatatatggatgtagctgccaatcataggaaagcattgttctttaaaggaaataatctgtatatctgtgattttccatgcactaaagcctcattggaagagaacgtcaacttggacaacatgattgctcccattgactatagtcaggaatgggctcagatattcgatgaaacatggcgggctttccgtgacggattctatctggaaaatatgcatggagcagattggaaaggaattaaagaaaaatatgctgtattagttccccatgcaaaaacccgtctggatttgaactatatcatcggtgagatgattgccgagctggcttgcggacacgcttatgtgaatccgggtgaaataaaaggtcccgaacgtattccaatgggattgctgggagctgaactgagtcgtgacaagagtggtttctaccgtattgacaaaattctaccgggtgcaatttacagtcagaaactgcgttctccccttacagaaccgggtatcggagtaaaagaaggagattatatcacagctattgatgacatttcaacagctactgttgataacatttacagtctgctggcaggcaaagccaatgtcttgactgaactaagcataaaccgtaccgcatcaagtaaaggagcacgtaaagtagtcattaaaccattagacaatgaatacccattgtatcattataactgggtacagaataatatcaaaaaagtggaagaagcaactaatggccgtgtaggctatgtctacattcccgatatgggaccggacggcctgaatgaattcgcccgctacttctatccccaactcgataaagaagccttgattattgatgaccgtgccaatggaggtggtaatgtatctccaatgattatcgaacgtttgcttcgtgaaccctatcgcctgaccatgcgtcgtggatcaactaaaatcggtaccattcctgatgcaacactagtggggccgaaagtattgctgatcaataaatactcggcttcagacggtgacttgttcccatggagtttcaaggcaaataagatcggtaaagttatcggtactcgtacatggggtggcattgtcggtatcagtggtccgttaccttatatggatggtacggatgtgcgtgttccgttctttaccaattatgatgcaaagaccggtcaatggatagtagaaaatcatggagtggaccctgatattctgattgataatgatccggtaaaagaacagtcaggtgaagaccagcagttgaataaagctattgaagtaattctacaagagctgaaggatcgcaaaccgttaccttctgtcccggctccgagaacttataaagatttgggagtggaataaaaagcccgtaaattaaacatataaatgatgcagccgaaagaactataatctttcggctgcatcattataaatcttctaatcttaccgcctatatatcgtacaattgctatttgtacaaataaatataataatttttggaggtatatatattatatattcctccaaaaagtgtcatcaaaaagaaatctatatacataacaagaagttttttatttctgttctttccatatatctccccgactttcattatctttgcaatcacttaataacaaagatattaaataacaaaaaatagatcatggaatacaatttcagagagattgaaaagaaatggcagcaaagatgggcagagaaccatacctatcaagtgactgaaaacgaaagcaaaaagaaattctacgtattgaatatgttcccttatccgtcgggagccggattgcacgtaggacatccgttgggatacatagccagtgatatttacgcccgttacaaacgcttgcaaggtttcaacgtgctgaacccgatgggatatgacgcatatggacttcctgcagaacaatacgctatacaaaccggacaacaccctgccatcaccactgtgaacaatatcaaccgctatcgtgaacagttggacaaaatcggcttctcttttgattggaaccgtgaagtacgtacttgtgaaccaggatattaccattggactcagtgggctttccaacaaatgttcaacagctattattgtaacgatacacagcaagcacgccccatcagcgaactaacggaagcatttgcccgatacggcaacgaaggactgaatgcggcttgcagcgaagaactcagctttacagccgaagaatggaatgccaaaagcgaaaaagaacaacaggaaatcctgatgaactaccgcattgcctatttgggagaaaccatggtgaactggtgcccgcaactaggaactgttcttgccaatgacgaagtggtggatggcgtttcggaacgcggcggtttccccgtcgttcagaaaaaaatgcgccaatggtgtttacgcgtatcggcttacgcacaacggctgctggacggactggacactgtggactggactgattcactgaaagaaacacagcgtaactggattggacgctcggaaggtacggaagtacaattcaaagtgaaagacagtgatattgaattcactatctttactacccgtgcagataccatgttcggtgtaaccttcatggtactggctcccgaaagcgaactggttccccaacttactactgaagcacagaaagccgaagtggaagcctatctggaccgcaccaagaaacgtacggaacgtgaacgtatcgccgaccgccgcgtaaccggtgtattcagtggctcatacgccatcaatccgtttaccggcgaggctgttcccgtatggatcagtgattacgtattggcaggttatggaacaggcgccatcatggcggttcctgctcacgacagccgtgactacgcttttgcaaaacatttcaatctgcctatcgttccgttggtagaaggttgtgatgtaagtgaagaaagtttcgatgccaaagaaggtattgtttgcaactcaccccgcaaggatatcactccttattgtgacctttctttaaacggactgaccatcaaagaagctatcgcagctaccaaagaatatgtgaaagcccacaatttgggacgcgtgaaagtgaattatcgtcttcgtgacgccatcttctcacgccagcgctattggggtgaaccgttccctgtatattacaaaaacggtatgccttatatgattgactcatctaaattgccgcttgaacttcccgaagtagctaagttcctgccaaccgaaacaggcgaacctccattgggacatgccaccaagtgggcctgggatgtagaaaaaggtgaagtcgtggaaaacaacttgattgacaacgtcactatattcccgcttgaactgaataccatgccgggcttcgcaggttcatccgcatactatctgcgctatatggacccacacaacgcacaagcactagtatcagaaaaggcagatcattactggcaaaatgtagatctctatgtaggcggtaccgaacatgctacgggtcacttgatttattctcgtttctggaacaagttcctgcatgatctgggcgtaagtatcaaggaagaaccattccaaaaattagtaaaccaaggaatgattcagggacgaagcaattttgtatatcgcatcaaagacaccaacacctttgtgtcattgaacctgaaagaccagtacgaaaccactccactgcatgtggatgtgaatattgtatccaacgatattctggatgtagaagctttcaaagcatggcgtcctgagtataacgatgctgagtttatcctggaagatggaaaatatatctgcggatgggcggtagagaagatgagtaaatccatgtacaacgtagtcaatccggatatgattgtcgagaaatacggtgccgacacgctgcgtatgtacgaaatgttcctcggtccggtagaacagtccaaaccttgggataccaatggtattgacggtgttcaccgtttcttgaagaaactgtggaatctgttctatagccgcacagacgaattcttgcctgtagagggtgaaccgactaaagaagagttgaaagcaattcataagctgattaaaaaagtaaccggagatattgaaactttctcttacaacacttctatcagtgcattcatgatttgtgtaaacgaacttacttcattgaaatgtcgcaataaagaggtattgagcaatctcatcatcctgttagctccgttcgctccacattatgcagaagaactttgggaagctttgggaaataccaccagcgtatgcgatgcacaatggcctgcattcaatgaagattacctgaaagaagacactgtaaaatacactatctctttcaatggcaaagcacgtttcaccatggatttcgccgctgatgctgataacaataccattcagacaacagttatggcagatgaacaagcccagaaatggattgaaggcaaaaccccgaaaaaggtaatcatcgttcccaaaaaaattgtaaacatcgtattataatcgatactatccttgaggtgtgtcaaaagcagtaacttttgacacacctttctacttacattaaaaacaatcctcattaccatggaccaaatattaaaaatcaaactaggcagagaggtaaaagactatttatccattaccttcggactgatttgctatgcactgggatgggcggctttcttactgccttatcaaataactacaggcggagtaaccggtatttcagccattatatattatgttacaggcattgaaatccaggtttcttattttattatcaacgctgtttttttaggtttcgcattaaagatactaggacctaaattcagccttaaaaccatttatgccatctttatgctgacattcctattatggctctttcaagcattattgaaaaacccggatggtacactgccgcaattgttaggaccgggacaagaattcatggcttgtgtagtaggtgccggcttgctgggatttggtatcggcattgttttctgcaataatggaagtaccggcggaacggatatcattgcctggattatcaataaatataaagatgtaacccttggccgcatgatgatgtattgtgatattgtcatcatatcctcctgttatttcatattccatgactggaaacgggtgttgtttggtttctgcgtattgtttattatgagcattgtgattgattatgttataaacagttcacgccaatccgtacagttccttattttctcgcgtaaacatgatgaaatagccgaaggaatcaccaaacaaatagatcgtggagttaccttattggatggtacaggatggtatagcaaacaaggaatcaaggtcgtagtggtactggcaaagaaaagccagtcactggatatattccgattggtgaaagatattgatcccaatgcatttatatcacaaagtaatgtggtaggagtgtatggcgaaggattcgacaaactaaaaataaagtaactaaaaaataatctcttccattgcttcactgtttctgcattgaaaaacagaacgatgaagcaatgataagattactacatatcggttaatctattttctcaaatttctattttatacaatatatgtctgcataaccaatgcccttgttccaccaaaggatgatcgaactctttttcaaaatgcattcccattttctgcataacccgttcagagcgtttattgggtatggcagtgaacgaatataccgttttaaaaggtaaattatcactcgcataatccagacaggcagaagcggcttctgtggcatatccctttccccatgcatcccggcacaaccgccagcctatttccactccgggagtaaaatccgactcgaaagcaatattatgaaaacccacatagcctagaaaattctgagtttctttacattctacagcatacaaaccataaccatattcttcaaattctttccggatacgacaataaaaagccatcgtctcttcctctgtcaaagtagtgagaaagaattccattacttctttatcactgttcatacggacaaacggaagaatatcttcttcctcccagtcccgtaacaacaaatgaggagtttctatatataccatactatcaagtatcaaatgataccaacaaaaataatcaaaaattgaaaatacacatagcaaacaaattactatttaccttttcacctatattattctgtcaggaattatcttactttggttcattctcagtatctttgcattcaattaatatgatataaaatgaaaaagaaattagtatttgctacaaacaatgctcataaactggatgaaatatcctccattctaggagaaaaagttgaattattgagtttgaaagatatccattgccatgttgatatccccgaaactgctgatacgttggaaggcaatgcgatgctgaaagcggagtatatttataaaaactacggtttagactgttttgccgacgatacaggcctggaagtggaagctttgaatggtgctccgggtgtttattccgcccgttatgccggaggcgaaggacacaatgcggaagccaatatgcaaaaattattgcagaatatgcagggagtgcaaaatagaaaagcacaattccgcacagctatctgcctgattctggatggaaagaagcatttgttcgaaggaattgtaaaaggtgagattatcaaagaaaaacgaggttcgtcaggtttcggatacgaccctatctttgtgcccgaaggatatactaaaacttttgccgaactaggcaatgagacgaaaaacaaaatcagtcaccgtgcgctggtcgtagagaaactttgccggtttctgaaggcgtaactatataaattagttatatcatttgtttacctctattgagcctcataaaaacaagtattctgttttcctttgaaaacaattttgacggaataatgatttccatgagaaccattattccgtcaaaacaaatctttaatgaaacagaaatgtcactcctattccgatgataaatcctttccagaagaattcccctttacttttaagaataacagaaacgtcttttattaaccacatcttgttatcttttacaaaagtcataatcccagcttctccgaaatttccagcatcttcttgataggtttcactgcctcctcagctaccgcttcatccactgtcacttccggccattcatactttaacgtattgtacagcttctccagcgtattcagacgcatgaaattacattcattgcaagcgcaggtactgtcttcgggaggagcgggaataaagttcttctcaggacatttcttacgcatctcgtgcaaaataccgctttccgtagccacaataaagtcttttttgtcactggcaatggcatatttcaacaatcctgccgtagaagcaaccttgtcggccagtttggaaacggctcctttacattcgggatgaaccagaacagcagcgtcaggatactgttttttcaactccagtattttctccacagagaactgttcgtgcacatggcaggcaccatcccaaagcaacatattgcgtcctgtaatcgaattgatataattacccaaatttctatccggaccgaaaataatcttttcatctgccggaaaactttctacgatctgcttggcattggtagaagtgaccaccacatcggtcaccgctttaacagccgctgtagtgttaacatacgaaatcactgtataatccggatgctcttgaacaaatttagcaaactcatcagcaggacaactgtcggccaatgaacagcctgcattcaaatccggtaccagcacttttttatcaggacaaagaatcttagctgtttcacccataaagtgaacaccacacatcacaatgatatccgcatccgtttttgccgcccattgtgccagtgccaagctgtcacctacaaagtcggcaatatcttgtatttcgcccgactggtaatagtgacctaggataagcgcattcttttccttacgcaacttatcaatttcagttttcaaatccagagttttgtctaccagttcggtaacatacccttttttcaaccattcctctttattcattatatctatattttttctccttctttcaaaaaaagaaatatgggtattgataatatgcaaagttaaaaactttatggttatgaccacccaaaatagtgatttttatttccccgacttcaatgtacctgcattgctatcttcgttattcacacgtttctgcatggtttcatacttacgtccaaaactgatattccatgatacttttgccacaaacaggcggcagctctctttcacataccaccaattcttagaaggagccactttactgaacatttctcctcccattctgtaattatcaacaaatggattcaaagtcatcatcccgatattcaaacgcttgtatcgataggacaatcccaaggtatgaaaactctctccgtatgacaatgtttccccatagaaattattccgatgattttccatttgaaagaatccggaccatcttttataagatgccatcacttcggccctgtaataccaattggtatatgtatgatgataatccaaaccacgactatcataataatttataccggtagaaaaagaaaaagtcaaaatatctttcagaggaccgagtttcaattccaactcaggattcaatttctgccaacttaactgattggcattggtacggacaaaactgttattcttatctcgtatggtttcttccatgataggcctgtgttgatactgatacgacaaatgaacattaccactaaacaaacctttccggaaatctgcctccaactcatttttatatactgtgaatatctttaattccggatttccgcttctcacctgtaaagagtcaatcaattgtctcacatttcccatatcggacaaaccgggagatttacgtgaaatctgtccccggtaacggataaagacattatctgaaaattggtaccccaacctcaaacggggcaataacgaatacctgttatatccttcctctttctgtttgaatcgggaataactgccttgcagtccaaaagaataattgaaacgatccattttcccactgtattccacataagctgtcgcatgggtttcatgcatctttgtttcagatgactcgtttccaccataggtattatccgccagactttgctgatatttcactcctgcactcaatctgctcttcttggttactttcctttcataaataccctctcctataaatgagtatttatttcccgatacggtagaataaatatcagtcagcggttcattactcttcccctccgtataactcctgtcactttgagtgtcaatatatgtagtcacagcattgataatcaatgactggtcattgttcagtttacattgaaaatacaagtccaccgatggacgggaagtccggcccgtactatgttctttcatcatcaaaatttcttcaggcttctccaaaatatacagactgctttggttattctgcttgttcttattaaaagcccaccgtacagtggaattaaagaaccatttcccctgatcctgaaaactataattcaatcctatattatgcccataagtggaaattctactcggaataccatcttccacccgtgtaaaggaagaaccatcctcatagcggaaagtttcccaattattacgccaataattatctaccgaacgataaacattattataattcaaaccgaattctgattttttatggtttatcttcactataaaattattgtttccaaaaagtacgtgcggagaatcctgcgcatccaaagccacatatccaccggtttcatgccgtcttacaatgtaatcaatcacagcagccgtatgatccccatatcgcaaaccgggagcatcatgatattctatacgaatcacatcttcaggacgaagaaccaatatatcctgtatctcggcatttactccattcatccgtaactgtacatccccttcaccggaggatgttaccttgttacgcatttgatccacttgtattctgctcagcttcatctgctgcaataaagacagaccattgccggccgattttaactgatgtgctgtaggaaggataattttcctgtcggcggcatttatcacactggctcccgttaccaccacttcctttaacaggatcgattccggagatatcatgataacgcctaaatccttagaaacagctaaatgatccaatgatataatccgggaggtatatcccataccggaaatacaaagcagataacttcctgtttggatattctccatcatgaaccttcctttactgtcggttactcctccggctataaatatagaatcctttgtctgcaatacgacattcgcaaattccaccgcttcattttctgaaactacttttcctttaacctgtacattttgagcaaaaagtatgcagcacatacacaaaagtgatgtggcaaccaatattctttttatcatattctttatcttagtgcattagttaataaaaagaccgcgatcttctaccttttatttctgttacttagacgcaggaaattactacaggttacatttcaagaaacacaatgaacagttaccaacaatttctttgtatctattatatctatattttttctccttcttttaaaaaaaagaaatatggtattaataataggctgtttatattgttagtaaaaaagagttctttctcttgtctgataagttatttatatataataccaagatatgaataaataatcaaccggcttaaatactgataatacaggttttacttattctattaacatattgttgataagaatatgagttaaaaactttatggttatgaacgcctgaaatagtgattaaattgtgttgatattgattgtttaagttatgtgattaatttttggattgttgattttaagtgtatgttataccattatttgaaatatgcaagaaatacttttgaaatgatatcctcattctttttacatgttttcaaccgttatcaacagggggatgtgaattagttattatcttttcttgtataaagaaatccatctgttttacaattgagtttaggactgaagtaaaaataaaaagagagtaggagagacttctttttcattatataggcgtaaagatcatagatttttatgtaagtttgtaaccgttaataataaagtagaaaatagagtatgaggaaactcaaaataacagaactgaaccggcttactgtagacgaattcaagaaagccgataagttgcctttagcagtggtgctggatgaagtacgcagtttacacaacataggggcagtgtttcgcacatcggatgcatttttggtagattgcatttatttatgtggtattacagccactcctccccatcccgaaatgcataaaacagctttaggagctgagaattcggtggagtggagatataaaaagaatacgcttgatgccgttcaggaacttcatgatcaagggtttaccgtattggctatcgaacaggtggaaggcagtactttgctggacaaactggaattggatgccgataaaaaatatgccatcgtaatgggaaatgaagtgaaaggggtacagcaggaagtggtcaatgcttgcgacggttgtgttgagattccccaatacggcacaaaacattcgttgaatgtatcggttaccacaggaattattttatgggagtttgccaataaattaatgaaattcagataataagagtaaaattcaaacagtaggaatcagttagatttgtccgttttcaactaacaataccacccgttcggtcagtcgatcctctccctccggatgatattctttcttcaggctggcaccaaaaagtgctgcaaaagtttgatagaatccggctttaaagggtcccataaaagcttttaccaattcataagaggaagaatccgtctgacggtttactaactttatcaacagtttaccctgtgaaaaggttaatttcttcataatcggtgtatattgctcttttagtcccttctctacgagtttcaggtgcttttccctggcttttttgtcaggcagtgtttctatatattcgtaagtttctatcacagcacggttaatttcacgggctaatggcagggttttcttcacattccttaccaggcggtagtattcccgtctttctttttcgtttttgaattttaatggtctgaaaatgtatacattaggtaactgtacagctggaatagtatctcctttgtatacacatacaggtaccatgtatccgtttatagtagtcgtttgttgctgggaataagcagcagcggctataaaggaaaaaaacaatgctataaagagtttccttttcatcttggtgcaaaagtagcaagaaatatgattactctgtatagtggataaaactatttaacttaaaacacgccaatgaattacaaaatgaacaggttgttaagagtaatgttaattatctgtattacaatacttttatcggtgcataacctgtgtgcgcaggaagtatgggaagaactggcagagcaattgatggatgaagatgaaaacagttcgtttcaatgggatactcactttgaggagctttccgaattacgtgaaaatcccatcaatatcaatacagcaactaaagagcaactggaacgttttccatttctctctgaccaactggtagagaatatattgtattatctgtacaaatatggtcctatgcttacccgcaatgagttatggatgattgaagatattgacaggcagactattcactatttactaccctttatttgctttgaaactcctgaaaaagagcaatataaaccaaatataaagcgaatattgaaatacggtaaacaagagttatcaacacgtgtcgatattcctttttatacgaaggtcgggtatcaacagtacccggcagaaactttaaaaaagaatccgaacaaacagtatttgggatatggatattatcataatctgcgatatagttttcattatcgggatcagatttatgcaggaattactgctgaaaaggatgcaggagaacctttctttaccggacaaaataaaaaaggttatgatttttattcactatacttgttaattcgtaatatgggtcatatcaagactttagctcttggtaattaccgtgtcagctatggttatggactagttatcaacactgatttcgggatgggaaaaacagctacactctctactttgggaaataagagccggggcatacgcaagcattcttctaccgatgaatataactattttcaaggaatggcagtcagctataagttggcgaaaagatggacattggatggtttctattcttatcggaagatggatggtattgttgataaccagtttataaggtcgttgaaaaaagatggatatcatcggttgtatcgtgagtttgagaagaaaaatacattaactaatcagttggttggcagtaatttaaattataatggaaagtactgtgagttaggattaacagctgtttataatgttttcaacaagctgttgaatcctgagaagaagtactataatatttattatccccgtggaaaggacttttataatgtgggaggagattataaattcttttggaaacgcttctctttattgggtgaaacggctatagacaaatgtggtactttggcaaccatgaatatgttacgttattcaccgaaaggaggaacacagttaatagttatgaacaggtattatgatgccaaatatcaatcggtttatgctcgttctataggagagggaagtacggtacaaaatgagagtggattttatataggattggaaaccagtattttaaagtatatcaaaatgacttgttatggtgattttttctatttcccttggaagaaatatttagtaagcaaagcaggaaccaaaggattggatggattactccaattaagttattcacctacttatgaactggaaatgtttataagatatcgttataaaaagaaggaaaaggacttcactgctgaggataaaaccaagcaaactattccatctattcagcagaaatgccgataccaattgaattatagcgtgaaagataaactgacattgaaaaccatagcggattatgtacgcatcaactttcgtgggcaatctgcttccaatggttttctggtttctcaaagtgctgcttatacatttcatttgcttcctcttcagcttgatttgagtgccgcatggtttaatacggatgactataattcccgtcttactatctatgaaaagagtgtgctctatgctttttccatgccttcattctattataaaggtatgcgtgtggcagtgaacgcccgttatgaattgaataaacacattatcttgcaggccaagtacggaactacccattatttcaatcgggataagataagttccgctttggaggaaattgacggcagtacaaagagtgacctttatttgcagttgagactgaaattttgaaaaacattctgtatttttgtactgttatcaactgaaaaaagaactatgtcaacagtcatttatccttctcccatcttcggtccggtacatagtcgtcgtttgggagtgtctttaggaatcaatcttcttcctgaagatggtaaattttgtaccttcgattgcatttattgcgaatgtggttttaatgaagatcatcgtccccaaaagaaactgcctactcgcgagcaggttcgtgaggctttggaagcccgtttgattgatatgcagcaaaatggtcctaaaccggatgtgctgacttttgccggtaatggcgaaccgacggctcatcctcactttgcaggaattatagaggatactttggcattgcgtgatatatattttcctcaggcaaaagtgagtgtattgagtaattctacttttattcacaaaccggaggtatttgatgcattgaataagatagataataatatattgaagctggatactattgatacggattatattcgattgacagaccgcccgaccgggcactatgatgtgcggaaaattataaaagggatgaaagctttcaaaggtaatctgattattcagaccatgttcatgaaaggtaaatatcaagggcaggatgtggataatacttcagatcggtatgtgctgccctggctggaaacggtgaaagagattgctccccgtcaggtgatgatttacaccatcgaccgtgaaacgcccgatcatgatttggaaaaggctactcatgaggaattggacagaataggaaaattgataaaggattccggcattccggtatcggtctcgtattgagaaaaaagtaagttgacttcaaagggcaagtaagttgacttactttgccgatgaagtgaacttactttgctcatgaacatatcttactttttcaggtcactattaaaacatataatttattcctggatatttttcaaagactggagatacgttgtttcacatacttgcaattaaatggatttgaataataatggaatatacttctatccctgattataatgatggaagctttaatctttatcagaacgaactgatgaactttttcatctttctgaccaaggtacatccagcttttattcttgacaagtcattgaaagcccaatgccgtcagtttgtcctgtccgcttgcgatgaactttgtgatatgaataaataacatcactttagctgatttccatctgagaattaatgaattgttagttcttttgcaggatgcccatacttttgtgaatatagaaccgttgtcgctatatccattttctgtccgctattttaacgggaatttttatttatactccattttttggaacacatgattcaggatatgaatcaaaggggagtttctttgctggttgttgatatgcggtataatgggggaggtaacagccttttaggaaatatgctgttggaggcattgaatattcatttatctattttcataagctatggaaatacaacaaacacgaagaaagcacttggctatatggcaggaagggcttagggatgcggataaggtcttttaatgataaatctgatttcaagattttaaaacaccagtgaggagtatgggggcattttacacttatttactgaaaaaaggatattggctttctattcctgtccctcattagcagaatagaatcaaaaaggagagcatttattttagtccataatgctctcctttcttattttatttttctataatagcctttgctttctccaaagccacattgatattaggacagatattttcttttcccagcagttcattaaatcctgatttttcaagaatttgatgcactttttcattcactcccgaaagcacaatctgaatattttctttcttagacatttcgcatagattagtcaggttgtgaataccggtagaatcaatgaatggtactttacgcatacgtacgatccgtactttgggacggtcgcccagttcggacatgatttcctcaaacttggtagcgataccaaagaagtagggaccgttgatttcatatacttccacacctttgggaaccatgagatgttcttcgtgcacttccagatcggattcattattggggtcgatttcatttttgataaccgatatttctgttgtttccatgacacgtttcatgaacaatacacaggcaatgagcaaacccacttcaatagctacggtcaaatcgaagataacagtcaagaagaaagtgatcaacaatacggtgacgtctgatttcggattcttcagcaacgctttgaaagtacgccagccgctcatgttataggaaacaatcaccaatacacctgccagacaggccatcgggatatattgtgccagaggcatcaggaacaagagaatcagcaacagaatgactgcatgaatgatacctgcaacaggtgattttccaccgttgttgatattggtcatggtacgtgcgatggctcctgtagcaggaataccgccaaacagcggagcgataatattggctgcgccctgggctatcagttccgtgtttgaatcgtggcggtcatcaatgacaccatcggctacggcagcagacaacagagattctatggctcccagtacagcaatggtgatggcaaccggaaataaattcttgatagcttcccaatttaattcgggcactactgcatccggcagctgtgactgaatggtaaaacggtcgccaatggtgtcgatacaagtgattccgccatatgttttcatcaggtacacggcaatggttactacaatgatggcaatcagtgaacctggaatcttttttgagaaccggggagtcagtgcgataatcaggacgctgactatgctgacaatggcgttccaccaattaacagtatcaaaatgacggaaatacatcatccatttacctatgaagtctcccggtactttttctccttcgaagttcagtccgaagatatcggcaatctgtgtcgtaaagatggtaacggcaataccactggtaaatcctacaataatgggataaggaatgaatttgataacagctcccagcttgaatacacctaataaaataaggagtactcctgccataagagttgctactgttaatccactgatgccgtattcttggatgattccatagataattacgataaatgctccggtaggtccgcctatctgtactttgcttcctcctaataaagagatgataaatcctgctacaatagcagtgatgatgcctttttctggagaaactcccgaagcgataccaaatgcgatagccagtggaagtgcaacaatacctacgataattccggccatgaggtcggtcatgaagctctcttttgaataattctgtagggtagtgaagagcttcggtttgaattcaaatgctttcatttgtcaactactttatgctatgattttaaacgagttgcaaaagtagataaaattaatgtataaattaaggtattattctatttaaattcgtatttttgttattcatagggtgttttgttgatagtaatggtgcgttgggcggtagaatcatttgtgatactggttacatctcctctcgtagtgaagtaaacgtaatttcctttatcgtaaaaacgatataccttgcaaccgtcatgttcaaacagatagctgacagtataagtggagttgttttcagactctccgatttttaacggtatggacgcacatgaattaaatcctattatagtaaggaggggaaaagtgaataatttgatgatgtttttcataatggaaaatgttaatgttgttgtgaacacaaatataggtgttcttgtttattttatataaagtgaacgtttaattaaatataaaaacgtaattgtaatgaatacaattttgaaataatatatatatctttgtgtcatcaacagatgatcaaataatactaactaataaaactaacaattatggctaaaagcgtaaaaggtacacagacagagaaaaacttgctgacttcatttgcaggtgaatcacaggctagaatgcgttatacttactttgcaagtacagcaaagaaggaaggttatgaacaaatagcagctatttttacagaaacagctgatcaggaaaaagaacatgcaaaacgtatgtttaaatggttggaaggcggtatggtagaaattactgccagctatcctgcaggtatcattggtaccactatggaaaatttgaaagctgccgctgccggtgaaaatgaagaatggactactgattaccctcactttgctgatgtggccgatcaggaaggttttcctgctatcgccactatgtatcgcagaatcgctgaagctgaaaaggggcatgaggaaagatatctggctttattgaagaatgtggaagaaggcacagtattcaagaaagcggaagaaactgtatggcagtgccgtaactgcggttacatttatgtaggtacggaagctcctgaagtatgtcctgcatgtctgcatccgcaagcttatttcgaagtgaagaagaataattattgattgaaataaaaccactcgttcatcatggatccggtttctctgaaaaggggaaaccggattttttatttttaggaaatgatttttgattggtttttattcttctcttttcccgtttacaaattcccccggtttcatgccgaactgtttttggaaacatttggagaaataagacggattattgaatcctaccatataacagatttcattgatgcgatatttgttttctgccagcaagatcgctgcttttttcaaacgtaccacttgaatcagttcattaggggtgatattggccaatgtctttattttggcaaacaggcccgaacggctgatacacaatttttcggtcaggaaatctacggataattccggattggagaaattctcttctatgatttcattcatacgggtaaggaacttgtcgtccatagaattattggcaatgctgttcagcggaaccaacggcatcttcgagaatttctgacgcagcagattacgcaagtctaccagattcttgatacatgcttccaagtattgcatggagaaaggtttctctatgtaggcatctgcaccacaatccataccttctatcttggagttggtatctgtcttggccgttagcaggatgaagggtatatgactggtagcctggttagtccttattgctttgcagaattccactccgtccatgcgtggcatcatccagtcgcttacaatgagtgtcacttcgttttctttcagtttattcagtgcttctataccgtcttctgcggtaagtatgctgtatttatcagccagactactcgaaaggaaattcaacatttcctcattatcatccacaatcagcatggttggtttatgtttgataggagaaccggagaggtcctcttgcaagattccttcgggaatggctgggttgttcaatagtgatgtgcccgtatcctgtggcaggacttgtgcttgttctataggcaacgttacgataaaagatgatcctttgttaacctcggattccacttcaatacagccattgtgtgattctacgatacttttgacaatgctgaggccgatacctgttcccggcttgttatccatagcctgatagaacggatggaatatcttcttttgttcttctttgctgatccctatgccgttatctgtcactcggattataaaagtatgttgttccggctgtacgatacaggtaagagtaacttcatcttttgtgtatttactggcattggtcaacagattgctgactagtttggttaccgcctcactgtctactatagccgtgaaatctgcttcaggatattttacagtaagccgtgctccatgttgggcgatgaaaggttcgaaacgttcacaaaccgctttgagcagttggtggatattttgggaagcaaacttcattttcattccttcctgttccactttccggaaatccagcaattggtttaccaggaacagcagacgctggctgttacggtcaataatattcagatcgtcgcgtactgtagacggcagggacacgggagatttcattattttctccaaaggtcctatgataagggataccggtgtgcgtatttcgtgggctatcatggtgaagaacttgattttggcttcgtgtacttctttttccttgttggcgttcagtttgtttatttcagccgtatgtttcttctctgtccgtttgatgatgaagtggatgacgaatccgaaagctatgcaaaccaatacaaaatagagcagtttggaagcggtggaccaatagaaaggagggtggatggtgattttcagactggttcctttttcattccatattccgtcattattggtcgcttttactttgaaaagataggttcctgcgggcaaattggtgtaagtggccttattttgggagcctacatagttccagtctttgtcaaatccttccagtttataggcgtatttgtttttattgggaatgcaatagcttaaagaggcataaagcaagctgaatgcattttctttataggatagctccagttcttccaactggttgagagattttggaagcagtttgtttccagtttggatttccttattatctatttccagttctgtaatgattactggaggaagcatcacatttgtcttaatctgatgagggtagaaagcattgaatccgtttactgagccgatatagatttttccatccgatgcttttaaggcagcattaggtaggaattgttcactttgcagtccgtcgcttttagtaaatactcggcaaccttctccaggggtgtagcgcactagccctttggtggtggtgagccacaatgtgcgttggtcttcgatgatgctgcatatattgtgactgggaatttcaagaggtaaagtttcgaatgcatcttcttccgcattgtatttgcagagcccgttcatggttcccacccacatctctccgtttgtgtcaatcagtacgcagttcacttggttgtttgccagtgagttcggatttttatggtcatgtatatagttcttccatatctgtttttctggatggtatttaaataatcccttgccttgggtggagaaccagagatttcctttggtatcctggtcaatgtcaatggtcagtgcgtccaagtctttaattcgggtgaaattatctttttcccggttatatagatttactccggacatggaggtgatccatattctctcttttctgtctttgaatatggcataagaactggttccgtccagtgaggcgggattatcctgataggcagaatatgttttaaaagttcccgtttgcagatttaatacgtttacccctccagtataagtaccgatccataaattatcatcgtccatacaaagtgcatgtacattgtgataggacagactgttttttccctctaagggcaaataatgggaaaattttctatttttgggagaaaagcggtttaaccctccgtcatccgaagcgatccacacatctccgttagagtcttcgcagaaccgtccgatgactattccgttaacagaattggagaaacgtgagtggacaaaactttcgaattgtccagtattgggtgaaatataatttactcctccatagtaagttccgatccatattccaccttcatgatcttttataataggataaacaaaacggttggacaatgaatgtgggtttgtttcatcttctgtaaacaattgatattcctctgtaatggtattgaataacagaagcccgtcatccgagcctatgagtagctggtgaggggcatattccatgatagaatgaatatgggtggcaccttttccgtctgtgggatgcagataagtagtggcctttccgctgtatttatcgattttttgcaaaccacactcccaggttcctaaccacagtgtatgttccgagtcttccaacatgaccaatgcgtttgagtcatgctttccgctttcataggagagcggaaaagtctcgaatttattttctgctttattcagtttgaaaagacctgagtttccccaattggtaatggcccatatttggttttcactatccaccagtacacttgccattaaaccatttgcgtttttaaattcgtattgctccaagtggttggtgatagtgttgtatttgaatattccttgtcctaccgtagtgaaccataggtttttgtctttatcttcgacaatatggttcgtatttgtttcaatatggatatttttggaggtggccagtacaaaaggcattatatcttctgtttcgtaatcatagatatatatgccttcgtctgtacctatccatattttgttgagggtgctgtataaagatgaaatagcttcattagctcccctatctttcagtctatagagttttacagtagtgccgtcatagcggttcagtccttcatccgttcctatccatagaaaaccgtatttatcttgcattaaagcacgtaccgaattggatgatagtccgtcttctacagaaaaatgacggaaacagaggtcattggacgctgcaaacagaatcatcggcatcagtaagttcaatagcaataggactagtcttttcatagtattttcttcttattttctaaatcttatgcaagattactatttttctgagaaagaaaagagaaaatttgaagaaaaagtgaggattccagatgaatctttcaatagaccttttcagacattctctaaaagctagcttatcataatcctgctgcagattttaagcggctgatagctgtttctatcatatcatgtgtgccactgccgtctgctacgtattttatgaccatttcagtgaatgcaacagcgtcttttaatgtcggatctgtagaatcgtctatggtgcctacgcgccttaatagagcagataaaggtcttaaatcttccatttcgggtaagttacccggtctcattgtattgatgacggtattcaaactagctactatggcattgacttctccttgggagtagtttttatccttattaaaatatacattttgggcatgttccaatgtacgtttcaaacgggtaaacccgaaatgagcccaaggagcaaattcaggaaccttgactgcgagagcattccatttttcttggtttgtttggcgttccatagctatattaagtaactcctttaattctgttttatctacattatttgccagtaccaaagaagcggtggcatcttgtagtgataaagtttgtttatcaataacgatttgtaaatcaatgttatccattacttcatgggcgctttcaagagtagcttgcaatgttttaaaactatcagtagtataaaggtccggattacattttttagctatatggatactggcttcaagattgctcttatctaatcgggaggcgactaatgattctatggccttgtcaatattgtctacacaagtagaaatggtagtttctgtcagaggagatattttcattagtttctctccctcttgtatagcggttgttagtttggcgaaacttgcttttgtgtaatggcttttactaaatgccgtagtttctcgtaattttgccgacagagccattttcagttctacagtaggatctttaatatgattgatgcggaagtaatgagttgtatggtcatggcgataataatctggttggaaagttcgtccaccttgcattagtgtatataaatttcctgtagtaccggtttgcagaccgttaggttcaacaacggtaatactggcaagacgtgagtctatattgagtgttgcttccgtccaattagtgatatcggtagctgtcatggcaaacggtccatacattaatgtacctacccaagccgtttcaagttggtgtccgtctttacttgctatttcggttggtagcttgtcgggaccatagtctatatgtttagtgaatggcattgtaatttctactatatcattttctttccattgccgggtaggtattaccgcgtatgaacaaggttgataatgagtggcaatagagattccatttagttttacatcaaagccgtcggtggcccaataaggtactcgaagtttcatggcaaatcgggcttctccggcagtaactttaattgtggagctttttgctggccacaaacattcctgttgtaaagtgatatttttctcttcccaatggagtgtggtaggcatataaagggctacccacaatgtattgtctgaaacaaagtaggttgcttcctgatattttacatgattttcagatcccgtacctccgcagcaggtagattgcggagtttcgttgccccatggtttcgatgcatttagtcctacggcatattgataagtagtctgatagtgttcagggtgtaatgagccgattatttggttgtaaagtgtccgttcgtaataatccatgtaacgggcatcgtccggattaaaacagttgaggtcttttgttaattttagcaagttatatgcacaacaagtttcattgatatgtggatttgagtgactctctccttcagatacgccattcatggccatacttactatttgggtatagggctgtctgaacatttcgccattacccacaccgccggtagaataacgataacgtccttgtattaaattccagaaattatgggatacatgataataaaatgtatcattgttacttaaataacttctcagtgcaccgatgatcatagggatatgctgattggcgtgtctgttacgtatatcatcaatattctttgaaagcggttcgtaaaaggccggactatcaaaacaattggatgcttctatcagacgcgccttctcttcaggggcgctgaccatttctgaaagacgtgctaaagattctcccatacctcccacttcacctgcaatgtacatgttccacatttcataacgattgccgggatgtgtcctgtgttcttcttgtgttccgtctttttttacataagtgcggtagtgcattctattccatacccacagacccatatctttggctatgagcaatgctttgtcggcaatgcttttatcatccatataagttgcaatatctatcagacccgctaactgtttgtgaatggagtaatagggagcccatacccagtccgaattgttatatgcacgatacatctctatcagtgcgggatggtgcggggggatcgcatttagataaccatagccataagtagcccattttgttttatgttcatcaaaagcttcccatgtacctttcatctttttcaattcttcttcaggggcaaaatcacgggcttcgagataccttcctaattcttcgctccatacgaatgtacgctcctgacattcgcgcagttcattcaccattcgggtgatgttacggcgtaaaatttctttatgcgaaggatttgttgcagcggcataggcaagggccagtgcggacatatagtgtccggaaccatgtccttttaatttagtttcaggtgagtcccatccgtcagaccgggtatatccttcggtactcaggccataagtgtcgcgataattatatagctgttggcttacatcccaactgataatctctttaatggcaagatcacgattggaggtcaggcgattgttgccgttaatctttacattgtttaaggggatagtatgggctattagcttgggggaaattgtatttttagtgtctaccacctctattttagcagtgataggatatccgttttctgtagtatcgtctcctataatgaatccgtttattgtgtattggcttccaatgggataaactttatcgtcagcctctgattgttctgtggataaagcggaattggaccatttagtttgacggtattcaccttgtccgtctgaataagtcacccatacttgataaggtaattgaggaacagttcccacaggacaatagatcacgatgggttgtacagaagttatgcttcgtacttcgataacatttgtctgtaagatggatgttgctgttttattaggatttagtgtatacgcctcaatgggtattgttgtcaatagggataatcctgtaaagagagtaaaagataaatatctgttcatttccatgagcatattttaagtaatgattttataagagatgggaatataaagcccggttctaataacttaaaccgggctggaaaataaatatttgtttaaataattagcaactattgagaagaaagaaggttgctttctatcacattatttcttatttaccggcatagcctggattttgctgtaaattagggtttgtattaagatgatctaaatgaatcgggaacaggatagagttgccattcaagtcattggcagtcggagtatgattaaaccaacttttcttctgataggttccgaagcgaatcatatccgtacgtcgacgggcctcggctgcaaattcccatccccattcatcataaagtccgcctaattctacgacttctgtattacccgcatcatcaatctgacctttttcgtcaagcgtaccatagttaatatgtgtatcgccttttaaccaagctgcatcaaccgttgctttttccggatgagccgattcacggaatgcacgctcacggatctgtgatacgatatgggctgcttcggtttcgttttgtcctaagcggagcagacattctgctttcatcagcaatacttcagtataacggaaataagggaagtcgttgcttagaaggcttttagctcctaccttaatttcgtattttcctacccgataaccgtcatctgtgtctgttttgtaaatactgggtagcttattggggaaagtggtgatcagtactccgtccgggctgtactggtcaccttgcagccatgtatattttaaccgcatatcatcaggatcatagctgttaatgaactgagggtttgctgctgaacctccccatggggtggtttgcatattgaagaccttacgactgtttgaagatagaaatttcatgtgggctccaaaaacaggaccattgttgtccccttcattataaacttcatcataaggaatggcaaagatcgtttccacacatccggagttttctgttttgaagatatctgtgtagtttgtttctaaactaaacaaaccgctgttaatgatatcgttacattgttccagacattcgttccacattggagttcctgtatagaccccagcattcagatacatacgtgccatcaagcatttggccccccattgagtgagtctgccataagtggatttattgacttcagtaggcaaattgggcattacttctttcagttcattgataatgaagtcaaaaacttgtttacgagtagattgaaccggaacctcttcactgaaactggtttgtataggaatatttccatgtgtatcgcaaagaatggagtaccaaagtgcacgtactccttttacctcagctacgactttaggtttactttcttctgtaaaaaaaccttcatcggcacgttttaatattttattggcattggcgatgcctttatagcaatagtcccaaatactttggggctgtccttgctggttgtcccaagtgtgtttgtgcatttgcttgtaagtacctccgtcatcccagccgttcgggcgggtaggtgtgacaattacatcgcccgattcttcctgtaggtcaaacaagccataccagtccatcacaaagcgtaattgtgaataggtggtagccaacaaggctatctcatcggcttcggttggtacatagtcttcttcaatgatttcagaataaggctcctcatccaaattaaagcaactgcttatactgagcatggcagatgcacagagtgcataaacaccatatttaaatagtttcataactgttcttttttgtttaattagatttagaatgtaagattaactccaaaagtataagtgcgattggtaggatacttgtcgcgattgtcagtaccggcatccaataatccataggtgttgctgctcaatggtacttccggatccatacccttgtaaccggtaatggtagctagattcaatactgaagcatagatacgtaggtttttgatgatatgctgtttggatagtttgaaggtataccccaaagtcacattgtcaattttccagtaatcaccgtcctctacgtaatagctgacatagcgttggtcatctttcaattgggttttgccatatactttgtcaaaagcagaattcaggcggttgtactggatttcaggttttgcattttcataatacatacgttggtaattcaaaatctggaagccgaaagcaccacgcatatttatacttaaatcgaaattaaagaaattgaaggtattgttccagttcagataatgtttaggaataccattacctaatacttgccagtcagtggcatcggtttcctcggctaaaacatgttcaccttttttgttttctaccaaccatagtccgtcatctgtaatatcaaccgatttcaaaccatagaaagtacctataggcttgcctacttggacgatatgggtagtggtttgaatgggttctccggtataccctgtatagaaataatcttggtccatcgagaatttctcgctggatagtgcaacgaccttgtttgaattagtagaataggacacattggtattccaagtgaatttttctgtctggataggcgtagcacgaattagaatttcaagtcctttattttccatttccgatgcattggctagcatggttggatacatataaggcggaacaggaacctcgtagtcccaaagagcatcttttgttctacgtatatagtagtcaacggttccacccaatcgtcctcctaggacatcccaatccagacctacattgaattcgtgtttcttttcccaacgcaggtcagcgttgttgttacggattgtttccaatgctttgacccatgttccattgtacaggaaagcgccattataattcaaacttgagagtgatgtgtacgggtcggctacattgattccggtcacaccgtatcccacgcgaagtttcaggttatccatccaattcacatttttcataaaattctctctgttaattctccatcctaaagagatgccggggaaattaccccacttatgatctttaccgaacttggaagagccttcatgacgcaaagaagccatcaataagtagcggtcattgaaattgtaactgacacgggtgaataatccgattaatttatcagaatttttataactggtcatggaagcttcaccacgtttcaaggccatacctgcttccattttgttgtaagaataagcatcggtaggaaaatcgtagttggacatggacaggttagagttggtgttgtcttcatagttataacctatcaatacactgacattgtgcttgccgaatgctttctgaaagttggccgtcaattctatcagattattatcaaaatcagaatcataacgatatgcatagccgttacggccactcttggttgtagatacatgtttcttggtttggtaatatccatcggtagaagtcgtactccggcgggcatacatggctttcaaggtcaaagattcaatagggcggaaagtcaggctaccattgaaacggatgtttttacgtttcatttcaccaattgtttcgcggatataacttacaggattatcataaaaatacaagtcgcgctcaaaccagtcaccgttctcatcttttacaggttctgtaggattgtgaatcaaagcctgtcgataagcgtatgtattccaactgcgaggcatggtatgttggctgacgaatgtactgacattggctgtcaatttattgtcatacatagagtgagtgatgtccatacgaccgtttatagcttcaaagtcagtctttataaaagtaccttgccggttggtatagttgatggaggctgtataattggtatttttactaccacctcttaaggataagttgtgtgaatgagaaacagctgtgcgggtcagttcacccagccaatcggtattggctccgaaatctttcaagttagctccgttgaaagtatatccttcattccatttctgacgaaggtcatcagcatccatgaaatcaggtctgtttaaaatgtttgatacagaaacatatccattataatcaatggtgggagccatttctttacgactttgtttggttgtaataataattacgccatttgtaccacgtgtaccataaatggcagtagccgaaccgtcttttaatacatcgatggactcaacatcttcaggggctactgtattcagacttcctggcactccgtcaactaatactaatggtgaagttccaccttttaaagatgaaataccacgtagcataatttgtgtgttgccggtaggatctcctgaaggtaaagaaatattcagccctgctaccttaccttgtatcagctggcctgcatcggttaccgcccccttcacaaaactttctgattttacacttgaaatagcactggtcacatcaccctttcgctgcgtaccataaccgatcacaaccacttcatccatcagttcggaatcgtcttgcatggtaatatctttcttaccaccatttccgactggaatttcctgagtctgataaccgatataagaaacaaccaatatggatttggcattttttaccttcagcgtatatttaccgtcaaaatcggtaatggtaccgttggtcgttcctttttccatgatattggcaccaatgataggctcccctttcctgtctttcaccacaccgcttacggttacagtttgctgttgtaccatttcggttctcatagattctgttgtttccggtgttgcccatacactactgactcctgcacccgcagtaaggaaaagacaggtggtagccttcagcaaagccctgctgaacaaggcccggttctcatgtgttttcatcatacagttttatttaaaaggtttatatgttcattcagttcactttccattcaatcacccctcccgaagctcctttct

SEQ ID NO: 3872 - DNA, 69112 bp, Unknown
  gut microbiota DNA sequence
gaatacctaaagatacaaaaaagccaactaattcgcaatactttgtgtatgaattagttggctgattttgtaatatttaatgaatgtccctacataaagagtcatatcgcgagacatctgtccgccatccaaatcacgctttactatcaagcctttgttcacagcatccgtccattcgggagtccaccatttttcataattcttggcattcagagtatccagcactgcaacagcctgtccgtccatatcaacaggcagcttaccagcattgacacgtcccgaacggatgaaacggtaaggaccggcaggagtatcactgactgctaccccggcacgggcggctgcataaccttttcctttcaattccagatggaaccacatcacaaacttccctgttttcgcattatatatcactttaggacgttccaatatacatccacgcgctatgtcgctgctgtcgttatcaacaacagaaagcgctacgccttcgttcttccagtcagtaagattccgagaagaatagcacattactcccaccatggcactgctggtagtatcacatttattctcaccgaaccaatagtatgttccatcatggtacattactccgcccccatgggcattgatatgctctccgttgttatcaggccatatctcacctgaacgaatgggttgcaacggttcattgctgcatccgcaaaaggtatatattccaagacataatcctattattattttttttatacccatatctatgtattttattttttctgataaacacgtacataatcaatctcataacgtatcggataggtatttatctctacctcgccaccattaattccacccaccgctaagttcaacaatatatattggggttgcataaatggattcttataactaccaatactaccattataggtatctttcagtaagatttcatttagcaactcatcgtccaaataaagacgaatagcctcttcgtcccaatccatccgccatatatgaaattcggaagcccaatccgaatttttctccaaaaaatggataaatggaatagccttactattccattttgcattccattgacgatctgttccccatgcagcattggctaaaatatgaggaattccatgcttacgataaaactccatgatatctatttctccacaggaaggccattccatactgcttcccaaagtccaaattgccggccatgctccttttcctacaggaatacgtgcgcgcacttcaaaacgtccatacaaaaattctttctttccaaatgttgttatagaagaagaggtgcactcaatatattcacgagaagtgcgccaatcataactacctgctttatataacggatttttccgtttttccgaacgtgcttctatcacaagcaacccaccctgacaccaagcgttgtcagattgataccattgtaactcctcattacgagcataaccctgttcataattccatattgattcatccaaacaaccgtctttattgaattcatcactccaaaccaattgatagtcttgtgcattacaatgcccccctataagaagtacaacacacaatttcagtaattgaaataattttatcatacatctactatcttaaacaatatctttataatcatcacaagtaaatattccaatggtgatagcggctgttatacagccagctatccattgtccttatttttcaaattcctcttctgtttttatttattaatccaaaggcgcagtttccggatcatctattgcaacttctgcatcatacatcataaattcaccaatattccaataggaggaacttccagtagcagatgttacactaaaacgaaaataagtaaaagtcttacctggcataaagaaagtagaaatatattcacttccggctgaactagggagtccgtccaatgtacctacagtttcccaatcaataccattattactaatttgtaaatctaccacactaggacgtccacttgtggtccaagaattatccgttctgtttatgtaacccacgagaaaattttcatgaggttctttcaaattaacctgaatccactgtggataaggaatagcttcatggcaattcgtatgaaaaaaagtatttttatccccatccactgcattttttataggtccttccgacggttcttgagcgtttgtacttaactgttctgccactaatttgatttgacttcgtgacactaaagtataagacgcaggtgcaactcctgaaagtgctcttacaactttaatctcgccaccttcatcatttgcgttaaatgtttggaaattaaactcatattcaccaaaacgagcacgagtttcatctatcaacaattccgtagttccttttgaaacaatcttatagacagtttcttttgtcaaaggatcataataccatattttaagataggaaaagtcaccagccggaacttcccatctaagttgaatttgaccgggaagaggctctgaagttaccgtctctatagcaaccggaacacctgtatatcctattacatcaatagcatctaatttatcatcgcagcctgcagtaaacataaaaactgacaaagctgctatcgtatattttatattgaatttcatagttccattctttattattcaacaatatttactattaccaacctggattctgaattagatttggattttttcttatttctgaatcagggataggaaacaaatacatcttatcatcccaataacgattactaattacacgtttataagtatatgtatcattatttttggtaatttgcatttgtacaatacttctttgagtatctccagccttccaacgccgaacatcccaaaaacgatgttgttcaaaagcaagctccaccatacgttcacgacgatatttctctacaaactggttattagtcaatccttcaggtacttcaggcatttgcacatctgaacggttacgaaccacattaacagcttcacgggcagacattgtgaattccgtactaacagcatcagctgatcccaaataataaaataccgcttcagcataatttaaatagaattctcccaaacgatatgtaatccaattatggcgttttcctccactactggtagaagcactaatatcaatagtcttatccaagtactttttcaaataatacccggtgggagttgctccagcaataggtagtgcattgcgtcctcctatataaatttccaatggatttggattagtatctggccatttctcaccatttacagcgatagtcatttccatacgaggatcacgattatcatacggtttatttggatcatatccactttctggctcatcccatgcttttcctgttactttcatttcgtaagcatcaaccaaagtttgagtaggacaattacctgacccaccattttccattcctactgggaaattagtatattcaggcgaactagtatctccgatacgacgtacaaaaatcatttctgacgctttccaattatctgttccccataactctgaatatttacccatttttatgccattctctgcacaaaaatcaataactttcttactagctaaagctgcttgtttccacaaatttacatcattagctatattaaataaagggcttgcttgataaagtaatgttcgagccttcaaagccaatactgcctgtttagtaatacgaccagtttcagggctttctccattagcggcatcattttctaatttagaataatccacaggaagttcatctgctatctcatcacattccttaattataaaatcaaaaacctcagcagccggtgtacgcttcacctgattggcctcttcttcagtcagcaccttcgtaaccaaaggtatatcgccataagcacgtaccaaattaaaatagaaataagcacgcaaaaaacgaacttcatacttataacggttaaagcgattcatctcagctacataatttttatcttctttcaattcagaaaaatcggcattttgtgattcctccaaaaagaaattagcatccctaattccactataataattccatagactatgagaattagtcgagctccatgcaccgtttatccaatcatgtattgaagaccaactccacgcaaattgcgcctcatcacaagcagagcaataagaaacctcactaggcaaatcataatccaagtaactatatatattcgtaactacagctccggtacgtccaaaatctgtaaatacataatctttatcatacacagtatattcatgatagtccaaatccgcacaagaagccataaccgacatataggctaaccctaacaatatttttttcaatttcatagtcatacttttttagttataaaaaattaaaagccaacagacaaaccaatattaatagaacgtgtggtcggaataccatttcctattgattccggatctatttctttaatatggtcccaacagaacaaatcaacccctcttacatatagcttagcactgttcaaatgccatttattgacaactgaatgaggtaatttataatatacttcacaattacgtaattttaagaatgatccatcaaccaaccatacggaacttgactgtgtattattctgaacagtttcagtagtcaaacgaggatatcgtgcattaggagtttctggtgtccaacgattttcataatagtaatttgaaatagcattgccattagacaatggacgatacaaaccattcaatgtagtccatgaagtataatttccaaccccttgaaaatcaaaattaacccctattcctttccattctgcgcctatattgaatgaataataaatttcagggacactagaattataacctaaaggaatctgatcaaattcattaattacattatcgttattctggtctttatacttaatgtcacctggtttcacgacaccgaactgttgggacggactatcatcaatatcactttgatctacaaaaaatcccactgcttgataaccaaaaatctgtcccacggcttttccagtagcacgaagatactcataagctttcggttcttccaactgctctacaattttattcttagttaaagtaaatgttcccccaaaattgaaacgaaccttacctaagctttttatataatttgctccaaattccaaacctttactatcaaccacaccagcattagcataagaagctgttgcacccaatattgacgaattcttaccacctgtatatacccaaatatcttgacgcttttcataaaaagcgtcagctgtcaacgttagaccaccaaataaagtagcatccagaccgacattatatttatacgctttttctgttgtaccatttattgagggcaattgaccttcctgccaacttccaccattactaaaattatcttggataggatatccaccaccactcccgttcatggtttcataccaatatccgttataaggaatattatccgtattaataacgccgaatgaagcacgtaacttcaagaaattcagccatgaataattattcaatagactttcattagatgcaacccaagcaagtcctactgtaggagaaatatgccattgatttcctgtttccaataaattagacgctgagtttactaatgcaaaatcgaagaaataacgatttttatacccataatgcgtataccatgaccaattgcaatgataaagattagagtttatattggcattattgtcatatttataagtatacatcaatgttgtatatactttatgttctccaaactgacgcttccagtccacatttgccataaaattgaaagaacgatactgccaatcaagtttacttcctcctttcatctcactgtccgagccacctgtatattcggaaaaagcactcggttcaccatttttccattctgtcacaacagtacttccatacgcataatctttgcaatgatcctcccaataagaagcaacattatcatatcccatacgaaaagaggctcctaaacctttcgtgatagaagacaaatcctgtcttaagctcatatctgcccacaaccccaatgtatgtcccttggaataaccgcgaccctgagccaatgcaactggattattatatccatcccatgttgcattaccaccccacaaaccattttctgtacgaataggaaatgccgcagatggagtcatatataattttccaatcaaattatcagaaccatatcccggacgactaaattcatttaacatccccataatatttacctgcattttagtcttaggagtcaaatcaatatccaaattactacgaaaatttgctttagaatacttctcttgagttgaataaccatcattctcattggcatttttataaaagccacgaccgttttgcaaattcaacattgtataataacgcaatttagaagcgcctccacgaaaagttaaagttgcaatatctgatgatcctctttcacggaacacctcatcccaccaattgacattgggataataataaggatatttgccacttttgaaagcattcaattcattctgactatatttagcagcttttccatcattagccaatgcctcattcatggctctagcataagtatacgaatccgacatttcgggtaaacgattttgataagtaaaaccatgatcataagcaaaacttatttcacgcttcttatataatccacgcttcgttacgatattcactactccattcgctcctttataaccataaagagccactgcagctgcatcacgcaaaaccgttacggactccacctcttccggtgtaagataacgtaaaacttgataagcgttatcacgctccaaaccatcaactaccagcaatataccattattaccatttaaacttttttgcccacgaatgaacatagaaggtatttgctcccacatggttcccgttttttgcatagtagtcaatccgagcacattgccgtacaatgaattacctacggtatatgaagatctagttgcaatatcatcactataaacagtagaagctgctcccgtcgactcagtataggtctgttccaatccaaaaccgtaattcactttattcgaaaagaaatccattataacagtcatctttttatccatttccgcctttactactttttttgcatcatacggcgtctgaatccaaagctgagcatcctttgatactgaaattgtaaaatttcccataacgtctgtcgataccatagtaagtggttgccccaatacagacacggcagctcccgataccgggtttcccaccttatcaaccaccttaccagtcacattaacttcttcctgtgccatggcattcatacttgtaaaagcaagtattgtcaaagctaatattttatttttcattgtttctagtttttattagataaaaaatcaagtattaccaacctggattttgagtcaatccatatcctttgtttacttcatttacaggaaatgcagacaaataccattttgaattgaaatttgtccaccatgcacgagctgaattagatattttgaactgagtatatttaaattttgtcggaaaaggtccccgtttatcttccggtttatcagaccatgaaccacttccaccatcagcacgttcaataagcaaaccatgtaaaggacgctcaaaaagatcagcacgcttattacgtatcatatcaaagaaacgaacatcttccaacccaagttcacaagcacgttctcgtaatatttcttccatcaaagcattcgaatcagatagtaaattcttgtcttgattcgactctatcaacccttttaatccgacacgcgcacgtaccttatccaccatctctatagctagtttcggttgattatttttcagaagtgcttccgcataaatcaaatacatttccgacatacgtaaataaggccattccaaataattattggctagacttcctttaccttctttatagaatttatataaaccgaagcctgttgcatactgtcctgtttcagtacttgtactattagcgttttcacgtcctcctacccataattccacagaacggccactccatttagcaccatttaccaaaattgtttcatacaaacgtggatcacgagtaggtttattataatcattattctcaaaaaacatattattattctgtactgccttatcaaagtcaaaggattcgcctgttgccatagggaacatttccatatactccaatgtaggcgtataaccgccattgggcacccaatcgccccaataataccaccaatcccaattatacttaccaatgatacgggtagaaatcaacaattccgaattttcacgtaagaaataagctttattaaaagccgctctataggcatcattcgtatcaccaacagcctgaactagttcataatgcccattaacttgcagggcttggaaaaattcttcacaagcagtcagacatgctttccataattcaggtttatatcctccgtaccacacttgatgattgataaccgcttcttgtggttctgccgtacaatatggttcattgtcattaaataaaggacttgcagcaaaaagcaaaattttacatttcaagcccatagctgccgctttagtcatacgtccttgccagttagcctctccatcctcagtcaaatcccaaggaagtacagtggccgcttcatctaaaagacctatcataaagttcactgtttcttctacggtagctcgaggaacatcatattcattttcagccgcaaaagacgcttttactataggcaatccaccaaaatgacgaaacatatcaaaatagcgagaagctattattaccttcgcttccgctttcaatcgttctttttcattcccgtccatatcgggtacacgatctacattttcaataaagatccatgaactacgtattgcctgccaagtttcttctttagtaaaaccaaaacgtgtttcagctgtaccatcttctgtactagcagtataagtaccagaataataatgtctattcaaaccatcccatgaattatgagaatgaaaacaatcagataaacattcaaacataccagtattcatcttaccatccacatcattccagtttgtggccaaaccataatacaactttgaataagtattccacaaaaaacgacgagcatactccgctttaccgaaaattgtatcttgagttacagccacacttggtgctttttccaagaaagcatcaccgaattttatatcatcgacacatgaagtggcaagcgttgctcccacaaatgctataataaaccatttttcaaaatgtttcataagatttcaagatattagaatccaacttttaaacctaaattaatcacgcgagtcaatggataatttggacgatcactttgacgtgactcaggatccccccacataaaatccgtcaatgtgaataagttatacgcacttacatataaacggcactgattcatttttattttcttcatgaaaggcatattaaaattataccccaattcaacacttttcaaacgtaaataacttgcatcacacaaatacaagtcggaagctctataattgttcgcttgagctaacttcgatatacgagggaatttagccgtataagtatcggccgacgaacgccatgtattttcatattgataaagaagcaatcctttattttgtgtatctcccagcggttgacggaattcggaaagcatacggtctacattccacgctcctgtaaactgcgctgtaaaatcccatcccttccaactaaatccaagattcaaaccagctgtatattcaggagtatccacataccccaaatcacggctagcatcatctccatcaataacaccgtcactgtttaagtcagcaaataccgcatcacctggctgtaaagataaaccatgatctgctataggtctaccaaattcttcctgatatctagcctctgcagtttcatcataatatccccaaaatttataaatcaaacgagaaccaattgtacggccagtttcatacaaccaatcttcattcttttcaatctcattcttataaacaattttgttgcgcgcaaaagagagattgaagtttgcccaataacggaaatcatcaccgattttatcattccattttagctgaaactcatatcctttattttcagttttaccaacattcataataggtaaaaccatacccaaaattcccggcatataatctggagaagaaagaatatctcgacggttttctttaaaataatctaaagaaatatttagtttttcattcagaatagaaaaatcaataccataattctgcttaacagatttttcccaagttacatcagcattcgatttactagcctcataagcacccggcttcttatttccagcattcgtaccgaaaaaatagccatcgtcattcaaaatataagcgtctggaagatacaaaaatctattatttccgttattatcattacctaccatacctacagaggcacgtactttaaagtaattgatcactttctttaacggcttaaaaaaagactcttcactgacaatccaaccaatagagccagctgggaacaagccataacgtttacctggagcaaaattctcagaaccattataaccaacattaaactctgccatatatcgagttttataatcataggtagcacgccccacaaagccaacataagccgaaggaatatcatcataagtacctcctggataatatcgttttgattgattataaagcaccaaacctgtcacattatgatctccaaatttgcgactgtaattcaaagcagcttccatataccaatcacgtgatttaccttcaccatttgaattacgactataagacaactgagaatcagagccactcttacgataaccaatagatccatcatcatgaagaactggtgtatatacagccatagaagaactggctattttttgtgtccaataactagtattataagaacccttcaatttaaaagaaagtcctttggttataaaatctaacttttgatccaatacaagatccacattcaacacatttgttgttgtagaacggaagcctttcccataataagaattcaatccgtcagatccagtaaatggtagataatcagcatttgaaaccacacgttttccatctacaatgcctgcaccagcaaaaggcacagcccaatataatttacggaacagctgattctggtcttctccagactcaggagtacgtttagtttcaatacgcccaccaatattaacagaaattaatgtagtcttagtcgcatcaaaatccaaattagcacgataattgtaacgtttgtagttaaagttaaaattatcagacgctgcaagttgtttgaacataccatcttgtgtaaacatacctgctgatacaaagtaacgcattctatcagtacctcccgatatatttacattatgttgtgactgaaacgctgccttattcatacagtaatcaatccaattaatatccggatataaaataggatctgtatgatctctgaattttatcaattgctcttctgtaaatgtaggtactccaccatcatttacctgtaaatcattataataagacgcatactgataagaattggcaaattccaattgtttcgttcttaagttaacacctgccgaagttgaaaaagaaattttagccttaccttcagcaccacgtttagtagtaatcaatataacaccattagcaccacgaacaccaaatacggctgtagccgaagcatctttcaataccgtaatactttctacctcattggggtcaatctgcgaaaattcgcgttctaccccatccacttgaatcaaaggtttggcattattccaagtagcaataccacgcacatacaaatccgcctcatcagcaccgggttcaccagaatattgcaccgaagaaatacctgtaatctgaccagacaatacattcgacatagacgcagcaggagtttttagcaaatcctcacctttcattgaagaaatggctcctgttatagaaactttcttttgtgcaccatacgctacgacttgtacctcacctaacatttgtgaatcatcttcgagcacaactcttaaattcttaccagattgaggtgtcaagacttgatctttgtaaccgataaaggaaatttttatttttccatttttaggtactgaaatagaaaaagtaccttcaaagtcagtaattgttcccattgtagtaccttctacaacaacattcgcaccaatcacaggctcacccgaagcatcaacaacaataccttttatagtttgctgttgatgtattaattgaacagccataaccttatcggcagctgacacaaccaaggggtgagaagctatgaaaccagtgcaaaacaataagacagtagtaaatgccttacgatttctcataaatgagttagatttcattgttttttccttttttaaaattagataataaggtttataaactctttatattttgtggcaatctttttaccccaaaaaaaactaatcaacttattgtttcatctaaagttttttactagatttacaaatgttttagataagatatcctttaaaacgatgcaaaaataaaagatgttatgaaaaaacaaagattaaaaattaagcaagaatggtagaaaaatcattcataacgagtttttagtccataattgtcaaatattctatggttcataaatttaatataatcaattgtattagaattacatatgttatatatatgttattagatgttttaattccagctactgcccagccatatatgattaaaagattgggagtagaagacggaatatctagtaattatgtagttggaatcacccaggatcaacaaggttgtatgtggatcgcaaccgaagacggattaaataaatttgatggtaatcatttcaccgtatatacaaaacacacctctggcctgaccagtaatgaactaaataccgtattggccgatcccaatgaaaatattatctggattgcaactcaacgcaacggattatgtgcatttaactgtgatcaagaaacatttacctcctatatagctgaaaagtcacaattacaaacaaatgacattactgacttgtcttatgcctcagatggaggaatatggataacccactatcatgtcggcatagaacattataacccccgaaccaaaaaattcacagcctatagaaatgatgaaatacaagggttaccgattcccaactggacttcttgtgaagacagaacagggcatttatatattggacatgccttcaatggattaagcatcttatcattaaaagacaagactgttaaaaattatatacctgatcccaaggatcccaacagtctgcccggacaagaagttcgagccatttgcatagacaagaatgacaatgtatggatcggaacaaacgcaggacttgccctctttaatcctaccactgaaaaatttacagtattcaaacataatcccaatgatgacaattcactattatccaattctatatacgatatcaaacagatgaaagacgggaagatatggatatgtaccaacatgggaggagtaagtatattagatttacaacataacgcctttatttctgcagaggaaatagattttcaaaatataaaggccaccaatgacaattatgggctatcttcacctaatgcacgatgtgcctatcaagattgttatggtaatatatggataggaaactatcggggaggtatcgatttcattagtcatacccaacccatgttcaatattctaccttatacaatagaaacagcaaaaggactaagctacaaacaagtgtggggaatgtgggctacagacaatcaagtatggctaggaagtgaagatgaattgggattatttataaatggaaagaaaataaagacatatgatctttactcgcatgaacttgtgtacaacacgcatatcaataccatttatgaagacagacagaaacgtctatggcttggaacttacaaaaacggaatactgctctataaaccagataaacaagaaattgttcacatatcctctagtctattcaacaatctagatgtcagatgcttttatgaagatcagaacggaaaaatgtggattgggactgaaaccggaatctattcctgtacaaatgaagtactcgtaaaggaagaagaaatacaaaaacaattaccagacatcatggtacattctcttttgcgtgacaaagaggggaaattatgggtaggtactttcggcaaaggcatctctatctttgatgtaaacaataagctactatggaatttcgttattgaaaacggcttctgctccaatgctgtgaatcacatgataaaagattcagaagagcaaatatgggttgcgacccgcgaaggactagccgtattcaaaaataccagccaaccaaacagatacaaaatctttaaagaaaaggaaggtttagaaaacagtcatatacgtgctatttgcgaagatttggaaaaaagaatttggataagtagtaatgacggcatctcctgtttagatccaaaacaaaacctattttataattataatcatcacgacggagttccgatgggtgatttcatgaacggctccacttgtatgactcacaatggaattatctatttcggctctcaaaatggagcatgtttctttaaccccaaagaactatcttctatccgccaagtttcccctgttaaaatcacccaattctgcaaatacaataaaaaaacagaaagtaaagatgctgaaatttcaattccattcaaaaagggagtagtccatttaccttataatcagaatagttttcgcattacatttaatgtattagactacacacaaagtccacaggtagaattcacttatatgctagaaggccttgaaaacagatggtatgacacacaaggagaaaatcaagtaatttttcgtaatatacctccaggtaaatataacttcaaagtgagaacacgcatccgtaatcaagaatgggacaaagaaatcgcctcattgaatatctttattgctcctcccctttggcttacctggtatgccaaattgggttatgtcatattgtttatcttcgcattatatgcattgctccgtttttataaacgtaaactggacttagagagttcactggaagtggagcgcaagcaaagtctgaacaaacaagaactgaatgaagaacgcctgcgcttctacaccaacatcacccatgaactgcgtactccgctcacgctgattctaggtccattggaagacctgttgagtgatgctaccttatctcccaaacacgccaacaaaatcagcatcattcatgatagcgccacccgtctgctgaatctgataaaccgcatactggaattccgcaagaccgagacccagaaccgtaaattatctgtagccaagggagatctgggacaattggtacaggaagtgggattacgttacaaagagttgaatcccaataacaaagtaaattatcatattcatatcgaaacagaagatacggaaatcttctatgacgcggacatgatcaccatcatactggacaacctgatgagcaatgccgccaaatatacttccgagggagatatcaccttatcactccgttcagtagaagagaaccagataaaatacacggaaatcagtgtcagtgataccggtcatggcattgacgccgaagcgttaccacacattttcgaccgctattatcaggcaaaaagcaaatatcaggcatcgggttcgggaatcgggctcgctctggtcaaaggtttgagcgaattgcacgaaggaatcctgaaagtagaaagcacagtagatacgggaaccacattcacactgcgtctgctcaccgagaatacgtatcccaacgctatccatgcccaacatgatatggaaaagaagccgatggatgcagaggaaaccaccattaccgatacaccaaccgagaatcatcccattgtactggtggtagaagacaatacagacatacgggaatatatccggagttcttttactgaactctatgaagtaatcactgccaaggatggtaaagaaggctgggaactggcacaggcacgaattcccaacatcattgtcagtgatatcatgatgccggtcatggacggtatcgaactttgcaagcgaataaaagaggatatgcgcaccagccatatccctgtaatcttactgacggctaaagattctttacaagacaaggaagaaggatatgcatccggagcagattcctatcttaccaaaccgttcagtgccaagctgttgcacagtcgcatcaacaatctgttggaaacccgtaagaaaatagcctctttgctggcactggccgatatacagcccaaacaggaaagtgccgtgagttcgttaaacaaactggataatgaattcttgcagaaaatcacgcaaataatcgaagagaatctggaaatggaaaagatggatatcgctttcattgccgacaagatgtgcatgagtcactctaccctttaccgcaagataaaaggactgacagatatgtccgccaacgaatttatccgtaaggtaaaaatgcgcaagggagtggaactgctgatgtccggacaatatactatttcagaaatagcctatatgataggattcagcagtgtggcctatttccgccaatgtttcaaggacgaatacggaatgtcgccttcggattatgtgaaacagaaacagtagactccctggcggattctgatcattgcttggtatcatcctgagcagttcttctttagagttttatatttctgctgccactgctaccacccttcctgctgaaatgccgataaaaagtggtagcagtggagcaacaatataaagctcgtttgttgtagaactcttggatcaagttataactgtcacaatcgaattcaagtccagcctgaacattctgtttctatttttcttccaaagaaagcagtatcccgatcacttccgcataattctttctaccggaaggaatgttgttaccctttaaaaacaggttataaattttattctgcacttcacccaacagggtactataacgctcatgccaatacatacgtttatattcataatccttcaccacttcgggacggatcgtcttaatccattcacggaattcctcttccgtcaacacagaagatgcattgaccagcacatagggcaacagaccgaaataggcactataacgcaccgccggccgctttgaagagcgacaaaccctgtaagcccaataattcgcttccgcctcattacttacccccaacaggtgagacagttcatgggcatacgtaaatggcaattgtacaggaagcaattcttcattcaattgcgactccgcaaaaaaaggtcccatatatcccaatacccccacacccgaataaaacggattgaaccacacctgcttgggatgctgataatcccggggaagagccaaaccatacatagacggaacctgccggtaaatctcctttatctcctgccgcatcctttcagggtccgttttcacctcagccgtataggactgattcagactatctgtataggaagcaaggaaacgatggaaagcctgttcatcgtaaccggcaggctccacctccatccgccggtaaatatcgtaacggaaataattcaagccccatcccagataaaaccagatatagacccatgccagcaactccacttccctgcccacaataaatctccagcttttcttcttccggcgtttaagaaaaggataaataatcatccataaaatgattacgaccaccagcgcctcctccaaggaaaaagggaaaacagaagctatagcggacaacgccgccgacagccacggatagatatgacgggcatacccttcggccatgacgggaaaaaaacggcaaagtacaatgcacagaagaagcaatgcaagtactatatatctcagaatagggagaagttttgttttcatggatgcaaagctactatctttttgccattttcagatacagatgacacaaagcttttattttttaaacacgaacaacgcagatgatacggataagtataaaaacaacttcgtatcatctgcggcgttcggatttaaaagcaatcagaataaatcccaagtgcgtatatcatcactccagtgatggtctttcgggaaaggctgtccgccccatgccttggcttgtgtgcaaggttgtgcggcatctgtccagaacggatgtgcggcaggaagccccagcggaaggaacgccaatgatgtcatataaagactgccgttattggtgtaccaatccgccacattgggctgacggcctgcaaaaccgatggtcaggaagcccgcctcattgaagttctcggtgttgtcatacatccggtgcatcacagaagtcagtgcggcacgcgcctgtccgttgctcaccccttcgggcaactgctgataccaagccatcagcgccaagggttgcatagtggccaaacggtaaggaatggaacggccgaataccgggaaagtaccctcaggagaaatcaagcgttccagtacaaggctgaatttcctggcacgtttcaaggcgcggtcataatattttttataatgaatacgagtgtatttccctgcatccttcatgccctgcaacgtttccagatacatgggatggaagacataactgctataatagtcgaaagcgaaagaagggccgtccgcataccagccatctcccgtgtaccattcctccaccttgcggatagccgaattgatacgatattcgtcacattccgctcctgcctttgccaggaaactctcgatggtagaagaaaacagcagccagttggtgtaaggcgggtccacacggcgcaactgggtaaattcttcaaaataacgtttcttggttgtatcatccaaaggcatccaaagctggtcgtaagcacgcagaaaactttcggccacgtatgccgcatccaccaaggcctgtccgtgtcctctccacaacagatagtcgggattggcagggtccaccgcattggcatagcttttcaatgcccattcacggagttgcttacgcatctgtccttcttccgtatcatcatcgggaagtgtcaaccagggagcgacacctgccataaggcgtccgaaggtttccatataagtcacccctttgttacgtccatcccaattagggctcacctctaccagcatattctttttcagattaccttccgccatattgctcagtacgggagctgccatcttataaagcagattgcaccagtaggcgcgatcctgattttcaggagcttccagataacggacatattcacaagcagccaacagaaaagcacctaccccgaaattagcttcagaatcagcatcgactacttgtcccggaatggccttctcaccaatcggctgtacgtaaccaatcttaccattcttctgcaaagcagtctttgccaaatagttccatgctttatctatcaccggtttatacactgcctcatccagatagccattattgattccccaaaggaaaccgtaagtaaagaaagccgttccgctggtttccggtccgggagcatgagtgggatccatcatgctacgggtccaatagccttccggttgctggatggctgcgactgcttcggccagtttcacatacttgtttacgaaaaaagaacgatgctcgtaatcagcgggaagatctttcagcaccttcgccagtccggcaagcacccatccgtcaccacgtgcccaaaagtccttctttccgctggaagtcttgtgtttaggataaacatatttggcatcccgataatacaggccggtttcccggtcgagcatgatactgtccgaatatacaatatattcatacaatttatccaaatagagatgattacccgtcaccttatacagtttggtcatgacaggcattaccatatacagaccgtcgctccaccaccagtaatcatgattgggtgtactcatctcatactccatcacttcgcgggcacgggctatcttatagttgtccggaagaatagtataaaggtcgatatatgtctgaaaacaaacctgataatctccgaacaatacatattcatcactctcaccgtaagagtatttccatttagacttatccttttccttggctcccttccattcattgtgtatagcccaggcttcagaatatgcacggtagttttcattaccggtcagaaagtatgcctccatgtttccggtgtggtaagcggcattgtcccaaaacgaacggacttcgggcttgttatgcgtttgccaataagtgtttaccttgtctataatcccccgtacttccttggcttcggaagaaggtttggcggcaacctgcatggaaagcagcaaggtacctgcacaaacaagggtttgtttcaataatttgttcatcatattaataatttatcaatttgccaatttactaatgtgttaatgtgcttgcgctatatgccgcatggtcattggcaaatcagcacattatttacaattccaacacataaaccatttgcggttctgtttccacctgcttctcgccatctccctgtcgggtatcctgtacataaatatgaagttgtttcttcattttccataactccgtgtcatgactgggttcccacgcatttacggcaaaatccgtcaggtctttcacgtgccattcaccaaactgtatgtctttggtatagtacatggaaactttgcttccacgctcctggtcacggaacagatagtacacttctccattgtccaccaccatccggggacgggacatgggaatcatcttggttcctccccctttgagtgagaaaggggtcttgcgttcggaaacctgtcggttgtgccagttcacgccatcatgccaaacgatgcggtattggggaacatcactatcgggattgcgccagtaggtagcgatgtacggatgacctccggcatctgtactcatactggtctggtttatcagttcggcattctgaggaatacggcaggcatattcggcattgcccaggcggataggaagctcatacttctgtccgttggtcttataccaggttctacctccgtcaaaagaacgggcgtagcataagtcatggttggtttccacatgccaggtttcacgccacacccaggaaagatggatggttcctgattggtccacatacaactgccaataggcattccgctcgttttctccatctacaaggacatcctgcacacgctcccacttacgggatttcacatcatatcggttcattaccatatttcctcttccggaagcgcccgagcgatatacaaaaagcaaaccgccatcagccaacaaatgaaattcaggataggtcacatcttcttcttcgttgcctatcatcggctctttatctcccaaaacaagtgtatcgggggcaatgctgcggcaatagttcagtttatgtccgtggtggtcaaaagaaagatgaagatagccgtcgccgtccaccatcatactgataatgttatgtgcatcttttacatgtcctttgtattgggtacggtgcaaaatccattccccagtgcccagacggcgtttgcctaacatcagccatccttcagcgtcataataagaaatgtattgtgtgtttccatgcgtcacaatggagttattacggaatacagtagtatttaccgaagtactgctaaagcctttccccacttcaaccagacgttgggcacgaacagaaaaagccacacagcataatgcgattagtagaaataagttcctcatagcaattctattgataacattgcaaaagtaactgatttctgtaataacacgggataataattcggcaggaaggagtcagaaaacggtcaaaaccgattattatatctattttaaagaaaaattcagagaaataataaagaagaaagattctatgattacatttaccatagaggcagactatgtgaaggatcattccccaaaggatctttgccattcatgtttccatgcagcatatatagaaatcccacccggatgaaatgggcatttcaccctggtgagagcgtagttccacctttgtgaaatggcagttccacccaggtgggacaatatacctatacaggtgcaaacagcacatttaatagttactttggacttttgacacattcatcctcctactgtgaatgaaactgccaaccggttaactataatatttcctgaagctggctcaacttcatactgttggaacctttaatcagaatataatatcctttcggcttatatctttccaacgactctttcaatgcaaccacatctttaaaatgttcaaaggacggaatcactttgccaaactcctctcctgccaaaagtatccggtcaaatttacattcatccagataatccgcaatcttctgatgttcctcatgactggtttctcccagttctttcatatcacccagaataaccattttatgagcgacattcatcaaccggaaattctccaaagccgccatcatactggtaggattcgcattgtatgcatcaactatcagtttattatccgtggtttccgtcaattgcgaacggttattatgaggaacatacgcctccagtgcctcacaaatctgccgggacggtacactgaagaaccggcccaccgtaatggcggccaatgcattcttcatgttataactgccgataaggtgggtattcacctcgaacttctgtccctcgtgttcccactcaaacgaaagaaacggagcacaagcgcccagcttgccgctgatataaagtccctctcctccttccataccataacaaatacgggtaaggccctgagagatagctgtgagatactcattgtccttgtctatgaaaataatatgcttgccattgtaacgcagatgctcatacaactcacctttagtcttgatgaccccttcaaaagacccgaagccttccaaatgcgccttgcccacattagtgatcataccgtaatccggttctacaatacgggtcagtgccttgatttcacccggatggttcgctcccatctcgatgacagccagttcatgctcgggagtcagcctcagcaaagtcagaggaacaccgatatggttattcaagttaccctgtgtataaagcacttcatatcttttttgcagcactgaggctatcaattccttggtagtagtcttcccattggttcccgtgatgccgatgattcgggtacccattttatgccggtgataattagccagttcctgcaatgctttcaagcaatcgtctactaacaagatacgcggatgcccatcggcggcatattctttttcatctactacggcatactggcaacctttttccagcgcctgaagcgcatatgcatttccattgaatgtttcccctttcagagctatgaacatagaaccctcggggcagttacggctgtcggtagttaccttgccgcattccgtaaaacacttatataaagctgaaatatccatctttcgctttgcttttaaattaagttgcaacaaagataactgaaaaatagttcatgaaataacaaaaactcaagaattgtgcgtacttttgtacgacctaaatgacaagccgtaaacaatggaaaccaaaaccgtcaaatatattaatgttaatgggaaactgatggatctctcccatccgcaagtaatgggaatcctgaatgttacacccgattctttctatgccggcagccggcagcaaacggaaaaagatattatcaaccgtacctcccaaataatagaagaaggagcttccatcattgatataggtgcctattcctcacgttccaatgccgagcacatcagccccgaggaagagatgcgccgtctgcgtaccggactggaaatcatcaatcgctatcatcccggttgtgtggtgtccgtggacactttccgtgcggatgtagcccggatgtgtgtagaggagtacggagtggcaatcatcaatgacattgccgccggagaaatggacccgcagatgttcgacatgattgccaggctgggagtaccttatattattatgcatatgcaaggcacgccgcaaaatatgcaaatgaatccgcattatgacaatctgttgaaagaagtctttctctatttctcggaaaaagtacagaaattacgcgacttaggagtaaaagatattattctggatcctggtttcggtttcggaaaaacagtggaacataattaccagttgatgaatcatttggaagaattcagcctgttcgaactaccgttactggtcggcatatcacgtaaatcaatgatttacaagctgctaggcggaacccctgatgatgccttgaacggaacaacagtgctggataccatttccctactaaaaggagcggatattctcagagtgcacgatgtaaaagctgctgtagaaaccgtgaagatagtacagaagatgaaagactccgctgccttttaattcttatttttcaatttttaattctagaaagatgtttattgattttagtataaaagacctcatcgatatcctgctggtagcctatctgctttatcagacttaccgtctgatgaaagattcgggttctatcaatatcttcatcggtatcctggtatttataggtatctggctgattgtatctcaggttttggaaatgaaactgctagggtctatcttcgataaattggtcagtgtaggtgtcctagccctgattattctttttcaggatgatatacgccggttccttgtcacactgggctcgcataaacagttgggacgttttttccgcttcctgacgggaaacaagcaggaaaaaacggaaaaagcagatattatgccgattgtacttgcctgtatgagcatgagcaaagggaaggtgggtgcactgattgtcatcgaaaaaagtgtacctctgaatgacatcatccgtacaggagaaattatcaacgccaatgtgaaccaacgactgatagaaaatattttcttcaaaaacagtccattacatgacggagccatgattatccgccataaacggatagaagcagccggttgtattctcccggtatctcacgacttgaatatccctaaagaattgggattaagacatcgggctgccatgggcgtatcgcaggaaacagatgcattggccattatcgtttcagaagaaacaggtggcatatccgtggcttataaaggacaattccatctcagactgactgccgaagagctggaacgtattctgacaaaagaagactaataacctatccggatttttactccactgattatcaatcttaaacatagaaattcaacctaggcaaccagtaataaagatcaattcagcatcaaactcatataaggatgctccgcttccagtaacaaccgggtaaaaccatccaacgtataagtgtgatattttttttccggtactctctcacgaaaacagaaaccatcccgtaccgtataatagccgttattctcctgaatcgcttcatctccctcaatatgtatataaagttcggatgccggatacttatgggcgaaaaccttcaacaactcctctgcacggataactcttgccatccccaaaaacaaagtatcggcagacgacggaatgaaataatccatacgctgtaccttatatatatgggccgcttcatacaataaagtatcctgcaccgcatccgtatctgccagcaattcctttatatataatgtatcatcccccattaccgtaaatgccatccccactattttatctgcttcccaggcaaccagcaatttgccattacccagtcttaaatcggccataataaccagaaaatcttctttaggatgctgaatgcaactcctgcgtccatgcatacgggaatcaaaataatgataatgttccacaccgggaaattcgcatacctctatctggcaaccgggcgcagggcgtaatctgtctacccttacctgttcaaccgcatacccaaaaactggagcatatcccgacctggcataataaccgaacaaccattcctctgcaggaatcaacgaagccagcaaaactccatcttcatacatacaccgatgtgtttccttcagtaggcgtttcatggctccatgcttcctgtaatccggatgcgtacaagcacccgatatatacgaagtagaaatcacctcatcacaaaaagtcataggataaggtatcatctgcaatgcggaaataatctttccgtcttcacgaatcaccctgttcacttcatccttatatctcatcttgaaatataagtcggtaaactcatcgctatcattgaagcagagtttccataatgttttcacttcatcctttgtggtcattgagctctgctatacatttctcgagtaaaataacgggctgataagaaagttttgctttgcgcaaaccttccagaccaaggtcttcctcgcggtttacatatatatattgttcgtcgatatgatttgcatattcatagttaatcatggcatacgacccttctattcccgtatccgccttttcaacgcaagtatcccatgtttcatgattgataggagcaccgtatgtaaaagcggcaatcttcccgttgacatgaagcacgccgcccgtcaaacccaacgcctccatatggttcaaggcatatgtcatggacttacgttctgcccccaatgccaattgttcctcgcagttattggcacgacaccattcctcttccagcttcaaacattcgggaaccagatctggagtcaacggtttgtattcataatcaggatactgcttcttgaacttgttgatatgattacgtttggcttgaaacttctttcctttcaaggttgccaggtcagtacgcaagtagatataatcaaagtaatcccggtcttctgtaaaagtgaaacgtccgggcatcaccgcctctatatccgctttcatccccacgcatacccccagcatacgcaattttgcccccatctcttcagcatcctttatcaatgcttcaagaacaggtttcacatctccagttccgacgggcatcatgtaggccaattcttctcccgcatagaaacgcagcaacaggtaattatccatcacggcatatttagtctggtacaggaaaatccaactacacagattggcaaacgacaagtcgcaattacgacgcaaactgcctaaggtaaaggactgtatcaagtctttatccgctaaagttatatctttaaattctatcataaaatatgggttgcttgttttctcaccacaaatcacagaatcttcatttcattcaaagtgacaatagttatcagactgctgtaagaatgctctgttactactaaatgcggatagactttttataagcaatgctcaccccaatgaccatacctattgaaaatcaaatcaatcctctataatctgtgatgattttctatatataacaaagataacagcttttttgttaaatcacacctaataatctaagaattgtcggtgtgaaaatcgctgtcataattccgttcaaagtcaatcccagactagcatatgctccatatttcccactgatttccattgccgtagaagtaccgaccgcatgagtagccgtacccatagaaagaccttgcgcaataggactccccacatgacctacccgaagtaccttgaaaccgaacaccgccccgaacagaccgactaccaccacaacagcggccgtcaaagacggaattcctcccgtggctttcgaaacctccatagcgataggagtagtcacagatttaggagccaatgaacaaataatctccggagtggctcccagcaatttggcaatgaccaccacggccaccaatcccaccaaacaacctgccaactgtgaaatgacaataggaagcaactgtttctttatcatctccaactgcaaataaagtggcacgcccaacgctaccaccgctggtttcaaccaaaattcaatcaggtgacctccttcattatatgtttcataactgataccggtaaatttcaaaaacagaatcaacacggcaatggtaagcagaatcgggtttaacaccacccatccagtctttttctgcaagacacgtgacaaaaaaaacaccccgaaggtgaatgccagcaaaaagaacttattttctaaatattccatttgattttctaactaattggtgaacccatcctgttacgaccagtaccaaaaccgtactgaccactgtcgcaattactatcggccaaaactgtgcttcaatgacatcaaaataaagcatcagtgccacaccgggcggaacgaagaaaaagcccagattagcaaccaagaaatcggacagcccctgcacccattgcagttttatccaacccaatttgagaaaaagggtgagtaacagcattcctataatactggacggcagcttgatacccgtcaaaaaaacaatcaattcacccaaagccaaacagccaaataaaatggcgcactgacgaatcataccttataaatttattaaatacttattgaaaactgcgcaaagttaaggaaacatcccgtttggtgttcaataacatacacttttagcatactttaaaccaaaaataatattgattttgcaatgtagatattgcaaaattagctaattttgcatcgtgaaaaacaacactcgtctttagaacgtacataattaatatattatcatggatttaatttctcaaatcgttgagcgcgcgaaagcaaacaaacagcgcattgttcttccggaaggaactgaagaacgtactttaaaagctgccaaccaaatattgacagacggtgttgccgaccttattttattgggaaaccccgatgaaatcatgagcctggctaaacaatgggggttagggaacatcggtaaagccactattatcgatcccacagaccacccgaaaaaagaagagtatgcacaattgctgtgcgaactccgcaagaaaaaaggtatgaccatcgaagaggcccgcaaactggttgtcgatccgctgtatctaggatgtctcattatcaaggctggtgatgccgacggacagttggccggcgcacgcaacacaacaggtaacgtacttcgtcccgctttacagattatcaagactactccgggtatcacttgcgtatccggtgccatgctgttgctgactcatgctcccgaatacggaaataacggtgtaatcgtaatgggtgacgttgctgtaaccccggtaccggatgccaaccaactggctcaaattgcagtttgtaccgctcagaccgccaaggctgttgccggaattgatcctcgcgtagctatgttaagtttttcaaccaagggttctgccaaacatgaagtggtagataaagtggtggaagctttggcaatcgctaaggaaatggctcccgatttgaagattgacggtgaactgcaagctgatgcagctttggttccgcacatcggtgcaagcaaagccccgggatcagaaattgcaggtaaagcaaacgtattggttgttccttgtctggaagtaggtaatatttcttataaattagtagaacgtctgggacacgctaccgctatcggcccgatcctgcaaggtatcgctcgtccggtgaatgacctgtcacgcggttgctctatcgacgatgtttataagatgattgccattactgccaatcaagcaattgccgctaaagaaaacaaataatcattctccaaaaaacaacaacatcatgaaaatattagtgctcaattgcggtagttcttctattaaatataaattatttgatatgactaccaaagaagtcctggcacagggcggtatagaaaaaatcggcttggtaggctctttcctgaaactgactttgcccaacggcgaaaagaaaatattagaaaaagacatcccagaacataccgcaggtatcgagttcattctgaatacattggtgagcccggaatatggcgcaatcaagtcattggatgaaatcaacgcagtaggtcaccgtatggtacatggcggagaacgtttcagcgaatccgtattgctgaataaagaagtactggatgcttttatcgcttgcaacgatttagccccgcttcataacccggctaacctgaaaggtgtgaatgctgtttctgccattctgcccaacgttccccaagtaggtgtatttgatacggcattccatcaaacaatgcccgactatgcatatatgtatgccattccatacgaactgtatgaaaaatacggtgtgcgccgttatggcttccatggaacttctcatcgctatgtttcacaacgtgtatgcgaattccttggcgttgatccgaaaggaaagaaaattatcacttgccacatcggtaacggtggttccatttcagctatcaaagatggtaaatgtatagacaccagtatggggctgaccccattggaaggtcttgtaatgggaactcgtagtggtgacatcgatgcaggcgccgttactttcatcatggaaaaagaaggattaaatgcaaccggcgtatccaacttactaaacaagaagagtggtgtattaggcgtttcaggtgtatccagcgatatgcgcgaactggaagccgcagttgccgccggaaatccgaaagctattttggctgaaaagatgtatttctaccgcatcaagaaatatattggtgcatacgctgccgctctaggtggtgtagacatcatcctgttcactggcggtgtaggtgaaaatcaagccaattgccgttctgaagtttgtgaaggtttggaattcatgggtgtgaagattgaccttgaaaagaacaaggttcgtggagaagaagctattatttctgccgatgactccaaagtgacagtagctgttatcccaactgatgaagagctgatgattgccagcgatactctggctattctgaataagtaattttattgtttggttaaatatataaattataaaaggctgctacgcgtgatgcatagtagccttttttaagaatattgactttctccctcaacatactgctcaaggaacatattttcaccatcaaatacagcatacgaaaaatcttgtatccagtcaccaagaatcaacatacgtgaagtacggctcagcatcaagtctagcataatgtggcgatgaccataaataaaataattgatatccggatggtctttaaggtaatttttagtaaacaagaccaacggttccttatcctctcccatatactcgggttccttaccgccttcacgcttcagacggctatgcttggcccattccaagccaagttctatgctccaacggggatgtatggtagaaaacagcgtttgtaaagtggtactatgaaacatggaacgcaacaatttgaacttggcatctttatctcccaatccgtccccatgtgccaagaaaaactccttcccataaatctcacaggtcaacggctgacgatgaatagttaccccgcactctttttccaaataatcaccacaccagatgtcatgattaccgataaagaaatgcacctccactcccaaatcggtcaactcggaaatcttccccaagaaacgagtatagcctttcggcactaccagtttgaactcgtaccaaaagtcgaatatatctcccaacaggtacactgctgcagcattatgttttatactatccagaaaattcaccaaacggcgctcctgtgtccgcccgtgtgctatggcacgagaacctaaatgtgcatcggaaaggaaatatacgttcttcataatcttactaaattaaatacctcataaattaaaaatccgagaatagagaattaaaaaacaacaccttgtccaataacttagacatattggcaattcttattttccaattttaattctcaactttcaatttattagaggaaacccaattccaatttagcttcttcactcatcatatctttatcccattcgggttcaaaaaccaagttcacgaccgatgaagtaactccttccacagagtcgactttctgacggacatcctccataataaaatcagcagcaggacaattgggggcagtcaatgtcatatctaacactacttctccatcatcttgcaaatcaattttatatatcaagcctaaatcgtatatattcaccggaatctcgggatcatatacggttttcaacatggctataatcttctcttctgtttttaaacgggtatctgcatccatatctctcgttgttttaattgcaaatttaatgattttctatatttttccttcatcagcatagctataaaatttgccatccgttaaaataacatgatctatcagtcttatgttcattacttttgccgccttgtcaagatgttccgtcaaccgatcatcctctgtactaggtcgcatactgccggaaggatggttgtgacaaagtgccatggcaacggcccgtttcaacaatgcttccctcaatacacaacggacatctaccgctgtagagaccaggcctccggaacttatctttatacggtcaattactttggaagcctgattcaacaacaagacccagcattcctctgtaggcaaatcacacatcaacggataaaaatattgataaacatcacgggagctgagaatgaccttacgttcttttccttcttcctcctttcggcgctttcccaattcggaagccgccaaaatggtgatagctttggcaggacctattcctttatagtgacacagttcatctacggtagttttgcccaattcattcaaactattatgataatcactcaacactttacgcattaactccacagcagaatcctccgtatttcccgaacctatcagaatagcaagcaactcagcatccgaaagtgtccccactccatgcaacatcatcttttcacgaggacgatcttcttccgcccattggtttatggttagtttttctgccatctttctttatttttccccgccataaagacgcataaaaagtccatcacttttaacacctcttcatggtaaaattctatttataaaaattcttctcaaatgcggcaaattcgtttttccccaacacacagcgtttccaccaggcccgcaggaaaccagttccatagccaatcaactgaataaaagaagcaaggatggataataatcctattttgaaacttttatttcgcaatgtggagtctacacaaatgataagagcaaaaagcagcagcaaagacaaactccagctacaaaccaacgaacataacaacaggaatacaattcctatagtaaaaagtgccggtaacaaatgtacaactttcaatgattcaggatactttttatacagattgatacgggcaatacccgaattatgcacttgcttgaaaaacttcttcaaatcggtacgacgcttgtgccacacccatgcttcagggaacaaccgacaagcatatcccccttgaaagatacggatactgaaatcaatatcttctccaaaacgcatcttagaaaatcctcccaacgctttatatacctcagcccgtacccccatattaaaactacggggatagaatttatccatttttttcttccctccacggatacctccggtagtaaaaaacgaagtcatggcataatttattgctttctgtatattggtaaacgaatcatgagcacggtcaggaccaccaaaagcatctgccttctgccgttgaagctctgactcgacagccgccaaatacccttcaggcaaaatgcaatcagaatccaatatgataagatattctccatgcccccgttccgctccataattgcgggtctgcccgggaccggaattggatttgaaataataacatatatccaaccggtcagcgtaattatctaccacttccttgcacggaacagatgaaccatcctccactatcaggacttcaaaattcttatttgtctgccttgtaagactgttcaataactcatccacctcttcaggacgattataaaccggtataataaaagaatatctcattgctttattttgattttatccatcacagagaagtacaaagaaacataaaaaaggcggagcttgcaacaagttccgcctttttatatgcatatataaatagattatgctttcacacggcctacatatgagccgtcacgagtatcaatttcaattgtttcaccttcattaatgaataaaggaacacgcacggtagcacccgattccactgtagcaggtttcaacgtattggtagccgtatcccctttcagacccggttcggtataagtaattttcatctgcacttttaccggaacatcagcaaacaatactgtttctgtagaagcatcagaaaccacatccaccaccattccttccaacaggaagtctactccgttaatcaagtcatgagcaataggaatttggtcgaatgtttcctgattcataaaaatatagtctgcaccttccatatacaaatattggtgtggacgacgttccacacgtacatcttccaatttttcaccgatgttgaaacgacgttccaaaacgtaaccattaaccacatctttcaatttagtacgcatgaatgtgttaccttttcccggttttacatgcaggaagtcaatacagaaatacaatttgccgtccatacggatagctgttccgattttaatgtcttgagcattaatcatacttttcttcgcttatatttgattattatttcagattatattcacttatagctgtgatttcgagtgcaaaagtaatgtaaatcaagaaaaaacgcaaaaagaaatcactaaaaatgagttatctctttgtttatttcaaaaaagtcactaattttgcagcccgttactcatggtgaataataacataaaataagtatatacaatgaaaagaacgttccaaccctctaacagaaagagaaaaaacaaacatggattccgtgaaagaatggcaactgctaacggtcgtcgcgtattagccagccgtcgtgcaaaaggtcgtaagaaattaactgtatctgatgaatacaacggaaaataattcatctgaccggaaaaaataaaaggagtgaagtcgtagagactttgctccttttatttttccaactaagccgaacagccatgaaaaagtaacttaacttaaatgatcaaataagtcaactgaaacgatcaggtaagttgacttgcttgttccatacagtcggtttactgaaaacagtctatttatttctcctttctctcgcccactccatcacattagccggagcgcgttccgccagatattccttcttcataaaatccatatagggtgctacgtggtcaaaaaattgataatatcccttacacaagtaattcaatcccggttcaccgtctttacttaacatgaaacgattcttcggacattccccatgacaggcaaactcataagaacagttcaagcactgctgtggcagactattgtgcttcatcgcaccaaaagtttcctgttctttactatacatcatctccaccaaagtcttctgacaaatatttcccaatttatactcaggaaagacaaaatgatcgcaagcatacacatcaccgttgaattccatcacggctgcatgtccacaatatttagctaatgaacaaacgcctggctgctgtcccacccaattggccagcgtagaatcaaacaactgaatatagtaattgcccacgtcattcagtacccattcgtcgaaaatagtacaaaggaaattcccccactgctcgggagtaatggagaaaggagccagttcaccgtctttttgctttaatgaagaaagccgaagaccgtccgcacggctagacagtcgctcgacaatgggagtaaactgtatataatgacaatcaagttcgtcacgaaagaaacgatagaagtccaacggataatctgcattatagtcattgaccactgccatggcattccattccactccatgctttttcaacaggttaatccctttcattaccttatagaaagaaggttgtcccatcttgttcttccggtattcatcgtgaaattcctgaggaccgtctatagaaatgcctaccaaaaaattattctcacggaagaattcacaccattcatctgtcagcaatgtgccatttgtctgaatgcaattatcaatggttctaccacctgcatattttttctgaagttccaaggctttcttataaaaaactaaaggacgcatcaaagtttctcccccatgccaggtaaacaaaacttgcggcatggtttgcgactgaatatattctttaataaatttctccagtaattcatcgctcatcacatgacgcggctgttcctcatataacttggatttttccaaatagtaacaataatcacaggccagattacaaaccgcacctacaggtttggtcattatatatagcggctttgcaaaaggagttatggttgcttctttcatttgtttttcatttaattcctagtataaagaatacaaagataaagctatttttcaatattcgttcttacagtaacaggtttatgctaccctctacccccaaaaggacattcttcttgccacccaatctgtttcaaatataagagttccaccttgcttcaaactcttgaaacaaaatgaaactctgaccctctatttaaaatatcacttgaaaacgtgtctgaaacgcacttaatgactgattttcaaatcccactctatccgttatcttagtataagagtaccggaatctccatatcatatacttattgatataataattgacagtaaaagagacatcgttcaaacgcccgccataaatatgggaccgggtatccgacatatcagtatagttatatccgaatacgcattccaacgaaccagagtccggagtggcaataccacaatccgtatgtgaatatctataattaccacctatcagcaaacctctcagtattccatacataccactcgctttataattcttaaaatccttttcccggttcacttgaagataataatattgtgcttccaatgccacaggaccatatcctgctatcatctccggtgtaaattttatcaagttctttgcatccggaatcaaggcattcacagctctgacttttgcaatacgcgtcgggaaattagcccccaagtcaaagctagtatggttaagtgtaggttcgctattgtatctaggtgtttcgtaagcaccggaaatacccaactgaaacaatctccctgtatcatgtaaaggacgatagaccaggcggctcatagcaccataacccattttacccaattcattggatttcttcttaagagcctcgctctccacatgaacactagctgtaccgaaaaaatcatttttgtcatacacaaacatagcccccatcagccggctgttgaaaaaagcctcattacttgccggctcctccatggttactttcatagacgaactagtagaactttgaagcccgaactgatgtacaaaattccctacacgtaataacgcatgtgaggaaaattgtctttctacaaatatgtcttttaaactgacctttccatacgcatagcctatatccactttcgctttatattttccataggttgcttttacacctatccgggcatcaggaatcgctacaccatctacaaagtttttattatctgaatgaaacaagcctccatccatcaagattcgtcctgtaggacgtattttcaaaactgattgttcctgtgcatttacctgtacggagagcaatatcaggagaaaaactcctaatgatataagatttttcataatatacagttttaatggtaaccatccaagtatcctgtcagtctgtctctgatttttatcatactgagggcagtgaagaatctgtaagaccacacaatgaaagcaatcagtcagactcctcctcccatcagcatccgatcaatagtcatgcttttaggctcagcaaatactcttgtccggttcatctaagaaaaacattacattaaatagttacggtttatggttaagttatagggaattattttttggaaacagactgaatgagtcctgctttttgcagcttggagaactcatctttcgccttattaagctgtttcacaaaagcatcgttggcatggagacgggcaacaacagcactcgccacaattcgggcagcatctacatcactttggaaatgatacccacaaataacacgactctgtcccatttcaaatcctcttttcagaatctcattctgcctgtcaggattgatttctgccaaaacaagggcagtagcccatcctatggctgtatgtcccgaaggataggaaccgttcgttgaaagttcttcctgctgttcgggattacaagtcatttcattgaaaaaactaaaaggacgtacacgcatataatactctttagcatgacgggtagccaaatctccggcatcctctctcatattaataatgagcctatacagttccggcgttttatccctcgttatttcaataccaaaagcctccgaaaaggcaaagggaacgccatcaccatttacacgggcatcactgacagcttgttcacccctaggagtatccctttgcaatttcccccagtcgtaacgggctttgtcatacaagaacaaaatacttcctgcttcaggaggaggaggcagtaactccagactattggcaacctccgattcttccaaataataaagttcgggattggttcttctatcctttatttttttctcttgtgcaaagatgtttaatgaaatggcacaaaacactagaagtaaggcaaactttgttttcatgataaaagtttagtttaaacggttaattaataaaattcaattggtttttcgaaaaacattttaatcatctacggaacgtacgacaaacaatcagagtgtccgcatctgacggaaacaaaagtagtgtttgaaattatcccgaaaatacctttttaatcccgtttcctccttttatatgaccaaaacatcctagaagagaaaaggagaaaaaaaggagagccggaagtgtttcagcacttccggcaaaaaagccattcctcataacaaaacagatacacgaagccggctctacgaaatacaataaattgagataactctaaagatgaacttattttcttcttgaattgatacggtcataaagcagattgatgactttacaatcaaactccccatcaggataaagttgttctatttctttccttacattatacttatgtcttgttaccgttgcctgatccacatccagcactcttgaaataatagcagcatcaatatcttctatcatcagaagtatcgttataaaatacctttcttttccccttcgtttcataaaggataatttacccaattcagaatatttgtcagcaaaatccaaacacacctgtttcagttcttgacgcatatcatcctctccctctgtttttctgtatcccaaggcatcaaacagggtcttgacttttttgtcaaccttatgaacgtccatttccagttcctcccaattcatcccgacatcatccggatttatcccttttttatccatcagcgctttccgagttccttttttccgtcttttcaaaaggaaaagagcaagaaaagccgatagcagcaccgctattgacaggatgatatacagcgcataggacatctcttctttttctatcgagataggaagcaagcctgatttaccatcaaaaaggaataatcctgacttacatcccaaaaccgctttccgtccattgacggcaatacaagacttgctaaaagccaaatcgcagaataatggttctgggacaccggcatcatccaatcccttaaaactcataccataataatagagtatgaaaaagccctcattaggattcttttcaagagctcccgatattgatttcacatgtttcactggcaacaaggtcgcattttcttcattaacgattcccaacgaggtattcaaatatttatttctaccattcattatcacaccataaacactctcataccctgataaatcacgtatctgccagaaagattcctgcggcctgtttaaaggtcttccatacaatcctttgttcaaggtcgttacataaatactatcctcattctcacaaattccggtaatataagcgtcgatagtatctttcacccctttatctgacacaaccggaataggagttacaatatggtcctgctgttcatctataatacctaaatattccctagtacccacataaagacaatgttccgcggtggaataataaagagaagtgatattattctgccctttcgtgttactgaactgcaaaagacactccgctctattgcctttaatcttataaagtttcttacgcgtagcaagaaagaaagtattaggactggtttccaaaaattttataatatcattacccacaatatccaagccttcaatctttcctaaagactttgatttgaattccggatgattatagacaaacttatacagatgtaaacgaagatcatcggtaataaagaaaatggagtctcccgtccttttatcactaaccgccaatacattattgtctaaatctgccgagttctgtcgcaaggcaaaagaaagcatagcctctctgcatgccagatgcagaaaatctttccccataaagcctatctgcctggcgatagtactgataccattcggcaaatcatattctaaagtgcaaccgtctttgacataaagtatagaattagcactgataaaccattcatccttgtcgggtccttgagcatacaagtagcaccgtcctttgcgtacaagcgtcttttttccatcgggagatatcttaaaaaccgaattttccaacaaagcatatactgtatcattataaacactgacattggtaaccagagaatctataacaggtcgtttaaagtccttttcaagattacggacaacaaacaacccctgttcactagccacatatagttttttttcctttatcacaaccttattcaccccacagtttttactacatttccctagttgaatgggagtgagttcatgagatgtggaaccatctttcaaattcaatctaaacagtccattactagtccccacatacaaatactgtttgtcatcatccaaagccatactatataccgaataattcatcctcttattttttatgtagtaagtctgggtctgccgagaggatttagccaatagtttcaaaccggcatctcttgttcccacaaacagagaatcttcactatattccaatatatcatatatacgccggttgctattaatggaataggtctggcaattattgttcactttttctatgatacaaccgtcttcctgaccaatataaagtttatccgcatctgctgtcgaacggctgatacatgatataggagcgtcaaatgtattgatattgcaagtgagctttataggtttcggaacaagtgcatccttgcagcctgtcaaacagaacaaggctaatataaaaagaaagtacaagctttttttcatattttactcatttaagtgatatcgattaaacaaaggctttctacaattaatcaaaaagttgaatatctgttatgcttatgcaaatataatacgttttctcaaaatccggaaagctcttaacagattattagctaattccttaatatgccttccatatacaaaagaagttacgtcaaaacccagatgattctctcacccgacttttgacataacttctcctaaaataaaaaaatatattaacctgatttatttcaacaatactcctatctcaccgacagcagttactgctttgttatttatttcggtaacaggctccagtttaaaataacgggccggataagtctttccgaaacgtacaaaataaggaacaggattatgcatgatattactgaactcacctgtagcgtcacacttcatccaatccttaccatcccggctgacataaaagttgtatttatagatagtgccagtcagatcctcctcctgtgcaggagcataactgaaaccggctatttccacttctttacccatatcaaccaccaagggagttaaagtttcggttttccaaacagtttcctgttttccatcgatggctgcggctgcatccatgcccactgttttccaaccatccaccgggacatcactcaaggttactttcatcattttatcaaccaatggttcagcataatacaagcctatgttactgatattgacggttccacgagcacccgtaattgtcactctaaccttttcggcatgactatccgagaaaggcaacaaccgtttatatcccaccgtagttccctcacccacatgatgccatgcgccattggcgaacacttctactgtaaaaccttccacacgctggccttttgtaatatcctcctgaattaagaaagtattaacaagtgtattcttcctcaccttatattctttcgtatctcctactttggctgtccatatcctatttcccttctcaactttattatcggcaaaggtcttttttatatattccgtcaactccttgatacgtttcacatcattctcgtgcatcaaaccacgtttatcgggtggaatattcagcaacaaaacagagttacaacccacagaacgataataaatattcaccaagttgacaagtgaacgaacttgattatcctgttcggcatgatagaaccatcccggacggatagaaacatcgacttcagaaggataccagaacaaatccgatgctttagataccaattcacggcttcccaaatccttggacatagcatttatgcccaatctcttatagacttcatcagaacccggataagaattaggcatcaaagccgttgcactccattccgtggtacgtcccaatccaccttcattacctacccaacgcacatcatcgcccatgatagcggtaactgccttaggttgaagacgacggatagtcttcaaaatagcgtcccaatcatattcctgcttctttccgttaggtccttcgccgttagctccatcaaaccatacctcatgcacttctccgtaattggtaagcagttcagtcagctgttcgatgaaaaacttattataagcttctccttgtccgtaacattccgcattacgatcccaaggagaaagatagactccgaatttcaatccatacttgtcacaagctttgcggagttcctgtaccacatccccttttccgtttttccatggagaagaagcaacagaatgcttggttgtccgggtaggccacaaacagaaaccatcatgatgcttggcagtaatgatagccattttgaagccaccttccttcagagctcttacccattgttcacaatccaattcggtaggattgaaaatggccggatcttctttaccatctccccattcacggcctgtaaaggtattaataccaaaatgaaggaaacaagtgaattccatttgttgccatgccaactgttgcggtgtaggcaccaaacgggaagccatatctatcttctgttccgtagtcgctcctgccggaaaagctacgtgtttctcataatactcctgtgcctgagttcccagaaaagcacaaagtaaggctgcggttagaatcgtttttctcatttttctttattactaggttattttaatggacgaatcataaactcaaacgtatgcttctccaccggaacacgatatggcggcaatacccccggaccacaagtcgcagtacctacccctgactgttccgcatctaagtgaacatttataatccctgttctctcaagtttattaatatgagtagctttatctacattagaatccgtaaatggaataacactgaactgaaacactttatccgaacggaaagacaaaccttctcctgcctcatccgccaattccatccaacgcacatccgtacggtttcctgtagcctggggcttcacataataatggaacatacgttctgcatctgtatggtaaattccaatacatccagactgattacggtctatataagtttcatgttcaccacgtcccaaataagaaaccttgttataggcatacggcatttcaaatgccaggcccactctagccaatgaagtaacagcagaagtatccggcaggaaagttgtctttacttttaatgcaccattgctctgcaaagtatatacaaaggtagccattcccaactttacgcctttagcattccataattctacttccgctttaccacctgtttcagatgctttgacaaaagtagctttttgaatcatattatccaaaccttctttcctccaaactttggctcctcctgttttttccctgctgtcattgtccgtaacaggacgataaaggctgagaactacaggagatgaaagcatctctttacctttatatatataagagcgtaaagcgccggttgcaggatcaatatctatcttcaccttatcagccaatttgatttccggcgcacgataccctttgttggcagacagcacaaactggtcataggccacttcgtcatgagttccaataaagggagttgccttatcaggcgtccaagacagattcaaataagcctcacgaatcgtagaaggcaactttacagcacccaaagagaatgttacaacctcatgaggggcacagtctgcttttcgagttccttctgctatcactttcccatcatcccccatgacctgccagtgcaacgtataggcattcaaattggtaaagtcataccagttcttgacttccactgtcagcttcttaggatcggtcagtgccgatttgatatattgatactctttcttcacttcaatgagatgcggatgcggttcgcgggctgcattgaccaacccgttacaacagaaattgccaaagctgggcacatccttcggaccataatccccaccataactccaataccatttaccatccttatctatctcgcggaaagattgatccacccaatcccagatacaacctccctgaacaatcggttcggtttcgaatacatgcatatattcctttaatcctccgccactattacccatagtatgcagatactctgtcatgatgaaaggacgatagactttaggttctgtctggcgggcataggccatgagttcttccacgctgcgatacatacggcaatagatatcggtattataattctgttcggcccgttcatattgtacaggacgacttttctccactgacttcatccagtcatatgtacgttcgaagttaataccgtttccggcttcattccccaatgaccagatgacgatagccggatgattcttggaacgctcatacatacgttgggtacgatccatgtgggcaggcaaccaagtggaatctttggccaatgaagcaggtccataccccatgccatgtgattcaatattagcttcatctatcatataaagtccataacgatcacaaagctgataccaataaggatgggtaggatagtgcgaattgcggaccgtattgatattatgctgtttcatcaatttgatatctttttccatcagttccttgcttacagtccgtcctaattgggaatgttcatgacggttcgttccctttaccaagaccggcacaccattgatgcaaaaacgtccgtccttaatttccgaagtgcggaaacctacttcacatccggtaagttccgttactttacctgttacatctttcaattccaggatcagcgtataaagattcggatgctcagcactccagacttccacatccggcaaactttgttcatccaacttcaagaaatggctcaatcccttcgatttgataggatattcaccttgcagaaccgccttaccggttttatcttccagtcggtaagcaaaggtagtcatggaagtagaaggtccttcaatggtagcttccaaaccgaaaataccttctttatattgttgtttgtctagagaagaggttactttgtaatcggctatatactgtttaggagtgctgtaaagatacacatcacgttcaataccactcaaccgccacatatcctggcactccaaatacgaaccggcactccaacggtaaacctccaatgccaccgtattctcacctttcttcaatttatcagtgatatcccattcggccggtgtctttgaaccttgattatagcccaacagatgtccgttcacccaaatatagtaaaaagaaatcactccttcacaacagataaccacacggcggtcttcccaatcggcaggaattgtaaaggtacgtctgtaggaaccgacttcattctctttatatggaactaaaggcggattctttttaaaatggaacagtttgtcatcgaactcataggtttcgtttacataaatagctgttccatatccttgacgttcccaattgccgggaacctgaatatccgcccatcctcctgtataaaactccggtttataaaaatccttcggacggttatcgggattctttacccaatggaatttccaactaccgttcagactcatgtaataaggagaagattcataatctccgttacggatatcagatacggtttgataaggccacacataagtatgaggggccagtttgttcagtccgacagcatattggctctgccattcgggttgttgttgcgccattattggaaatataaccagagcagccaaaaaatataataatgtatttctcatatatctatttattctatcattacctcatcaaaataaatccttgcctcttgtccggggcgtacatgggttgcaggacactctccggctcctttagcaataatccgcacataacggccaatttccttattcaaatcaagtaccacatcctctttgaaagtcccttcacggaaaatctctccatccgtgaactgtttaccggatactttacgataatcccgattatcatttgaaacccacacttcaatatctgccggtttatgggctgccatgccataattcgttatgcatcccactgatacagaacgaagcgactccttcttttgcaaatctatagtaaaagcgacagaatcactgctttcccatgaatgccattcgaaatccgactggcgcaagctgccacgtataccatttactaaaatcttcccggcctgtgtatttcctaaaacaggtttggcggtagccttattccagaccaaaggcaatgtcaatgtttttcccatctgccgacctgctctataagtcgtacactttatagtttgtgtaccggtcaccatcaacgggctcttatatagcagagaccggtctgtcggctccttaccatccattgtgtaacggatttccacatcaggacgttcacattccagtttcacctgtagctttccatttacaggggttaccgtatgttgtatattatacatggaacaggcaaacacaatccctttagcagacagatgctcgttgaatttatccattgccaccaaaaaacttctccaatttttatgccaaggctgtgtccaagccacttcggctaaagcagccagacgagggaacagctgatattccacatcttccggtttattgcaaaactcagtccacatagaagcctgtactcccatcagcaaggaacgtacctccggactccattctttctgtatcggttcatacctatatacatccttcaatgtattattcccaaaataggtcaaaggttcaaaccattgcggtccctgataacgaatcaaatacatgatacgtgcaggagtcatgacaaacctatgcccttgctccgctgccttgacggcagcctgaccgtagcctctccaaccataaataattgctccgtcgggaatccgggtattggtcagttcatcccagcccatggcttctttccctttgctttgtacatatttactcattctcgccataaaataaccttgcaacgcttcttcgtcctccaagccttcctgtcgcatacgctcctgacaaagcggacactccttccaatgcgttttccgagcctcatccccacccaaatgaatatacctggagggaaacagctccaccacctcgtcaatcaccccttgcaagaaagtgaatacactatcgtttcctgcacagaagatcacatccgcatgatttcctcccaatcctggaaggacaccgataaatttatcgaccacaggacaagccaacaacggataagaagccaacgcagcattactatgagccggcatttcaatttcaggaatcacttcaacctgatgtcgggcggcatacgccactatctcacggatatcctcctgtgtgtaaaatcctttttctacagtcgattcaccctgccggggattacgacgctccggaaaagattttccaggacgatctacacgccgtgaaccgatttccgtaagtaaaggatatctctttatttcaatacgccaaccattatcatccaccaaatgcagatgcagggtattgattttcaacattcccatacaatcgataatacgaagcagattctctttcggaataaaaaagcgggccacatccaccatcaatccacgatatccgaaacgaggttcatccttgattgtcatagccggcacgctccaatccgcagtttccgccaccgctgtgccctcaatggaagcaggcaataactgacgaatagtctgcaaggcataaaaaaaaccttttgtatctgaagctttaactattatctgcctgggagttatttccagatgatacgcctcactctttaatgcgtcatcggtgaggaaactgattttccccttcttttctccaaccttcacacaaggagtaaatccggccgcctgggtaaaaagagcagagaaacagcgtgcaacctctgcctgcccctcattttctaccgtaaagtctgtttttccggagaaagtaaaataacctgtacccggagtaatactctccgggcagggaacaatagatatagattggattaggttgtcagcaggtaaggccatagtcgcaaataacgaccatagcaaaatcaaacaggtgtatttcatgatatatgctatttttcttattctttgtctctatcgggtgaaaagcgtaccggatccttatactgctcctgcaatcttgccaattcagtcttcagctccgtcacaaccggttcatattctttctgaccataaagattatgcatttccgtagggtctgcctgtaaatcatacaattcccacacatcaatatcgttataaaaatgaattaatttataacgctctgtacgtacaccataatgacgtttcaccatatgttctgccggatattcataaaaatgataatacaatgatttgcgccaatcagcaggtttttctcctttcaacagtggaagcaacgaaacaccttggatatcttcgggaacaggagcacctgccaattccagaaaggtaggtgcataatctatgttttgcaccagttctgtaatatcacctttcctgtcaaaacctttgggcaaccgcattataagcggagtatgcatggattcttcgtacataaagcgtttgtcaaaccaaccatgttctcccatatagaagccttggtctgaagtataaaccaccaaggtattgtccagcatattcttttctttcagataatccagtacacgacctacattatcatccaacgatttcactgttttcatatagtcacgcatatagcgctggaacttccaatcggccaattctttaccctgaggattctttttatagaagtcatcgataatgggaccataaaacttatcccatgccgcacgctgcccctcatccatacgtccgatataattttcataaagagccttcaaacgggtttgtttatcggggcgaagcatcttaaggtcataaatcatatccatatccttcacgatgctcatttcctgagccgctgccgcaggacgtccttcataatcatcaaagaaattatcgggcaacggaaaagttttatcttcatacaaagacaagttacaagtatctgccagccagttgcgatgaatagccttgtgatgaatcaaaatacaaaaaggtttgtctttatcccgtttgttctccatccagtctatggcatcatcagtaatgatattggttatatacccatgtttttgaatggtgtcattgtcttgcgtaataaaatccggattatagtaatcaccttgtccgggtacaatctcccaataattgaaacctgtgggcagactctctaagtgccattttccgataagggcggtctggtatccggcctgttgcagcagcttcggaaaagtctgttgcgaaccatcaaatatacaagtggtattatcatagaatttattagcacaactatgcttgccggtaatcatgcaggcacggctgggaccacttaatgaattggccacaaaactgttagtaaaacgcactccgtcattagcaatgcggtcaaggttaggcgtttccatataacgcttgtcatagcagctcatcatctgggcagtatggtcatcggtcattatatacacgatgttgtaaggtttctgctcctcagttttcttttgtgaagcgcatgatgacaaagatgccacagcagtgatgccggtcaaagaaaaaagtaatcctgattgtaggttgttcatattcataaatttaaataagcaaagaattaacatccgcaaagatacaagttatgttattgtttcttgtctggaaatgactattttatatccgagaatgtccagaaacaggttacagacaagaaaaaaacggatgcaaagcgcaggtgcgccctgcatccggaaaaatccaataaagacctattgaataaagcgttctatcatgttttcttaattagtataaccataattattatcactataatcaagagcagaattggtatctatctcatctttcggaaccgggagcaataaatttttcttcaggaagttttcatcattcaaatttccatcattaaaaatacgttctccccagttcccgttccctttaggattattggccactgattcttgaataattccatgcccattgttgacctcgaaagcttttttcaaaagctctgtgccacgtaaacgcattttctgatacatttccggttcaccggcaccttcgaaaatacgttcaaaataaattttctcacgcacttgttccttagacaagccactcttccagtcagccggctgagacgcgtttcctgattgacgcgctctcttcagcacctcattggccaatgttatcgccttgtcagtctgccccaattcattatatacatccgctgccatcagcaacatatctgcataacgatacaaaattaaattcttatgactgttattaccactctgctcaggatcccacggtttcttgaaatagggccatgactttgtattggtagatggcttttttgtcgcattttccaacaaagacaacaagcctttcaaataccctttttcagcgggagtcgcagtagccgtatcggcaatcatagcataaagttcttcagctttcggactagccggatcagctaatttctcgtaaggaatccgtcctacatacaacttgggtttcttccatccggcaggtttttcttctccttcaatggtatatgtaaaataaggataggcatatacagtatcgcgcgccgaagctataggctcctctttaggtttctcaccttttcctactccggcataagacttccaataagtcaggaatgtgctttcaatacgtggatcaccgggataagtagccaaaaaataatcatacaaagcttttgaagcacgtatgcggtcccaagcctgcccattacaagagccattaggagcgaccagccagctaccccggttacgggtggtagaacctgcaagtgcaaaattcaattgaaaaatagattccggagagccttgtacgtaatcaacaaacaaatcactgaatttatccgccagccggtatttaggcattacctcatcaaaacacgctttcgccttctcccaagccgtattatcaccctgacagcccaaagtatgatagagctttcctaaatacgctttcgccgcccacttcgttgcaaaaccgtcatcatctttttccggtaaattctcataagcgaactcccagtcagtacgtaccaattcaaagacctcatttttaggagaacgaggaacagctactccgtcatgagcagagggagtggtctttaaaggtacatctccataggtaactgccaaattataataagccaatgcacgcaaaaaacgagcagccgcttccattggcaatttatcagccgattctaacggactatcggcaatattggcaatgaatgcatttgtttcaccaatcactttatacatccctctccacgccattgtgtttatggtttcatcaattcctccgtccatagagaccaataaatctgtagaactgccattcgtttgtgaccatccaaaaccacaatatccaaatgttacttcctgccatgcctggccataagcattatcagccgacatatatccgtaacatcccatcaaagcctgtctggcattttccacagtactaaactgagtttttgtatttatcgtatattgcgggtcttcatccagccacgattcacaggatgccaatgacaaagcacctgctaataaaaatatatattttagttttttcattttacaaaaaaaattatcggttaaactatttaaaaggtcacatttaatccaaagacataagaacgttggcttggaaatgcattcatatcaatgcccgggcgtaatccatcaaaagcaaacgaattgatttccggatcgtatccactgtaattagtgatgacaaatgcatttttaaccgaagcaaatacacctatattctgaaagccgattttcttcatccaagattttggcaatgtataattcaaagtgatatccgaacaacgcaagtaacttccatcctcaatataacggtcataaaccacgttctttacattcgccgtagccgacggataaagatttgaatgattctcttccgtccagatattccggaatgcttcttgtgtcaaattaccagcttgccgagagggcgtataataacggatattcgtattcaatatctgattaccatgcacaccattaaaagaagccgaaacagacaggtctttccaggcaatacgagtttggaaaccataagtaaagtccggattcggattgcctaaaatggttttatccttttcatccacaacaccatcctcattcatatccaccgcttttatattaccggctcccaagtcattggccacagaactggaataatatttggttgatccgtcagcagccgtataagcaacttttccatctacaatatcttccggctgaataataccttgagtcttatatccgaagaacaatcccggtgcctcacctgcaatgaaaagattagcaataccaaaatgatctcctatagaagttccctgatatccacgcacattcttcaaggttccaaaatctgtcggtgcaaaacccaggtcaccaatttttgatttattgaaaccaatgtttccgcccaaactccaactccaaccattcaagttacggagaatatctccattcaaactaatttcaacacctttgtttttcaacgaaccttgattcaacatcacacttgcaaaaccactggaagcaggcaatgaacgcgaaataagcaaatcattggtttttttctgatatacatctactgatcctgacagacggctgttgaaaaaagcaaaatcaagacccacattccaagaagatgtacgttcccacttcaatccgtcattctgcaaattgcttaccgccattgccaaaatctgatcccctgtggcttttgcataatctattatttgtgaataatcagagaaagtagcataaggattaatgccctgattgcctgtaacaccaaaacctaaacgtattttcatttgattcaaccagttaatattcttcataaactcttcctgctccatacgccaggccaaagagaaggaagggaagtaagaccatcggttaccctttttgaatttacttgatccgtccgcacgtacagatgcagtaagcaaatatttatcataagcagaaagattgatacgacctagataagacagtaactgataatccttttgggtaggttgttcatgagtcttcacagaagcaaggtgtaacccttttgtacgtaagtcaaaattagagaaacgagtacccttcacattcttattcaagaatgtatgtccgtcataagttacaccagcagtcgctcccagatgaatacctttcgccaagtcaatatttaaattcaataagttctctatattataattggtcttgttcaaattagccatggctagcacaccttgatcattagcaccgatagtgagctgcatgccataccaacgagcacgttcgtttatattcacatttcctccggcacgaagattatacgaaaggtatttgcaaatattccatttcaaatccagactaccgccaaagcttttatcatccgttatatcatcatagtcatcccgccagctataaacagtagtttttgcgtccatgtccgtttgtaatgtcgggtcgtctgccggaatttcataaggagctgtatccaatactgtacgtgccaatgaaccggcaataccacctgtcgtattacccccggtcatcatatcattttgtttgatagatccattcaaagcaagcgccatagtaacggactttgaaaggttagccgtaaggtttgcacgcaaatcaccttgtttaatacctgtattgctcacaataccttttatatccttaaaaccacccgaaacataataagtcattgcatccgatcctccgctgaccgatacagaatagacttgagagaaagcagatgaataagcttctttctgccagttcttataactcaagacacgatagtattcagggttggtaggatcttttttatatttatccaagttttcaccatacacataatgcatctcgccatttgcttgcggatagtacttttcctcgccggcattagccttcatattggcataagcagcatactgttccagattcaacatattatgcaggttacgggcatccgcaatggtaaagtttgcagtcacgtttactttagccttacctgctttcccttttttagtcgtaatgataataacaccattcgcaccgcgggaaccataaattgccgtagccgaggcatcttttaatacagtgatatcttcaatatccgcaggattcaaagcacttaaaggatcctgcgcaatctggaaatcaccgccacccatagccgactctgcaaattccccggtggaagattgcggaacattatcaataacatacagaggctggttatctccacgcaatgagttagcgccacgaattgtcacagaactggcagctcccggagcagccatagatgaagttacattcagccccgccaccttaccttgcaacagattattaaaagaagctgttttagaagcatcgttagcatccggacgcaagctggcggtagcaccggtcaaatcactctttcttgccgtaccataagccactaccaccacttcatccaatgtctgggtatcatctttcaactgaacattcaatactttttttccaccgaccggcacttgctgggtcacatagccaataaaagaaaacactaatgtagatttggagtcaggaacatcaatagaataattgccatcaaaatctgtaatggttcccgtggctgtacctttcacttgtacattcacaccgggcatcccctcgttcgtactgtcagtaactttacctgttacttttatctgctgggcaaacacatctggaattgctgccacacagaagacacacactagaaaaacgttaaagaggttcttcttcatagaattaaatttaaattagtaatttatgatagttaacattattttaatctgtggcaaatgtagaggaaaacagaagtataaggggtacaataatcactatttttaagtccaaaattagctaaaaaggtccatttcaccgagaaatagtcaattttagaggagtaataaacaaagtcggaaacccggccattgtttttttaaggacaatgacaaccaacccaaatataaaaacaagtatctttgtatctccaaatatgtttttatccattaatcaatatattatgaaactaaaattttctattttaacgatcctgctgttcttcttatcagcatcttttcccttggccgcccaaaaggctccccaaccatttgatattgacaccccttcactccgcgtcttccttccggctcccgaactggcgacaggccgtgccatagtagcctgtccgggtggcggatatggcggactggctgtcaaccacgaaggctatgactgggcaccttacttcaacaaacaaggcatcgcactgattgtactgaaatatcggatgcctcatggtgaccgcactctccccatctcggacgccgaagctgccatgaaaatggcacgcgacagtgccgatgtatggaatctgaatccatatgatataggtataatgggctcctctgccggaggacatctagcttcaaccatcgccacacatgcccgccccgaactccgccctaactttcaaatcctgttctatcctgtcatcaccatggataaatcctatactcacataggatctcacgataatcttttaggtaaggacgcttccgccgaactggaaaccgaattttccaatgaaaaacaagtaaccaaagaaactccccgtgcctttatcgcctacagtgacgatgacaagacagttcctcctgccaatggggtaaattattacctggggctgcacaagaatcatgtaccagccgtactccatatttatgccagtggcggacatggctggggtatccgcgaaaacttcatttacaagaatgagatgttaaacgatttatccgcctggttgcgcagtttcaaagctccccgtaaagatgctgtccgggtagcctgtgtaggcaacagcattacttacggagcaagaatcaaaaaccggagccacgacagctatccctccgttctaggccgtttgctaggagataaatactgggtgaaaaactttggagtcagcgcacgtaccatgctgaataaaggtgatcgcccttatatgaaagaacaagcttatcaacaagcattggcgttcaaccccaatatcgttgttatcaaactgggaaccaatgacagcaagtcattcaactgggtacataaagcagatttcataaaagatacacaaaccatgattgacgcctttaaagcccttccctcacaacctgaaatctatctatgctatccttcaaaggcatatcttaccggagaaagcattaatgatgatatcatctcaaaagagattatacctatgattaagaaggttgccaagaaaaacaaactgcctgtcattgaccttcacagcgcaatggatggaatgccggaattattccccgaccatatccatcccaatgaagaaggagcgaaagtgatggcaaaagctgtttacgatgctatagcaaaataaaaggaaacgaaggagcagacaggaattaatcagcccaaaaaagactttttatcggttgtacgcattattcatacgtcattttgttgtgttattcaagacaatcaactatttttgttcccaaaccttgagtaagcaatgaaaacatctgcccacaacatacgaatcctgtctttgctccttctattcactctactgcattctatatcagaagccaaacagtactttttccaacaaatcccctctcaaaacggactttcctccatggtacgctgtatggaagtcagtcaggaaaaaggatatgtctggatagggacacgctcaggaatcggacgattcgacggttacgaacagcgaagatatctgcgcggtaatgtcacacatattttggaagatgaagaacataccatttgggccatcacagaaaagggagtattccgctacaatgaaaaagaagacaagtttacccttgtgcgggataaagacaacaatccggtaatagccagttctctttgcctatgggaggacggagtaatcttcgggggaagaggcagtctatacaaatacaactatgaagaccatattatcaacctgttccatacgttgaagccgaacggcaagtatcatatttccaatctttaccaatgggattcccgcactctcctggccaccaaccgatgggcaaaagctctgtttattgatatcgctacgggcaacacccgtcctgttcccttcaacagtgaacagattatctcactgttgattgataaaaaagggaatgtatgggtagctcattacaatcagggagtaagctgttatgaccgcaatggaaaacaattacagacctatcatacacaaaactctcccctcaaaaccaatgtagtgctatcattagaagagcataacggacaaatatggatgggtacagacggaggaggaatccatattctcaatccgcagaccggcaagatatcgacattgaggtacattccgggagatcgttactccttgcctgccaactctattctttgtctatataacgacaaaagcgacaatatgtgggcaggaagtgtacgtaacggattaatcaatattaaagaggtaggaatgaaaacctatcaagacgtactgccgggacagaattacggactgagtgagaaaacaatcctatccatttatcaggaccatgacaatcaaatatggatcggaacagacggagggggcatcaacctcttcgacccggccaccggaaagtttcatcacatactttctacctgggaagaaaaggtggcttccatcaccggcatggacaaagaccatctgctggtttcgctattcagccaaggcctgtttatctttcataaagaaacccaccgatatcagccgcttgtcattatcaacgacagcattaatgatattttatgccatcggggaaaaacagtcaatgtatatcaaaatactcctgaaaccattttgatgttatccgaaacaccttataaataccatattggtaaaaagcaattcattcccatcaccaagggaaaaggcatcactgatattgtcggtacattgttacccataaacagcacaggagaggattgctatctgcacgatttggaacatatctatcaaatcaactccagcctcaacgaactggaacttatatttacctgtcaaacagacaccgtgttcaattctgtttcacaagacgagaacggattgctatggataggcagtaaccatggtttaagttattataatccgggtacaaagcaatatacccctgtctccaataccctgattaatgaaataagctcgctcatttgtgaccggcaaggacgtgtatggataggaacggaagaaaagttattcgcatatctgattaaagaaaagaagttcatcttattcggtgaaccggacggagtggtacaaaacgaatatctggagaaaccccggttgctctcttcatccggagatgtctatatgggaggtgtaaacggcttgctacatatcaaccggcacttacctgacgaccccgcacttctccccactctccaactggccgacatcctagtgggcggagaacgtgtctacgaccggatatcaaacgaccaccaacttagtgtcaatgaaaaaagcaaaccgatcatcatcaaaatcatcacccgtgataaggatattttccgcaaacccatgtatagatacaccattacaggactgaacggacaaaacatctattcttatttaccggaaataaacttaagcagtctgcctacaggcagttatcacataaaagccgcctgtagtacccgcaacggtgactggacagcagactatgatattcttaccctgacagtactgcctccctggtataaatccggctggttcatcctaagttgcaccctttttatcttcatcagtgtcatcctcactttcatcctgatattgcgcaacaaagaaaccaagctaaagtgggcaatgaaagaacatgaacagcaggtatacgaagaaaaagtgcgctttctcatcaacatcagccatgagctccggactccactgaccttgatacatgcacccttgaaacaactaatggacaaacttaccgccgacaacgaaaattatccgttgatccaaagcatctgtaaacaatctgaacggatgaagaacattctgaatactgttctgaatgttcgcaaaatggaagtaggacaaagcacactccatatccagagcatacaattggatgaatgggcggagcaactgatttccgattttaaaccggaagcctccgtcagaggcatcacgctcgtctatcaacctgagccggagattcaaaccttgtgcttcgacaaagaaaaatgtaccactatcctgaccaacctattaattaacgcattgaaatatactcccgatgagagtacaatcagcatttcaacccgtttgtcggaagacaggacaagagtacgcatatccatttccgaccaaggtccgggactgaaagatgtggataccaacaatctctttgtccgcttttaccaaggcaacaacagtcgtcccggcacaggaatcggattgtcctattctaaaatactggtcgaacaacacggaggcaacattggagcctacgacaacaagaatttcggaagtccgggagctactttctggttcgaacttccattaaataccgaaccgggaaatatcacgctgcacccacaagaatatctgaatacacttttggcacccacgcaagaaacagaaagcattcccgaacaacaggaagaaaataaaacagcccaaagccataccttattaatagtagatgacaacaaagacctgaccgattatctggcaacagccctgaaagaccggtttaagacaatatgggtagcagccgatggagaggaagcattgcgtctttgccgggaaaaacgtcctcatatagttgtaagcgatatccaaatgccccatatgaacggctatgagctatgtaaacaaataaaagaagatttggaaataagccatatcccggttatcctgctcactgcacgtaatgacgaagaaagccaactatatggttataaaaacggagcagacgcctacatcacaaaaccttttgaagtaagtatgctgtatgcaattgtctgtagccaactgcataaccgggaacggatgcgtacccgctatacagacatcggtcctctgccgccacccgaagaaggaaccttcagttcggccgatgaagaatttttaaatcgcctgaatcagataatcacagaacatctggataacgaacagttgggtattccattcatttgcaacaaaataggaatcagcagagcttctttatacaataagctgaaagcattgacagatatgggagccaacgactatataaccaaaatacgtatggagagagctatctggcttattctccatacagaactcagtgtcaatgacatagcagataagacaggattctcgaccgccagatatttcagcactgtattcaaacagcatacaggttgttcccctacccaatacagagagaaaccgcctgtcaacactcaataaccctataaaaccctgttttcattccatgttatgttaatttccgaccatttataataataaatgatatataatatggaataaaagcagagatatagtgcattatccaaatgaaagagtttactttgtccaacaaacaattagagatttattctagttttattctcatcatgtatcttctcagttatccacattgagtatattcattcctgatttagagcttcttgaaatttcgttgttagattattaattttttatattgacagttatgaatatgtatgttggaaaccttagctacaacgttaaggaagtagatttgagagaagttatggaagagtatggaacagtaggctcagtcaagttaatcattgaccgtgatacaagaagatcaaaaggtttcgcctttgtcgaaatgccggaaacttcagaagcttcaaacgctatcaaacagttgaacggcgtagaatatgccggtcgtccaatggtagtaaaagaagccttacccagaaattaatagagtaaacttgatagacaaagaaaaaggattttccatgcaggaaaatcctttttctttgtctatcaagttttaatgaatactgcttacatacaccagctaccactctataaatttaccacgaactctgcgttccgccaacatctgtgtaagaaaacgctggcggtccttggctatgtaacgccgggcaaaaatattaggaacagctacccccaaggctatacagaaaatgataagcgccgagttaataccattggaaaaagcaagtgtcacttctcctaccactccacgcatattgataagcgccagcaacgaacgatacatcaagacaccgggaaccatcggaatgacagaaggaatagtcagcacatgattaggaacatgaaaccaatgaacggctttgacagctatcaaactcacgacaaagcttcccataaacgaaccgatcaccggaccatatcctaattcaaagtttacaaagttacgggtacatactgcaattattccacctacagccaccacccacaacaaacgtctctgcacattaaatatagtggcgaatcccatagccgcaatagcagccgcaacagcatatacccaataagcatcatgcggcaccatgctcagttcactgaacttctggtcgatagtcacatcactcatcaccagcagcctcaaggcaaaagcgataccaaacgccatgcctcctaccatcattaccgtattggctgcacgcgtaatacctaccaacaagtgattgtcaatcatatcgtccacaaaatttatcagcggcacaccggggactatatataaggtacaggccagcaacggatgatacggagtggaagataaacctgaaaaagaaaacgcataagccagacaagtacataaaaatgcagagatcgcaatactcatatatacattgataccgaactcaatgcaacgggcacgggtacggaaccccacaaaagtacaaatagccgtaatcagaaaagcaatccagtcaccaccaaacagcttgcagaaccctccacaggcaaacccggtacagattgccacgacatagggggtataattacgctcctgacgagcaatcttctccagttcttcctcgtatctatccaatgaataatcctgctcaatggcacgccacgaaagtttactgatttttgaaatggcttccatattgatgccatgtttctcgcatttctgaaacttggaaaaagagtgcttctcgtcactcacattgaccatcagcatcgtccaccggatatcaatatgcagtttctcttccggaatgcccagataagcggccacgcgcttcatgtttctttcaatccggttagtgtctgccgcactctccatcagcagcttgccggtacgtaataaaaggtctagtttacggcgcaatagcagcacctcttgttcatttgttgtctcgttcatcttctttttacctcaattttgtttactctgacaggaaacaggttgttttttcggggtgcaaaggtacaaaaagtatatgatattcataactaaatgtaggaacagaaatgaaattgtcgtatctttgacccgaaataattaagttagatatggtaacattcaaagaattcttttcattcaagaataaccgcttcttctggctcaatctgatagcgatggtagtggtcattgtggcagcagcctggggaacccttcaatggctggacagctatacacgccacggcgaagcagtggtagtgcccgatgtaaaaggaatgaatctgcggatcgcagaaaatgaactcgacaagcagtcactaaaatcaatcgtcatagactccagctatgtaaaaggaatagcccccggtgctattctggaacagaatcccgccggtggctccaaggtgaagtcgggcagaaccgtctatctgaccgtcaatgcagacagcgcccccaaggtagccattcccgatgtcatggataatagttctctccgccaggccgaagctaaattacgtgcattaggttttaaaataaccgaacccgaatatatcagcggcgaaaaagactgggtatacagcataaaataccgaggacgcgacttgaaagccggagaaaaggttcctcacgaagccgtactgacactcacggtaggcaacggcaatgaaaccatgcccgaagattctgcattggtaaatgaatccggaactgcgaacgatgacaaaccggtggtagacgaatcctggttttaaacttaacacacagtgatgatgaaagaagaatatgtggatgaactggacgacacactggatgatgtggaaccggtagtggacaaccctgccgaactgtatgaacatttccgtgtagtagtagacaaaggacagtcacaggtgcgcgtggacaaatatttgttcgaacggcttgtcaactcttcgcgcaaccgtattcagaaggctgccgacgccggtcttatcatggcgaacggcaaaccggtgaaaagcagttataaagtaaagccttgcgacgtgctgacggtgatgatggaccgtccacgttatgataatgatatcattcccgaagatattccattggatatagtctatgaggacaacgatttgatggtagtcaacaaaccggccggactggtagtgcatccgggatgcggaaactaccacggcacgctggtcaacgccatagcatggcatctgaaagacaatcccaaatacgaccctaacgatccgcaagtgggattagtccaccgtatagacaaagatacctcaggcctgctcgtggtagccaagacccccgatgccaagactcatttgggacttcagttctacaacaagaccaccaaacgtaaatacaatgctctggtatggggtgtcgtagaaaataacgaaggaaccatagaagggaatataggacgaaaccccaaagaccgcatgcaaatggccgtactgagtgaccccgcccaaggaaaacacgccgtcacccactatcgggtactggaacgtctgggctatgtcacgctggtagagtgtgtacttgaaacgggacgcacccaccagatacgtgtccacatgaagcacatcggacacacgctgttcaacgatgagcgttatggcggaaacgaaattttaaaaggaactcattttagtaaatacaaacaattcgtaaacaactgtttcgagacctgcccccgccaggcattacacgccatgacgctgggctttgtccatccccgtacaggcgaagagatgttcttcacctctccgctgcccgaggatatgacaaacctgatagacaagtggagaaactatatcagtaacagagaagaactatgaaacgtactattgccatagtagccggaggagattccagcgaacttgtcgtttccttgcgcagtgcacagggactttactctttcattgacaaagagcgttataacctatatatagtagagatggaagggcatcggtgggaagtagtccttccggacggctccaaaaccccgatagaccgtaatgacttcagtttcatggagaacggcgaaaagaaacaattcgacttcgcctacatcaccatccacggaactccgggggaaaacggtatcctgcaaggttacttcgacctgttaggaatcccctactccagttgtaacgtactggtatcggccatgactttcaataaattcacctgcaaccaatacctgaaaggcttcggtatccgcgtagccgaatcactgatcctgcgtaaaggatttgaaattacagacgaagaagtaatcaacaaaatcggtctgccttgtttcatcaagcccaacgccggcggttccagcttcggtgtcaccaaagtaaagactaaggaagatatacaacccgccatcgaaaaagctttcgaggaaagtgacgaagtaatgattgaagcctttatgaagggaacggaaatcacctgcggctgttacaagacctcggacaaggaagtggtgttccccatcaccgaggtggtaagtgccaacgaattctttgactatggagccaaatacaacggcgagtcacaggaaatcacacctgcccgcctgcccgaagatacagccgagcgtgtacgtctgctcacctcggccatttatgacattctgggatgctccggccttatccgcattgactatatcattaccgaaggcgaaaaagtaaacttgctcgaaatcaataccactccgggcatgacagctaccagcttcattccccaacaggtgcgtgcagcaggattggatataaaagatgtgatgactgacattatagaaaataaattttagtgatatcactgactaacctttataaattatgaacataccagctgaatttaacgagattcgtccgtacactcccgaagagttgccgcaaatctatgaagaattaatcgctgatcccgctttccggacagtggtagagtctgttatgccgggcgtacctttcgaaggtcttgccatgaagatgcgtcaatgcaaaacaaacctggaattccaaaaagcgttcttttacggactattatgggatttagtgaaaaaaacagccaacggactgacattcgactgttccgccttgtccgacttaacccggaactacactttcatctccaatcatcgtgatattattctggactcggcttttctatctatcctactgatagacaacggaatgacaaccgtagagatcgccatcggcgacaacctgctcatctacccatggattcataagctggtacgtgtcaataaatcattcatcgtgaaacgcggcctcaacatgcggcagaaactggaagcatctgccttgatgtcgcgctacatgcatttcgccatgaaggaaaaacatgagaatttatggatagcgcaacgtcagggacgtgccaaagattccaatgaccgtacccaggacagtgtattgaaaatgatggccatggcaggtgaaggcgatgttaccgaaagactgaaagaactgaacatcgttccgctagccatttcttacgaatacgacccgtgtgacttcctgaaagcaaaagagttgcagcaaaaacgcgatgacgaacatttccagaaaagccccgaagacgacctgatcaatatgcagaccggcctttacggatacaagggacgcatccatttccagacctccgcctgtctgaatcatgaactggacgaactgaaagaactcaatttgccgaaatgtgatttgtttaccgccatatcggaaaccatagaccggcatatccacagcagttaccgcctgtttgcaggtaattatgtggcgtgtgacctcttgatgggagacaaccgtttcacggccgagtacacagaagaagaaaaagagcactttgaaaaatatctggaacagcagattgccaaagtcgatcttcccaacaaagacaccgccttcctgcgtcatgctttgctgactatgtatgccaatccgctcatcaattacctgaaagcggcaaaaggataagaacgtttaccgtaaagggtggatgttacagtccaccctgaaaaagaaaataataaacatgaggaaagtcgttattttatcttttctaacctctttgcttctcggcgcgtgcggtgaagacgactatgtatatcctaatgttctgacagatatgatcgacttgaaaaccgaccatacaggaaccggacggtatctgataacggatgaagggacagagtggcgcatccagtcacgtaccggtcttgacggactggcaccagacaccacgtaccgcacggttaccatgtacgctccattgacagactcggaagaagcagaaaaagaagccatgctttacaatacccaactggttatttctcctgttcctttgtccgaatctaaattcaaggagataaagaccgacccggtagccattcaaagcatttggcggggtgggaattacctgaacctgattttacaagtcaaagtcaaagaccagaaacacggttatcactttattgagaacaaactggagaacaaagacggagaacaaacattatacttgacactctatcatgacaggaataatgacatcgaaggtttcaaccgtaaagtctatctgtctgttcccttgtgggcatacgccggcaaactgcataaaggcgataagattgtattcaacatccgtacttacaaagaaggtatgaccagtcgtatcttttatttttagcaaacaaaaacatcaaaacattccattttatgataaagaccatctattttgtattcttcatttgcgcattctcactaggattatgggcatgtaccggcaaagacagtgacaaattcaagaatctatcctccgaccagtttgaggaaatgatacaggacaagaccatccaactggttgatgtacgcacggtagccgaatattccgaaggccatataccgggcagcatcaatatcaatgtattggacaatgagtttggcacaaacatcgaggagcttcttcaaaaagaccgccccgtagccgtttactgcaaaagtggaagacgcagccgcaatgccgccaacattctggtaaaaaaaggattcaaggtgtataatctggataagggtatcctggactggaaggaattagggaaggaaataagtttttaaccgtttttttccttcaaatccttcattatggcttagcaagttgatttactgccacttattatgaaggattttttttcaatccttcataaattcttcaaaaatgtgtaagcgtctccgcgattctatatagtatattaaaaataaaaagtctaatgatccctttttagtcattagccttttcccatctgtcgggaagcagtagcctgtatttttccagtggtgtattcggttgc

SEQ ID NO: 3873 - DNA, 73978 bp, Unknown
  gut microbiota DNA sequence
aaatgacaataagaatggcatatgaaatggtcatgccctatcatcttcatatgccatcttattttttagagacatttactgaatatccctatttaacttcgataaccttggctgctttttctttgtcttccggtgtacgtttcggcagctcgatagttaatacaccatcgtttacttttgcatcaattttatctttatctacatcatcaggcagaatcaatgtctgttggaatttagaataagagaattcgcgacgcaagtaacggctttctttcttgccttctttatcaccttcggtactttctgttttcttttccatagagataaccaagtcgttgtcttcgttgatatgaatcttgaagtcttctttggtcattcccggagcggcgacttctactttgtagtctttgtcactttcaataacattgatggcgggagctgttgcattggcttttaccatccagtcgttatcaaagaaatcattaaaaatacttggtaaccatgtttggtttgatcttcttactggcatcataatcttaatctcctataggttttggttaaacattttgtttatttctgaattccttcacctttcggctttgtcattcactatccataatgcaaaccgcataccattagttcgatgatatgcggtttatattgcactcttttaaacctataaaggttttcttaaagattaaaacctttgcattaaaagttggtaagcctctttaaacatttgattgtcaaggctactgccaatttgtaattttagggggacagattgacagttgttctatatcagcttgaaccgcatacggaagattccgtctttatagtcgtggcttataattttaaatgtacctatttcggacgtattttccacgtgttgacctatacagaggcattcgtcgtaatcgccgacttttacaatccgtacggtttcggaagctttttccggtaaacgtttcatgtcaaagcgccctatagcttcctcttgagagataaattccattgtaacgggcaaatttcttcgcaatacttcgtttacggtgttttctattcttataatatccgcttcttccggacaggtttgcagcgcaaaatccagcttgctttttttgcgttctatatgggcggatattgcccgtccgcatccgaaaagattgaccattgtcctgtttatgacatgctctgtagtatgcatgggagggtattcctgtttattatggtcgttgagtgatggttgttccatagttattttatttttgttctgattttgatgggatattaaaatccgttcaaagataaattattcttttgtaataaggaagcagagaggaaatgattgcttttgtattattataaaacaacgaattttaaaagatactcaatgccggaagggagtacttttgcagaaaagtatgacgttcacgaggctcttaaccgattttaatgaggcatgaacgtcatattgatttttactgttttacatcacaggggtttggaataagaatacaaatgagtcgctgtcttttaaatcttttacagcatctcctgcataaatctttccgttggtgagggtcagtttcttgattccggctttgggactgaagtcgattttcttcaaatccaaccaaaacagattaggagtcatgaccgattcaaaataatatattttattcttctgatcggatacagaacgccagcgggtggaagatatatgaggtttgtccggtgtggtaattccgaaaggaacagatacattacgcatcacactgagcacactgggtacagctattttagcatccggagtctgagggattgcatgtatataaaaagaggcacgcacaaagcggtcgctggaacggttcgtgcccggcagcatttgcaatcctcctacttctttccagtaatcattgatagccaactgataatcatatcgtggagaattggtcatcacttggaattcttttccttcgtgtatgcttaaattcccgtccagatattccaaaaccgctgtatttcctgtttcatctgtaatagccaggtgaagagtggaagctgaaccgttgggcatgtggggagcatcaatgcggaatgattcttttttcagctcctcgacagcttcatgtacggtggcaaaattgtccagtacatattgtgtccatatgctgatccccatgacaggacgtgtatctcccgggcggtcaaagacggattctggcaaaaataacagactggcaaccaatcctttttcattcattccgtcacacgtacctatatcatatcctgttgcaatgacgctgccgtattttgaagtccatttcacggcattttctttattatatcctgcacgttgtattcctctggggaaaacatagatattactcataatatcttctttccagtccattgtacgtccggttactaccatatggtccggtccgatatagacggcacgcgtgcatgcatccgctttttgtacgctcatatagaacatacctgccaatgttagtaatgcaatacttcctttttttaatttcatgattctatcatttataaagattgtctttgccatttagaacaaaccggataaggaacaggtttatggaaatgcagtgatttgtgatacatttgttgataaatgctaattcatcggttcgattggaacgtaaatcacatccgcattcccttcataaatttctacctgattatcctgtcggagggattctgttgagaacgattgaagataggtcgaggtttctggattaaaagaaatacttgttttatcgtaaaagtaagggggataaaataaaaaaggagcaacgccttgctccaacctttgttaaccttaaatctaatactatgaaaaacacattgcaaaggtacggattttttggaaaatagcaaataatcagacttaaaaagtatgctatataacattgtttaatatttgcgtttctcgaaaacctgttttttaagacttcttttgcgtatctttgcagccgttaaaaaatagcagacgatagtaaaaagagaaaatatatggcatttgaagcgacaaagagagagtggggcgagctttacgcctttttccgcttgttagcggacggatatgtgtatgcaggtacgcctgatgtgaaaaggaatgaagtgcaaaagcttcctgtggcgatggtacagcgtgaggaacatgacgggacacgccgttatattctggaggatgaggcgaccgtacgtatttgtggggaaaagatagataagcagatacctcgtggggattttgcggctgtggcagagttggtttttgctgctgtcaaagagagccgagagaatgatgtgatgtctcccgacggtgtggaagaatttttagatgaagtcgccatttatgacttggaagcaaagacggatgaccgtactgatttctatgttgctttttacagtatagaggccccgttggtaggtttttgcgttcgttcccgtttgggaactatgttcccgttgttggatggagggcgtgccgccaatttgaagttcgagcagactggtgttaaattcgctactcctaccgtaaacaaaattaatgcttttggtgaagaagatgatgtggcaggacgtatgttgatgatagaacgcttgggaggaatcttaaaatataatgatgtggccgataaggtattccgtagtaatctttgcatgatagatcttcattttccccgtatgttgggcgagatgttgcgtgtcatgcatttggatggcatatccaaagttagtgacctgacagaagcaatcaaacaaatcaatccgttgaaaataaaggatgaattgatccataagcatagttattatgaatataagatgaagcagtttcttatggctttggctttaggaatgcgtcctgccaagatatttaatgggatagattctgccatatccggttttctgtttgtaaatggtaatggagaggtactttgttatcagaaggctgaccgtcaggtatttgccgatttcctgtttgttaattcccggtttgagaaaagttctactgaaaaagataaatacggatatctggaacgtgagaacggagtctattattttaagctgaacttgaaaatcggtctgttgaagagataggacaatgaaggaatttgtattttcctagagttaaaatgttttttaccacagattacacagattgaaatacgatttattgcttatttcaatctgtatctgtgttaatctgagtaatctgtggtgggaaactatagcttgaatttcagaatttttccattcattccatctagtaatacgggagttgttttgtccggcataagagtcagcttctctgtgtttccggtcagcaattcggttgcctcatattctccataacgatggatgcctaaataatcaaacgcatgttgcggaatattgacggctgaacgtgccggtatggagtcaaagttaaccataattaatatcagttcatcatcctgttttcgtaaaaaggcgtattgtttatgttcgttaaatacccatccggccagattggcataggttaagtcaaagaacacaccttcccgtatggctttttcactgttgcatatattcagcagacgggtatagaattgtttcaattgcttttcatcctcattcaggaatttattgtcaaacttgcctccattgcgccagcggcgtatgctgtccacactccagtaatcaaagatggtagttcttccgtcacgcccgctgaaaccttccgtatccatgccatgttctcccaattcctgcccgaagtaaatcatgaccggattggtattcatgcaagccgatacaatcattgcggggatggcttttgagccgtttccggcaaaataatcggaagctatgcgctgctcgtcatgattctccaggaaattgagcattcgtttttcaatacctcccaagctttgccagcgttgtggaatagcagttgccgattcccatccgcaggtaatggcacgtagcgtatcatacagacctactttgtcatataaatagtcgaatttgccattgaacagataattcctgtattctcccggattatagacctcggcgataaagatcagtttcggatgttcagctttgatttgcggaatcacccatccccagaattctacaggaaccatttctgccatatcacagcggaatccgtcaatgcctttggcagaccagaacagtaggatgtcacgcatcttcacccatgtgtccggaatcggttcgaagtggcggctatgaccgttcaagtagtctataccataattcagttttacagtttcataccagtcattggagttgggccatgcgtcaaaacggtcattaccggttgcttttgccggaaactctatgtaaggttccgctgcgccacggtgcaggtcaatattgccttccagctttgtatcgggaatataatagaaattattgttggggctgaaagcttttgtcacatcatctttctcacccaaatcggttactccttcaggcttggcgtctgaaccatattggcgggctacatggttggggacaaaatcaatgatgaccttcaatccggctttgtggcttcgtgttaccagattctcgaactctttcatacggtccgggatactggttgccaaatcagggtctacatcataataatccttgatggcatacggtgatccggcctttccttttactactgcgggatgatcgggtttgatgccatagcgggtataattggtttgggtagcatgttcaatgatacctgtataccaaatatgtgtggcacccagtgttctgatctcgtttaaagcctttgtcgtgaaatcggccatttttccgcaaccgttttcctccaaagaaccattaggcttacaacgcaggctgttgttcccgaataaacgggtgaatacctgatagataataattttttcttgtgtatccattttattctttttttgtttatctccaaattgttccattctccaggagtagtctgtccaggagttccgttgccgtattgtatcctttttcgaatatctcttcggctctttccagttctctgttgctgtattcttccagtccgtatgattcgatcagcaaatctgcaatccctttttgaggcagtgtattggcttggaaaataaaatgataggctctgagtgcgatgcttaccacattcttgctatattcatctgctaccagcggatctacattgagtgctatcactttctcgcattctttgcgaatggggctgaccggcaggttcatcaagattcctccatctacataatatgtattgttgatgcgtatgggggcaaacaagataggcatacagcaggaagcagccagtctttcggctattttcccttttttaaaagaaacgatgcgtccgtgatccaaatcggtggcggtaataatagtggggatttttagttcttctatcgttttcgactccaagttgctgtttaagaaatcgataaaactatccagtttcagcagaccttgtttgttgatagaaaaagtggtcagttctttgaatgaatggtgctcaaaaagttcaacaatatgataaggctctttgccgtcggcatagaagacagcggcaagagcacctgcacttactccggaaagtatttccggcctgatgccatgttcatgcaaagcctgcataatccccaaatgggcaaatccttttataaatcctccgctcagggcataaccaatgttatatttaaattcattcatagtctgatctcgtttagataccgacaaacttacgaatatttttgtgaaatgccataaaaaaaatacggattactcagcatattccggtaatccgtatgaaatttatgataactgaattttgtttatcaagcaataccgtgtgcgttgaccgatccatcaattttcttgatcagtccttgcagtacagcacccggtccgcattcggtaaagtcatcggcaccatcggcaaccatattcttcactgtctgggtccagcgtacggaagcggtgagctgagctaccaggtttgccttgatttcagcgggatctgtgtgaggcaaagcgtccacgttctgatataccgggcatttcggagtatgaatttcagtagcgttgatagcagcttccagttccactttggcggggttcatcaacggagagtggaaggcgcctcccactttcagcggcagggcacgtttagcaccggcagctttcatttgctcgcaagccttgttgattccttcgatagaacctgagatgacaatttgtcccgggcagttataattggcagccactaccacttctccttctttagaaatcgcttcacagatttcctctactttttcgtcaggcaatgcaatgatggcagccatcgtagagggttgtgcctcacaagctttctgcatagccatagcacgtgcataaaccagtttcagaccatcttcgaaagacaatgctccagctgcaaccaatgcggaaaattcgcccagcgaatgtccggcagtcatttcaggtttgaaatcatcacccatgcaaagagcggaaattaccgagtgcagaaaaacggcaggctgagttactttagtctggcgcaagtcttcgtcagtaccttcaaacatgatgtctgtgatacggtatcctaaaatgtcgtttgctttttcaaaaagttctttggctaaagccgagttttcgtacaggtctttacccatacctacaaactgtgctccctgtccggggaatacaaatgctttcatatttttcctattttggtttaaaaacgttgcaaagttaattatttctttcggaactacggaataataatgaggcaatttgctaatatgctgcattatgtaccgcatggtaattagcacattgacaaattatttcattgttttcatcggaacaggtgcgtaaaagtgattcagcggaccgtgtccttcgcctatatgcacgtctttcccggcgtggattcctttggtgacatatgcttttgcatgttctacggcctgcggcatatcatatcccagtgccagaaaagtagcaatggcggaagaaagagtacatcctgttccgtgtgtgtttttgctttctatcttatctgagataaagagatgaggcttgtcttctccagctgtttgtaatacatcgcacatcttgtcgccctccaaatgtcctcctttcagtaaaacggatccgcaaccgaactttaataattccgatgcggcagctttcattgtgtccacattgcttatgcagtgttccgtcaatacttccgcctcactcagattgggcgtaatcagactggccagaggcatcagttcccgggtcagtgcactgatggcgtcctcttctatcagccggtgtccgctagtcgataccatgaccggatcgaacacaacgaaacggggtcggtatgtacgaaggcaggaggctatggcctcgactatttccacatcattaatcatacctattttaacagcatccggacggatatcttccattacggcttctatctgcccacgtacatataccggtggtacgggatgtatggcacgtactcccaaagtgttctgtacggtgattgcagtaatggctgtcgcagcataaccacccaaggcggagatggtcttcaggtcagcctgtatgccggctcctccgctgcaatcggatcctgctatacttaatacacaaggatatttcttcatataaatctcattttgacaaagtatttgcaaagataacgaataatcttgttttaaatgtttgcacaagtgaagggaatcaattatttttgctaaacataaaataaagtaaaaataaggggaatgaaaagaatcctagtaacgggaggcgcaggatttatagggtcacatctatgcactcgtctgatagaggaaggtaatattgttatatgtttagacaactttttcacggggagtaaagagaatataagttacctgatcgggcatccgcgctttgaactgatagaacacgatataattaatccgttttggacggatgtggacgagatatacaatctggcatgtcccgcttctcctatacattatcagcatgatgctatcaaaacggctaagacggctgtcttcggcacgtttaatatgttgggactggcgaagcgtaacaaagcaaaaatacttcaggcttctaccagtgaggtgtatggtgatccgttgtcgcatccccaaagggagggagattggggaaatgtgaatcccataggctaccggtcttgttatgatgaaggaaaacgttgtgccgagactttgtgcatggattattaccgtcaacatggcgtcttggtaaaaataatccgcatattcaatacgtatggtcctaatatgctgaccgatgacggacgtgtaatttccaattttgtggtacaggcattgctagataaagatataaccatttatggagacggaaaacagacacgtagttttcagtacatagatgatctggtggaagggatgatacgtatgatggctacggaagatcacttcacaggaccggtgaatatcggtaacccttgcgaattttccatattcgaactggctcagaagatattggaactgacctgttctcattctaacattattttcgaacctttacctcatgatgaccctcgtcagcgcaggccggatattactctggcaaaagaaaagctggattgggagcctcacattcatctggaagaggggctgatgaaagtgattgattattttaaaagtgttctggctaaataatatatacctatgacaccggatgtaaatgttgtaataagtcattctgagtacactgttttggttgtggatgatgtggtttctaatgtcttgttgttaaaagtgttgttaacaaacgagaagtttaaggtgataattgccggtaatggaaaggaggcattatcccaggcggtcaatgcccgtcccgatttgattttgttggatgtcatgatgcccgagatgaatggttttgaagttgccgaacgattgaaagccgatccggaaacacaacatattcctattatatttctgacagccttgaataccactgccgatatagtgaagggtttcaaggtaggtgcgaatgattttatatccaaaccttttaataaggaagagcttgtgatccgtgttacccatcagatatccctgattgccgccaaacggatcatcatgaagcaaacggaagaattgcgtaagattattatggggcgcgacaagttatattctgttatcgcacatgacctgcgttcacccatgggatccattaaaatggtgctcaatatgttgatactcagtcttccgtccgaacagatcggtaaggaaatgtttgatatgctgagcatggccaatcaaagtacggaggatgttttctctttgctggataatttattgaaatggactaaaagccagataggcaagctgaatgtagtttatcaggactttgatattgtggggaatattgcttcggttatcgaaattttcaatctggtagccggtatgaagaatataaaggtgaacttcccggtgcatggaaagattgaggtacatgccgatatggatatgatgaaaaccatcttgcgtaatcttctcagcaatgcaattaagttcagttataatgattccgaaattctggttaatgccgaaatagagggtgataaagtcatagtcagtgtaaaagacaccggaaaaggcatgagtgaggaagaccaaaagaaattgttgaacacggaaactcatttcagcaaatacggaacgaataatgaggaaggttccggattaggcttgttattatgtcaggattttgctgttaagaatggtgggcatttatggtttgagtctgaagagggaaaaggttccactttcttcttttcggtagctttgaagaagtgatttatcaaagccccacctccagatataccgggttatggtcactcatatcataaggaatcaccttatattttataccttccaataaggtggaatggaacaagtagtctatccgtagtaaatggtgaaacccccgataagtggctccgtacccttctccagcggtttgaaatccgtctttcaagccgtttttcagagtttcataagtaaaagttcccggagggtcattgaagtcaccgcatacaatcaagggatattccgtggcattgatcagcgaactgatttgttcagcctgtccggcacgtctgacagtattttcccggaagttgtcagaatagcccagataaatgcctctttcctgttcctcatcttgttctccccgagcctgtgctgctttggaacgcattctgtcaaagctggtagtctgcatgtgcacgttgatgatgcgtatcgtcataccttttacatccaggtcggcccagatggctccgttgttggtattcggaaattctattgtttgtgactgtctgatggggtagcggctgtaaatggcctgactcaatccttcggggataaacgagtaagggaatattttagcatacgtattctgtaagtcttgttccgtaaagtcgccattgcctctatattcctgaaaacaaagtacatccgtttcctccttgttcatcatctcggcaaactccttggcggagaatcccgtaatttcatttccaaatgagtggacattgtaagtcactactttcaatctgttctcgttagcatatttggtagggttataaatttggtacatggaagtgatgtattcgtaatttactatcagacccgtcaatggaatccataaccaataccgtagtctgatgagccagtaaataaataatatcgtattgacaaccaccagtataggtttgcttaaggcaacgtatgcggcaaacatattctccaccggatttattttacctgagaagtaagcgaagatggaaagtcccagaatgaagattgtgaacaggatagataaaaaataggcaaatttgtatacggctaatcttcccataaattacttttgttttagatacttgtttatagtcattttcaataagtcggcagataccggtttggttaaaaactcattgcatccgctttctatggcagctgttttgtctttttcatatgcgtatgcgcttacagcgatgacaggtacgctggcagacatttcccggatggctttggtggcgtccagaccattgatgttaggcatttttatatccatcaaaatcaagtcgggtttgtattgttcatagaatatgatagcctccataccgtcatgagcatgcaccagtttgtacatttttccgagcatagcctctatcaagtcataattgctttgatagtcttccgccactaggatggtcatttcctggtgggaagttctattgttgtctttaatggaagccggtgtaagtttttcctcccatttcatatctccgtttgccgaaatgtaaggcaatgtaaaagtgaatgtggttccggtttccattttggattgtacagctatttttcctcctaacttttctacaatgattttgctgatggaaagccccagtcctgtgccttgcacttggttgttggccatgatgaaacgatcgaatatcttgtctatcttgtcatcggaaataccgcttccggtatcggctacatgaaaaacaatctctttttccttcaatttatacccgaagctgatagaacctttggcggtgaatttcgtagcattacctatcagattggagaaaacctgaaacaagcggttcctgtctgtcgagataaccagtgacggatcggactcttcgaaaacaagctccactccgggttgacaccggaaactatacgtgttttttacatcctcacataaaatataaagggatacaggcgcatagttgaactccatcatgcccgattcaatcttcgacaggtccaaaatctcgttgataagttcctgcaggcgcatgttgtttttttctacaatatcgtaatactgcaatctttcctcggcgttttccgtttcggctataatgcgtgagaatcccagaatggcattcaacggcgtacggatttcatggctcatattggcaaggaaggcagatttcagctggttggagcgttctgctttccaaacaatttcggatgtgttctgtatatatccttccaatacggtcctttgcatatatacctctttgtggtatgtttttattctcatattgacggtctttccgtcaataaggagtctatagtttacggtattggaagcatctttctccttcaggttttcttccagccattgactgaaacggtccttgtcatcaaggtgcatatagttcatgtattcatctatggaaatctgtttctgttcctcatcgttacagaatatccgggtgtatcccgagtaagtgaagagccgtgtggacgaatcgtatgcccataatcctattcttgcggctttttctacttcgcacaaatctttttgctttttttccagtttcagcctgacgacactccggcctgtgatatccctgtattgaaaaagaaaatgctcctcatcatacttgctgataatacatttgtagtatttcacgtcatcttccaatattaatttgtaattccgtgcggaaggtttgtctcctgcccgtactttgatgaattccgcatacatctcccgtgccgtttctacggggaaataagagaatatatttctccctataatatcttgttcttttataaagaagtccgtcgtattagccttgaagtctaaacaggtgccgtctttatatacgaaaaacatagtatcagccgtaatttccagaattttgtctgcatactgcttatcgtgcaatatattactcggaattttcatattaatagtatgattctcaatatactgtttctcttagcgaatttagatgcgtgatatttgttactgacagcaaatatacaaaaaaaatattgtttatatcattttatatcgtaattttgcaaggtaatcaatgaaaagaagaaatgaaaaagattttggtagctgaagatacggaaagtaattatctcttattatctataattttaagaaaggagtatgaagttcaccgtgcccatgatgggcaggaggctattgagaaatttgagagttgccggcccgatatgattttgatggatataaagatgcctgttatggacggtttggaagctaccagaagaattcgtctgaagggagggacacttcccatcatagctcttaccgccaatgcatacgacagtgaccgtgacaaggcttttgaagccggatgtgacgattatatggccaagccgatcatggctcccgctttgcgtgagatgataaaaaagtattttggtgagtaaatattatgccctgcgggacttttcccatgttccgccggcatgtctcttcaaatagaagaaaccttttatcacattgatgttcatgaacaggaaatagtagggaatataaaggaatttgttctttacggacttggcagacaagaggctgccataaactcccccgaggtagaatgcggattgcagcagaagaaaaagaaaataaaccgggaggctttcactacagacaaccagcaggatattcaagggaaagagcagaaacaaggcgaccggggttaccgaccatctcagtacgcgatgggaaacatattgaaaactgaggattccataacgtagcggattcagcagttctttcaaacgatagacagactgcaatcctcctgccgcgatacgtacttttcttttttcctcttctttcatatcggccgatccgctttccaaggcatatgccgtatcacaatatgctatcgtatactgcttcatggcaatacgcagggacaacataaaatcatccagtagggtatcttcaggcatttcctcatataacggggtgcggatggcgaataattctccggcagcacctatggcggaatagagctgataatccatttttttcagccatgattcatatttccagtacaatccttctcctccggaaaccgctccttcggtactgtacatgtccacccgtttttctcctgccacacatcccacctgcggatggttaaaacattttactatctcgcgaacggcctgcggattaataaatgtattggcgtctgtgaatatgaccaaaggtgtggtgacaaatcccatgccccggttcatagcggctgtttttccttttctttcggggacgaacaatagggtgacatcgggatacgcttttaatttttcattggttcggtcattgctgccgtccgttacccatacggtatgcagtttctctttgggataatccagttcttggcagtttttcatctttccgtctactacctgttcctcattataggcggtgatgaacagggtgatttcgggtaggtcggtgttgttgccgttccggcaggtttcttgcttcggttcgtccgtatcgtagaaggaaataaaactttgttttatttttaccaatatccacaacaggattccgtatcccacataggtgtagaatacaatgaacaggagaacgaagaagaggatttcaagagtgttcatgctagtatttctttatatatattcaatatttctctggctgtgttctcccatgagaaccgacggactctttctagtccatatgcagtttgtgactgatagaattctgcattttcttctaaatgaaggagggcggaagcaatttcctccggttcgaacggattgaccagaataccctccggtcctgcgatttcgggcatggcggaagtggttgaggtgatgacgggagttccacaggccatcgcctccagaatggggatgccgaaactttcgcgtaaagacgtgtatataaagacggatgctccactataaacagcgggtagttctgtgtttggaatgtatccgggatgatacagcattttttttatttcttgtaatccttcccggttcagatattcgtctatgatctcttctttcaggtcggcgataagcaagggaaggggctgactggatttttttaaataaatgcggtatgcctgcaatacccttgccgtattcttcttgggatcggtatttcctaaaaagaacaggtaaggatggttctttatgtatcgggcagtgatggcctgtgcgttccatatgggtatgaaatgttgtgaatagccgttgtatacggcgacaagcagttgtttgtcaatgtgcaggaaatgactgatgcggttgcattcaaaatgagaaacggtaatgattcttttgcatttggtaaggatttggggaacaatgatttttcggtagaaacgtcccagtctttggtacatggactggttcttgccttgttttttttctagaaagataatgtcgtgcagtgtaagcaccagtggaatgtttccatacacaggggcagtgttgcttgtgcagtgcagcaggtcgggtttgattttttttaaagccaacggtagtcctatctgttcccaaagcggataggatggccaattaacggtcacgatatgcatgttggcggattcctgcaaacaaacatcatctcccgggctgaccagtatgaagtattcgttctgttggtctatcttttgcagttcccggatggtttccagagctacatagtccatgccatgtttctcttttctgaagatgcgctgggcttctattgctattttcatctgtcgttactttatcaagttagaatcttcgtcctcgtaattgtttttactatagaaaagagccgtgaagcttcttaaaccttttatggctcgttttttgaaactgctgaacagggatccgtcggccgaaatagtgccatagccggtaaggacacgggctttgcgggcggtgacgaatcttaattttccgtattttttcaatgccagtgccagggagccgtcttctccgcggagtatgtctgtccggaatccttctttccgggctgtctccgtgtggaaggcaaaagccattccacgtacattgagctccggtctgttcagattttgtattttcaaatagagatcacgtagtgtctcatagaagaaaagtcctaaatgatgttcattaggaagaaaactccacagggcgtatgcacctgccacttctttgtcctgtaagacctttatcatggtactgatgtactggggcggataaagtgtatcggcgtctatgcagagatgatacttcccccgggcatggttcagtccgcattgccgggcaaaaccgggacctttctggtattcattgaagtaggtgactcctaattcttttagtacctcttcggtgtggtcggtagaatgattattgatgactagtatttctacaggatagttatgttggttttcacataaagaccacaggcagctcaatatcctcttttcttcattatgggcgatggcgaccaccgaaaccagcggagcatgagttgcaagctgccggatcttgtctttcacttggttgataaccgcttgtggggcttgggtgaaaggcttgtcatagatggataaatagtcagcgtaccacttcatgcgtttttatatattcggacagtgtgaccggattccggtgattactgaatcgtgatttgaatttgtttttgaggatatagaacagggcttgaatcatcttcttcatttccgtcagggcggaacggcggggatatagtttctccaccatttcccggttccatttgttgaggaagaaagaggagtagtattcatcttcgggattgactagtatctccacttcatctttccactcataacggttcaaggttatatctccttccgtcagccacagcagtttgtaggggagggattggaaaggcagataattcaggaataattctccatagtcgttttcatagtttcccggcatcttgttcttttcatagaagaccagtttgttgtctatatccaatataacccatttatgtgattttttgggaaacaagtattcgcccagcagactgggagtttctatgtatccccgtcgggctaccctgcataattccttgacaaaagcttcgggatgttccacgtgttccaatacctgattgcatattacgtagtcaaactccttgtctttgaatggcagtttttctccatcggcatgtacaaaggtctgatgcgggtatattttcacgtcaccgcagcggtggtaattggtgtcaataaatttttcgactatcacgttggagcgatatgtcggattatggcccggacctatctccagcactttgtcatttttatttatatggatgtctcctctgtcgtagggggaatctgttttcattgttttgttccgtttaataagttgttgaatagctgaatccactgttgcattattacatcttcagcaaaacgttgtacattgatgcgggcttttttccccatttcttttcttatttgttcgttctcaatcagataatttattttttcggccagttcttctgtttttccattttcgaccaatagtccgtcttccccgtcccggatgatgtctttaggtccgcacggacaggcgaatgacacggcaggtactccgcacgccattgcttccgctatgaccattccgaatccctcaaatctggaacttgatacaaagatagaactttcatggtatttacagagcatatccggggttgcattttcaagaaaaaggttctttaatttccattttccggccagtacttgatatgtagtcttgtctcctttgccatatatatgtaattcccagtccggatgccggttacagactttgctccatgcttccagtaacaaatcgaatcctttttgataagtatatcttccggctgcggttatccgtttattgttcaagtcgctgaatgttccggattgaaagggtagagggttgctgataacttttacattttgcagttcgggccagtttgctctgtcttcctcactcagtacaacgaacttgtccagcttttttaaatgcctcaccagacttttcatccataatttggcaaaaagttccttgatgaagttgctttcgttcttttcaaagttacgatagtttttccggtttacatgtagctcccctatctttttgcttccatctttgagggaagtgataaagtttatttcccgtcgtaacaaagaaactgtgatgtccggtttgaggtgagacaaggcggcagagagcttgcgtcggtatattctttgttttttcagataaaccggcacttttttccaaagagggagttcccataattcttcaaaatctatatccagttggatgatttttactttgggcgataaagtatagcagggaggcttgccttttccgtcagtcagcaaaatatatatgtcataattaccattctccgccagataattggctttggtggtcagtaccctttccactcctccggggatatggagagagggggtacaataggcgattcggatcataggcgggagtattacaggttgtttattactttcatcatctgttctttccatgacaggtttttaatggaatcccttattttacgaggagacagatccagttccatatagaaccggataagccggtggatatctatggggctttcgtcggccggaactttcattatataaggcatagggtcaaagtcttcgtccgtttctgaatatataaaaggtattccccgtgctgcatattctctgttttttaaagttttgattttgtcaatgccgctgcggtggcgtgccagactgccgatggcgaaatccgcttcgttgaataattcatccagttcctcgttcattttttgtccgtggaagatgacatatttctctatatgatatttgttgataagttcataaaatccgggagcgtgttgcgagtcatgcatttcggatttccatataccgcctgcgatgtggaaaaatacggttgtgtttgccgggttttggtaatatttacccaaaccgtctatcaggcggtcgtatccgtgccaataatgtacttcggccactcctagtaaatgaatgacggaggtgtttttagaaactgtctttttcggtgggatggaatcaaaatcaactccgttggatatctgaatggtacgttgaccgaatatatggtgatggtctgaaaaggtgacgatagcgttcacgtgttccgctagtgtctttcggaaaactttgtccacttgtatccctaggcgtgtggccagtggaaaaccggcatattcgttgtcgtaaggataggtaggtatttccatcactattttaattccggctttcctcagtttgctgaacagccggatggtgaacggattcgcattatggaaagagcgtacataaattaattccacccgatgtgctacagcataatgatatatgcagtggtaggaaactctttttctcgccgcagccagtttgcctgttccgtaatcggctattatttcaccgtttatcatccttacccggtgactgttgtccgctatgcagtacgtgcataagctgacttggtgtccacatgcttccaagcctttaacctgatacaggatctttttactgatgccgctgtaaggagatagtccatgaaagaggagatagatgatattcatggtcgggtggttgttaaggtgttgaataactcattccacagtttcatcacttcttcgcgcgaataacgttggatattcttttgggcctgctttcccatccgtatgcgtttatccgtatcctctatcagccggcatatcgcgtcagccagttcgtccgtgtttccgttccttaccagtattccgtcttcctcaggagtgataatctcggcaggtccgtacgggcagtcgaatgagatgcagggaacaccgcacgccatcgcttccagaagtgccatcggtaatccttcaaatcgtgaactcatgacgtatatggaacttcccaggtatttttcttgaatgtttttggtcggagggcacaatgaaaagctgttttctatatgatgctttccgataagttcttgtagcctgtccctgtcttgaccctctccgtaaatgcggatatgccagtcgggatgcttccggttgaccttgccccaagcttcaatcaggcggtcatagcccttctgttcgttgtatcgtcctatgctgatgattcttttttccaggcaggaactcccattttcgggcaagaacggtaagaagttcggtatgatacatgccttttttacttctttccaattatccgcgtcattctgtgtcagaacaaccagcgcatccaacttttttacagcctcttcctgtttttttctccaatgccgtgcgatttgcttgtatggaaatcctcgttgttccatcagatgcaggtttcgggtgtacggtttggctatatgggattctcctatttttatacttccatcgtccagttgtgtcagaaaatccaattcgcggcccagtgtgctgatgacgatatccggcttcaaggtcttcagccagtagttcagcttctttctgtacaggcgcatcaaggtgaaataataacagcctctcactaacaggttatgatgatactgtctgtcaaaatcaatcgctatgtcaatgtgcctgactctgggggatattgggaaaacgggaggccgttctttctgtgagtcggtaatgataaatacatcctggtgcatttcgtcagccagatagttcgctttttggatgatgctccggtcggctcctcccacggtgcatagggctgtgtatagataaacgatggtcatttttcagtcagtttatgaaacaacatttcccattgcggcatgatgttttgaggtgagtaacgttttacattttctttggcacttttaccgaaagcttttctttccgcttcatgttctatcaggtggcagatagcgttggcaaatccttgtatatctccgtttttgacgaggagtccgtcttcctggtttctgatgatttccgatggaccgaaaggacagtcgaaagaaacacaaggaacacccagactcatggcttcgatcaagaccagtccaaaaccttcgtaattggagcttagggccagaatggaactgttcaggtattcttgcgttatgttttgtgtaaaaggataaattgtgatggagtattccagctttctgtctttaatctgccgggttaagctatccttataaaatccttcaccaaatatatccagtatccagtcggggtggtgtttctgcacgatattccatgcgtcaaccagtctgtcgaatcctttttgccaggtcagtctgcctgccgctattacacggggagcctcacaggagctgattgtttgtatatcaatagaggtggtgttcggaatgatatgtatattcggatgttgtccccacatggcggcatctccttgtgtcagtgtgactatagcatcgctgtatcgttttacatcacggaaacattggtagctgacgtatctgtcttttatatctttaaaaaaactctttttgcggtttgcaggtatccgggtgtatattttggcgcaatgcgattcaatgattttctttgccttgcagtctaatttacagatcaaatccgctttgaaactggtatttcctgatatgatatcgggattgatgagcttgatctctttttttaatttttgttcgaatttatggttcaaagtccatcccactctcaattgttcgagaagcggatgctggtattgcaaatgaaactttgtatccagatcgatatgttccactttgtgggataacgggaaagaaaaaggatgattgccttgggaagaagtgataagatagacctcgtgcccataaatttcgaccaagtaattcatcttatccgttaaaatccgttccatgcctcctatacgggctatggagtcgtatacatatactattttcattcccctggtttgtttttccgtaaaaatagtgtattctttttatatatccaataagaagttgttgaaattcctgtccatatccgtttttttatggaatgtcggctgtattcggagtaaaaagtgggtttcaatggatgaagatggggctatttagtaattaaagtctttggaatgttgtgagtatcatttgtttttgcgaatattgcattttataatgattagcagataatgatgaaagagataacggtggtgatgccggtttacaaggtggaaaaatacgtatcagaatgtcttgattccataatcaaccaaacttttgattgttttgagtgtatcatcattgatgattgctctccggataacagtatgcgcctgatagaggaaaagctggccggatataaagggaacatcagttttaggatcgtgagaaatgagaggaatgaaggagtctctgcggcaaggaacaagggaatagaactatcccggggtggttatcttttttttatagattcggatgatatgctttatgagaattgtctggagaaattatgggaggaaacgaaaagacatccggggattgacttggtgcagggggattcttattcagaagggatggaaaacaaaaacagtgatttgcaaagatatacggaaggacggatacgtatcaacaagttgtttctggattcgaaaataatatccactccggtcaacagattgattagaaaggaggtgctgacagagaatgccatttatttcaggtcgggcattttgtttgaggactttttgtggtgctattttctgtataaaaaggtggaaacgtttgcttccgtcaattcttttacttatttctacaggcgttcaaatcctttctcaaccatgaataaggcgaaaacggactttgacaagccggcaaaggattttatttttatcttgactgtttttaatgagcacatggaacaggaattgtatgctgaaaatatctgtttcattttgaacaagttgatgccggtggtgtataatgctgctgtaataggggttacaagggaaagtaatgatgcgatagataagtttaaaagaaatctgataaggaagcattgcagagagttccggcctatggaggttttgtacgaattgaatttgttctatcctttttctctgcttttgaattgggggatttacagacatcacatattgtataaatacgctaatctgatcaaattgtattataagatatggggaaggttgtaccgctgaatcttcttgtgtaatgaatattattcccttaggttggtagtctttttgttacattggttgtcggtttcttttgtggccggctcattcatatgtgacaggatagcggaaaaagcataatataattctttgaatgcttgcaggcggaagaaaaacaggtattcaaaaaagtatttggcggggagccattcttttatttttgccgaagggatacaccacggaagtggtgacaggtaatagtggattttttcttgtcgcaacagtctgttgcatttcatgcttgcgttaaaccgtatgattaaactctcgcggtcttgtttggacatagcaagggactggccggattcggtacaataataaatgattcttctgtctgtggttgctttgggggcatatataccgacaaggcatgaaaaatacacatcgttggctattcttgtttcatcgaattgaatgtggaatgttgacaggaagctgcgccttatcattttgccccaaggaacttgagattggtatcgcagtttgttttccgggtttacatcattgaagaagttggtatagtaagttccgcgtcggctttcttgggacggattgtcggacatgacaaaacgtacattgaaatagatgacttcatgggggctgtccatgtattcgtttaagatagtaaaacaatcggctgtaaagaaatcgtctgcatctgcaaagataatccatttgccacgggcgtgggagagtcctatgttccgtgcgtatcctgccccttttccctccttagtgaacaggacttccgtattttttctgccgtttcccggaaaatgagaaaaatcgacagattcggaattgctgttgtcatcaatgataatgatttgaatttcatcccaagtgggaattgagtacagacagcgttccagaagacggggggtattcttgtgcggaataatgatgctgtaatggtaacttgtgttctttgtcattcttcttctttttgcaaagatattgatttatattcagcatcatgcattatcttgataatatctcgatgagtatgagaagctttcactggaagttcggggtgataatgccctcatgctctcactgtgtgcacaactggttgtttatgaactatttgtatagtgatggtaaaaattgtagctctcacttatgctctcatgccctcactgttttttggagcagaatttcatataatctatttgttatcagtaatatatccttttttataagttgttccgatttaatatgaagtaggatgttctcaggcttttcctttgcaaaaagtgtgtctgaagggggggacctctatggaatatggcaaatttccggtggcagtaaaaagatcaggaggtttttaaaaaagctcgccatctttttaaaaaagaacaaggtcttttttttatttgacctgttgtttttgggggagcaggatttcacatatgtacgtgccgctctatacgtatgtacgtgccgcagatacctgctttgtattatatgatattctttcttcattccgcatttattttcatttctttattgtatctttgcgaagaaagagtgtaatctaaattccatgagaatattattttattgtgatactgtcttcagtttcggcggagtacagcgtgtgttggctgaaatagccaaggctttgtccggaaaacatgaagtcacgatactgaccacggatacttgtacggacttgtcgatgtacggatatgccgaaagtaccgtgcggtttgattctttctcttattccgcctcctctttcatcgagcgtttgttatgtaaaggctatagttttttatataaacatgggttgcctcatacccggctgacttcagaatggtatgctgccagttttttcccttcttcttataaacggacattggcaaggaaaataaatgcccggcaatgtgatgtagtcatcggggtacatgcttttatggctctgcacctctctgcagtaaagagtcggatccggacaaagactgttgggtggctgcataattcttatgaagcattctttgagaaagaaactccctatttgccgggattggattgcttttttcaagtccagatggggaaattggacgagagggtggttttaagtcatgcagatgccggttgtttctttcggaaaatgaacctgtgctgcgaggtgatatacaatcctctgactgtactgcctaaaggtcggggaaagaaggaatatagaaggattttggcggtcggtcgtttttcattcggacataaaggatttgatattttaataaaagctttttctgtttttgtgaaaactcatccggactggacactggaaattgtgggggagggtcctgaggaagcgctttaccgttcattgatcaatgaatatgaattggaaaagagcatcgcgctgcatcctttcacgaaagaggtgcaggagtattatgcacattccagtatgtatgtgctgagttcccgttgggagggattcggcctggtgatgatagaggctatggcgcacgggttacctgttattgcatctgatttaccgataacgcgcgagttgttgaaagacaaagatatggccgttctttttgaaacagggaatatagctcagctggccggttgtatgtcgtatatggctgatcggacggattgggaatggatgggaaataaggcggtggagtatgctgatacatttcatatagagaaggtatgtgacagttggaataatttactaaaaaaagtagtgtatggtacaagatgaacaggaaaaatgggatattgtgatcaagcctcggtccggtttgttccggttggatctggaagaggtatggctgtatagggatttgctggtaatgtatatcagacgggatatcgtcactttttataaacagactgttttaggaccgttatggtttgttatccagccactgcttactaccgtcatgttcatgtttgtttttggcggtattgccggtattcctaccgacggacttccccaaccgctgttttatatggcgggcttactttgctggaattatttctcggagtgtttaagccgctgttcggatacgttcaatgccaatcagaatgtatttggaaaagtatatttccctcgcctggtggtacccttgtccatcgttatatcttgcatgataaagatgggcattcagttcggattgttcgttttaatttatatttactatttgtgcaacggatattcgttgatggtcaacggatatgcttggttggctcccttgctgctgctcatgttggcaggacttggtttggggttcggattattgatatcctccttgacgaccaagtaccgtgacttgcgtttcttgattactttcggggtacagttgtggatgtatgccactccggttatttaccctttgtccgtgatgaggcagagtcatgagcagtatatgtggatcattgtggcgaacccgctgacttcccttatcgaaacatttaaattcggattcttgggggtggggactttcagttggttccacttaggctacacgttggtgtttacagtggtgataatgctttgggggatggtgacttttaatagagtgcaacgtagtttcatggatgtgatttaaaagaagggacagaatgggaaaaatagcgatagagtttcagaatatcagcaagcaatatgcattgggaagcatcggaaccggcacgctgagccgtgatttgaatcgttggtgggcgcggatccgtggaaaggaggacccgtatctcagaatcggggaagagaatgaccgttccaagaaagcgacgggagattttgtatgggcgttgaaagatattaatttccatgtggaggaaggtgaagtgctgggtattataggtaagaacggtgcgggaaagtccactttgttgaaaatcctttcgcgggtgacttctcctactgccggttgtatccgtgcacgggggcgtattgcctctttgctggaagtgggtacaggctttcatcccgaaatgacaggacgggagaatatttatatgaatggttccatcatggggatgaccaaggcggagattactcgcaagttggatgagattgtggctttcgccggtgtggagaaatatatcgatactccagtgaaacgttattcttcgggtatgaccgtgcggttgggatttgctatcgccgcccatctggagccggaaattctggtggtggacgaggtgttggcagtgggcgatgcggaattccaaaagaaggctattggcaagatgcaggatgtatcgaaaggagagggacggacagtcttgtttgtcagtcataacatggcagcggtaagaagtttgtgtacaaaaggaatatgcttggaaaatggtaccgcggtttatcaggggacggttcattctgccatcgattattacttgaaagagaaagggacggtccggaaaagtaaaattatagattatgtgggttggacgaaaaatacgtttcatatagattgcattgagataaacggaacggaatgtgcctcttccactattcatggaggtcagaattttctgactgtgaaaatacagggatattctgaagaggatatgatgtatgatgtaatgctggttttgaagagcaggacggaagtgccttatgctacttatgctccgggacattattacgggagtatcagttatttacctaaaggggatttttgcatcgagaggcgtatagggcttccgcctgtgctgagtaaaggtgtcctgcaggcagatttgtttatacatcatcctatggtggaatattatttgaaagcagttcgttgctgtttgctggaatgtgaggggtttcaaagtggattcgggcatgcactgacacaaacgtccaacggctttatcggattggaggatataaaagtttgatcattatgttctattatgaagatgaagaaaaaaagaatcgtatatagtttgactggaagagggctgttctcagagttgtctaaccttgcattggcattggtctatgcggactataatcaggaagagctgactgtcaatacaaggaactggaatgcaagggtagagaaaggctggagtgattatttcgaatcggtcttgccaaactgtaacggggtgatgtgttcgcaatatattgtttataaaaaggggaaaccttggtggggaaatatctattataatccgtccgcttttttccggtattatattttctatataatgaataggatatatctgttatttcatccggaaacggaactagggaatgaggtctttctaaaaatgagatcggaggattttctggagaaactggaagatatcagaaatgattatggctctgccttgcggaaaatattaaaatttaatgaaaagacaaccggctatatagaaaaaaggaaaagcgagatgaatttgccgatagattacatagcggtacatataaggcggggagataagatagtttcccgtgagatgaaggaactcggtttgtctctttatattgatgctgttaaagggaagaagcatatcagccgtaatgtgtttatagctacggatgatggttctgtgacggataagttgaaatccgtactggttgccgaaggatttaatgtttactggaacacagctgtgacacaaacaggatttgacgagtctttgtttaatacaaaggataaaaaaagtagatatatagatacgttgaatatgctgttggatatggatattctgatccattcttcattttttatcggtacttatacttcgaatgtcagccggattgtgcctctgtatgtcggatttgataaatcgttcagtctggatgatgaatggaaactttagattgtaaaaagcggaaaattatgtcacaaagaaaattttcgattataaccattaattataataataaagaagggttgaggaaaaccatagaaagtgtggtcggccagtcttttagggattttgagtatattattattgacggagggtctacggatggaagtattgaagtgataaaagagtatgccggtaaagtggactattgggtatcggagccggacaagggtatttatcatgccatgaataaaggagttttacaggcgcatggagagtatttgaactttatgaattccggtgatgaattttataacaatggtgtgttgcaggaggtggcaccttcattggacagcgatattgttgttggaaaaatagtgcatggcacagaggtgtggggatttcataaggaggatataacgctgatggatttgattcggggaactgtattgcatcaggcttcattcttccgtaaagaactttttgatgaaaacaggtatgacgagagttataagattgtatccgattggaaattttatattcagaccttgatattcaacaatgcgacgttccgcaatattcgttccatcgtttgtaggtttgtacccggaggggtcagtgaaacggatgccggaacaagagatatggaaagaaagcgggtgtataaggaactgtttccggatagaatgatgaaggattatataagactggaaaaggtggaatctcctttattggaactgattcccgaactgaataaaactgcgggccttcatcagatggcatacaaattggtctgtgccttgttgtgggtgcatggaaagataaaacgggtgcgtgttaagtaagcagtaaattggtcttttcacttgagccatgcccgcaggataagtctgatgccatatagcgcatactttatttttagagaaagtggaagatgtatataattgttttttctgattcttagcattctgtcccataattcattgaaggggatttcccgtgagtgttgggtatagaacaagaacgaactttttatgtaatcggccgacaaagcacgtagaatataggtggggaatgtggccgaaagtgaagtcatcaggtcgaatgcatccatgaaagtgcacagtttgggggtgtagtttttttgcgacaggttcatggcgcttgattttcttgtgacatagtgataatagggggaagtggtgtatgcggctgattggcagtggctcaggtattgaaaaataaagagcctgtcttcattataataaatatgttcattgaattttaggtgatgtttgtcaatgatttctttatgatataatttatcccataagtttcctttgtatttgtaatgcctgtcgttaaacagggagtgaatggcctcccactgggttaatttgccggatttcacttcgttgatgtggtaaatcggacgaccatcttcattttcaatgatatatccgcaagtagccagaccggcttcgtttgtccggataagctgataaagagtggctatcatatccgtttctatccagtcatcgctatccatgaaagctatatattctccttttgcggtttccagtccttggtttcgtgcatggctgactccttggttcagagtgtgtattacctgtattcgttggtccttgcaggcgtattcgtcacatattttcccgcttccgtccgtacttccgtcattaaccagcagtacttcaatgtctgtcagtgtctggtttaagacgctgctgatacacaaaggcaggaatttttctgtattgtatatagggatgatgacagaaaccaacggcataacttataattctgtgagtttataaataagatcattctttagtcggcgaagcgtataaagcaggttgctcggattctgaaacgtttcttccaagggcatgatgacgggaacatactttatctttaaccggtgccttatgcaatagacattgatcaatctttctgataaatagccgaacagacgtgcctgatccggataggcggacagttttacccgtttttctaattcaaacaatacgctgaatagccactgggagtattcgtcaaaatgtttccgtccggtgataaacatattatatccggaataggcattgcagtgatacatgaatgtatgaaaagcttcagcatattcgggtgtgaggtgttgaatgacttctttcagcaaattgaggtcattgactagatggaatatggcgtattgtgtagcgacgttatagggataatgacgcttgggagagaggatgatgtcataatcatttaataaggtttctaaatcaggaaatcggtaagtttcttttagaaatgaatctatgttgatgaaactcctgtctggtgaaaaagccggaaacgggcgatgaaaatcaaagaagcgcctgtaatgattgagccctataatgtcacactttagatttttccaagcccaataatgggcggttagttcacaaaagtgaggattcctgtcggatatattatctcctgtgttatctagtacagggaagaatcgggcactggttagggaggcccctacctgtatgggacagaagtactcatgctgtggtagccggctgtccttatgggcacatactaatatttttatattttttcccatgtttgtgattgagggttatagcgtttgataatgcgtgcgggatttcctaccgtgacacaatagtcgggtatgttttgggtaaccacacacccggcaccgataaaacaatgtttgccgatggtgattccgggcagtacaatcacgttggctcctatgatggtatgttctccgatgtggataggagaagtggtgataccttgttcgatgatgccttgagtgatatcctggtaattgtgatctaatcctatcaggactacgttttgtgaaatattgaccccgttgtctatccggatgggaccgatgaccgtattgccgagtcctatccggcaatagtcgccgattacgatgtcgcctacggcattgttcaagcaggagaaatcttccactaccgaatattttcccatctggaacaggtggaacggtggaaggtctttccgtacactggaataaatgactgagccccggcctttttttatgtagaaaggctgccatacgcgtatccaccaataggggcgtgtctttaccggatgcatgatgaaaccgtgtatccgttttttccattgcgggtgttgctgtaagtactcttttatattcataattctatccatgctgtgtatggttgaacttctgtgccattcctttcaagtgaaacaagttgagaagcataatgattacaaaataaggtgtctgcctgaggattctgctcatgtatttatatctcatattggacggaatggccaggtataacgcaccgttcagcaagataagcaaaatccaccactttatggaagaagccggagagaaaatgcagagaacacatgaaaagaatccgatgagcgccaacagaatgctgcggggggcgataaaggcttggagggttttcagcagataatctccgtttccgttcagtaaggctgtggggaggttacgtcccatttttaatgcaaggaaaagctgggtggctatccagcggcggcgctggttacgcaaggcatccggttgccggactttttcgtccaatgcttctagggtgtctatatattcaatgtgaatgccttgacggagcaggagttcttccagttctttgtcttcgcccgtactatgggtatggatgatgttccggacaaaccatcggaaatcgaaagccattccggagccggtaagggcagatgaaaatcccagccggatgtgtcccttgcggaagatggaattgttcatctcttcgatggcggcatccaatagggctatgtctgtattcatatttttggctttgcggtgtgtctgtatggcttttataccctgtgaaactgccttattcagttcttgaagataacagggtgagatcagattatcggcatccagtatgaggacataatcgtatggctggtctgtgatggtctctgctgcaatgcgcagggcttttgccttggaactttccttttcatgcagttctatcaagccgatgcgttctttgcgcagtgaggcattggtttcgggacgcatgtggtcggatatgactatcaggtcgtaaagctctgccggataagtttggcgcagaacggaagtgacgcaggcgtgaatgaccgcatcctctttataggcgggaacaaggatgataaaacgttgccggacagtagtcgcgggatatttcttttgtttgaagaaatgagaggcggcagaaaacaggactatataccccacactgacggaaaggtagatatatagcgtatattccatgatatgtataatttccgatagcatggggcttttattttttctttcttaaaagcatattgaatatcatgcctgccgctagaaaggggatagctttcatggctttgttgaatttgctgtccaccaagtagtttggagtggctattgccatagtcaataagaaagtgagtaataatccccaccattttaggcaggcgctccagtggaagtatacggacaggaaactgaacaggaggaggatacctagcaggatggtgcgagggaaaatgaaccattgcagaatacggtcggcataatcaaattttccacttaaaatggcaccgggcagattaccgatattggtgaacagggaataatattgggttttaatccaagtgctatgttgggtatagaattttttctttccactattcttcaaggcatatacatgggtattatttaaatattccacatatatccgttcgcggagcagcaaggattcgatgactttttcatcgtcatcgtcttttaaatgacggatgttttctttgaaccaagtgaagtctattgcggttccggagccgttcagcgaagctgaaagtcccaaattgacatgccccgcacgaagaatggaattgtttatctcgtcggtgatggcattcaatatgctgacattgctgggtctttcctgatagatgcgatgggtttggatggcattggagccgctggcatacgtattgttgacaacttcaagaaagttggtgtccactacattgtccgcattcatgattaaaacgatatcgtattgtccttcttgtaattgtgacatggcagctttgacagatttcatttttgaacttttcttgaatctggcttgcaatagggtgatgggatattgtgccagctgtttgtttgtttccggcttcaggtggtctgaaatgacgataatgtcatagcagtctataggatattcttgttgcagaaatgatttgacggtatagggtatgtagtcatcgtcctgataggccggtatcagaatggcgaaacggtgttttactcttgattcggaatatttgtcggtgcggttgcctgttgccgctatggcgtacaccagcaggtaaaaaacagtaaaggcacatatcgcgaaaagtagtagttctatgtatgctagaaatatcatggctgtttgtctttgtttctaagtttgaaaaatgcttttgttccctcccaatgtgctttggctatggctttctttccttttcccaaggcggtcagtatgtttttgggacatacaatcattgtctggtataagatggaaaccggaagtttccagtcaaagagattgcggtaggcatatagtaatctgtttctgctcaggtaatagtatttcaacggactttcttttccggtggagttgctgtccttgtgccgtatttcgcaagcgggatcgtaccatagttcgtagccttccctattgatataggtgcaccagtccagttcctcataatatagaaaatattcttcgggcatcaggctaagcttgtctattattgtttttttcagtaacatggcggcaccatgcagataaggcgttttttgggcggggtagtggtctttatttattttccctttgcctatggctctgtttcttaaggtaatgggcgaaagttgggtgtatcctgcaaattgtatggcgtgcggttctgcataatcacggattaacggggagacacctgctatcttgtcggaggacagaaggcgttttatcaacaagggtatggcatctttgaccatacaaacatcattgttcagcaagaacaggtattttccttttgcaaggtttatacccagattgttacctccggcgaatcctaagttccgctcactgcgtacggcttggataaaaggatatgttttttgtagcaaggcggcttcattggcagtggaaccattgtcaatgactatcatttcataactgacagagaatacagtggctgcccacgagtcaatgaattcgcaggtgtcgtgaaaaccgttatagttcacggtgatgacggataggtcaggctgctggtagtccatgtatttctgagtattgtttatctaaataaggtcctaaaaaaacaaaggtgaaacaagaataaatcaagattccgttaggaaactggaaataaaccatattggcgtaagaagctaccagtatgcctgcacaaccgcataacatacctgtcagcggtccccggatttccggatttcggattttgaataaaaggatgtaggagcccgatagaaatagaatggcatgcatacccaaaaacacacacagtcccactattcccatctgtttccatacatctaccagactggagtctgaaggacagatggaaacgaaataatatttgttatggggaggaactaccccgtctatggctcccatgcctatgccgaagggcatttcatccatgtaggcattcagtgctttctggttctcgaaacgagccatcatcgattgatcctctgtgtcaaagacagtacgcatacgacggatcaacttattgttctctccgatcttggtgtatttcagcattcctatccctccggcaagcaggataaaggagatgatgcctattttccaacttttagacaggaacagaaagagccccagccctgcaatgggtactgctatggccgatcgggttcccgatattagcagaccataaaatcctgccatacccactattaaatagaagagtctgagaaataggttctttgtatagaaaaaagtaagcgtgaaaatagtgcaggataatcccatgctggcaccgaaaagacccgcgtcagtgaaaaatgagaaatagcggatgccggaatggataaaatgggtacgtgctccgtaggcccacaaccagcttagctcggtactgtcaaaacctttgttcttttgccaatatccttttgcggcagccagtagggtcatgataccccatagtattaaaaagtaatggataaaagtgtagcgattgcagtgtatggatagaataatacaggtcagaatagggtataaggcccagggtcttaaaatacgaagccatgcttccatgtaaaattcaccggttataccattacctatgttgatgatacaatatagcagccagaccaatgtgatgcaggtatagacgtttagtattttcctgaaatgatgattgctttgcaactgtttcagaagaataagggccaacatgatgccgtagagcaaatcaaagatattggtaatggcaatagggatggaatgatatctgttaattcccattatcaggtaattcagcataaaggtgatggccagcagaatgacgggtctgtttatgcatatgaagataaaaagcgtggcaaaaggtatgaaccctattgcaactcctatggagggcttcatgttgagggctgtccataggcataagcacagtccgataatgaagctggccagaatttgacctgtatgggttatatttatttcttttgctatcattatttattttcctttgtattcaatggcggtcagtccgagttggaacagcctgtattccatattcttaaagttcgtgtaaggaggtaattgtcctgtaaagtcttccactgtatttctgtctgcttgtgtcagatagaaaaggaggggtacttctttttgtttaacttgtaacaaatgctcatacagtgcctgatccgtatttttccaagtacggttggcacggacaaccagcagattgatggatgcttcatttaacaaagccggaggcagaggattgcttttcaggaccgggtgctcgattagaagtatttcatccttttccagatcgggacatagttctttcaaattgtttgcctgtacatattggctgtcttcgcttagaaaatcttcatcgtatgtaatgcggcggacgtttaggccgatgctgctccaatattcctctatcaggcgggcgacatgggtctttccgtctttctcttctgtacttaacagattgatgacccgctgttcctgtgtatttagatgaggcagtaaagcggtgctgagttgcctgacggccatcttgtttatggctttattataacgtctgtatcttaacttgctttctctaggatatgcgccgataactgttcctccggtaattcgttctgcacgtattttgtctctgagggtacggtccagtatttctataatcagaaaatagccaatgatgaaaagtaaagtccccagtatggatgcaagtataatcatgcgtgcattggtgggggaggaggtcagtggaaacaggggcggattcatgatttttaatgaagccgaggtcatttccaggttcttttgtcgcaagatggctgcattcaaggctcccatggtagacatatagttgctttccacaaagccgatatgcctttctttccgccccagggtagcgccgatgggggagaaataaaggaaatcttcatttaaattctctctcattatatctcgtgcttccatttgggctttagttttttcggcaaggactatttggtcaagccactggctgatgagtgtctcataagatacattgtttgtacttgcggcttcggcacttagtttcagggcgagatcgttgatgttttgttcggcgttacttaacatgtttttttgttcttccagctttttccggttcttttcgtccggagtgatttccatggttgagatctgggtgttcaattgggacatttgatggagtttgtccataaactcattgttagtacggatcaatttggccacatcacctaatttatattcatagaaatcgatcaacgccttactggtggagtaattgacaagcaaatcattgtccatcatccggtaagcggcgtccatgcttgccacctgtttggtttgttctccgtagttgatgatgcggttttctatattgtactcgattaaagaatcctcggcggcagtcagcattttgcccaatctggccagttcttcttgaaagaacttgatcacattgtttgtttctccatagcgtagttcatggtattgtttgacaaactcttcattcagaatctcaagtgtgttataagctattcccggatcgttggcactataagcaatctcgatcatatcactgtttcccaacctggctacttttatatgttgtgagagtagaggtacgctgaaataagggtgggtataattgagtagttggtagatgaaattattgacggacgggcgttcaaaagctaccagattatgataggtcttctcttcgttttgcttgtctatcaatgcctgtaactctcgtggaatgccggaaaccagctgctggtaatgtatggctgaaatataactggtatttctttcggcatctccatagaccagacagcgggcaagcagtttcagagatactattttcagtgtgcgttccgttgtaatgatattcattaaattactcatgtgcacggtggcgtttcgggtatcggtggcatctacgttgtatccggagatgattcctgtaaagatggtggttttcacatcatacgttttttccagatttctggtaagaaaccatgctatgataccggctatacatggaaatataaccatccaccaacggatgcggtagataaacttgactatgtatttaaataattccatgtttcttattcctttttgtcttttttcttacttagcctcttgttttcttcctgttcctgtatcgttgtttcttgaacgtccttttctccttgtatggtcaggatgggggtgtgggagattatttcgagggtcagcagctggtcgttaatagtagagcgtagtaaggcaaagtcttgattagcggcaaattcctgttctttagtcttggccacatcatgaatagaggtacgtctgtttctatattcctgttctgcaacagccgatgcacctttatataaagctatattttcagctgatctttgcaatgtttctatattggataaaatttggacatataaatgagctatttgtattttaagggtttcgtatgcttcctgttttcttaactcggcaatatccacctggattcgctggcgcttgattcctccccggaggtcgaacagcttttcaaaaggaatactgatgccgcctcccacattccacgaagtctgttctgtgcctacatacctgtaaataagtggggtgttgacatccgtattgctggccacattgtctgctataccgtaagaagcacttccaccggcatggataaaccccagccagttccttttctctttcgatagtagctttttctgtaactgtttctccttctctaaaatctgtaagcttggagtgctgcgtgcattctcataaaggacacttaacggaggcagctttatctttgcataatccacattcatattccccaatatatcatcctgtgtcacaagaggttgttgtaccggttgtgtttgctgctcttcctgttgtgcgcttaaatggtggatagaacaatacatacagatgacaaaaagacatactttacccatataataaatcccctttttattcctaaaacaaattatttaaacatctcctttttggacaaaagctgtcaaagtcttgaacaggattttcatatccaggaaaaaggagaattctctaccgtatttcaaatctaattctttgcgttctttagcggataattttccggcatccccccgtttttccacctgccacaagccggtcagcccggcaggcgccatgaagcgttcgatactttcatcgtttgtcaggcgttcggcttcatagagtggaagaggacggttccccaccacagacatgtcgcctttcaagatgttgaccagttgaggtaactcatccaggctgtattttcgtaaaacgcgtcctaccttggtaacccgcgggtctttttctatttttatgaaaggactttcatccagtgcgttttgtctggaaataaactcttcttccggaatgatgaagtcatcggaaaccagcattccgccattatctataacaccgtcatctccaaacatcagtcctcctaattcttccatcgagaaatctttggcaatctccggagtgccttccggctggtactggttctgaccggcaaggtctttcagctttttatcggcgtccgtatacatggaacggaatttcaggaaattaaaaatggtataattcgttcctacccgtttggatttgtaaataacaggtcctttgctttccatacgtatggctatggcaatcagcagaaagactggggacaggaagactaacgctgcaccggagaaaaggatatcgaagcagcgcttccattggggaaggataaaatgcctcacgtcttttttcttccggttatgtgcatatagcagttcctgccgtttattgatgatgtctattttctgccttaaccgggcggtggtgatgttcaaactgacggtatcgtttattccgctgttcagatagactttgctggcttcgggagtcagcctgtccgtaatgagtacgacatatgcctgatagaactttttcctgaaagcaccgatctgttcaatatctccgttcatctccccttgttcgtgaaggacaatgatgttctcacgtactttcagtctgatacaaattgtaatggcatcctggtagttttgggcataaatcatctggacattttcgagcttgctgaatttgcgcaaaaaatccttgttctttcctatataaagcagaaaggtcatgctgatttactcaatgattttcttaattcttacttttaactccatgggattgaaaggtttgacaatatagtcttccgcgccttcttgtaacaggcggatgcgttctgtggtactgtcttcgctgcttagcataaccaccggaatgtgtttgaataactgattggattttatccattccagaaactcgtctccacgcatttcgggcatacggatatctgatataatcaaatctggtatgttaccttcctgaagccattttaccccttcgatgccattcggtaaccaaatacaatcataatcactggccagatagattgaaaggacttttgcaattgctattttgtcgtccaagaccaaaattttctttctcatagagtaatctttagattttaatgggcaaaagtaaagaaaattattgtgaataaacaactttattctattaattttttggcgtaaagattgcttttccttaaccaagtgtctgaaatatggggttgaatggaataaaagtcctttggaaaaagggaaaaaagaagacgggacaactcctgtacattatatattgtagtgtatatgataagattaagatgtgatattgtatgatggatgatatttattatattgaaaaatagtgttttggaacataataaaaataaatatattgttttgtgtaattcgaaaaatagtatttatctttgctgccggaaatgataaaagccatattactatgtcggaaataaaccagacgattaatttacatgtatctgtggactgtgtgctgattgggtttgatggagagcagttccgtgtcctgttggtaaggcaggtggggaaacagtccgaggacggatataataacatgaagttgccgggcagccttatctatgacgatgaggatctggatgaggcggccaagcgggtgttgaatgagttgacgggcctgaagaatgtgaagcttacccagtttaaggcgtatggatcgaaagaccgtacccgtaaccctaaggatgtgctgtggctggaacgttttcatcgtttggacgagaagaaaatagaccgcattgtgactatcgcttacctgacactggtgaagattgacagacggttcgaacagctgtctgataaatacgatgcttgctggacacctgtgacggaggtgaaaagcctggcgttcgaccatttccagattttgcaggatgcattggtgcatatacgccattatgtggaatatgctccttccgcaatgttcgacttgcttccccggaagtttacggcggcccagttgcggactgtctatcagttgatttatgataaggtgtttgacgtaaggaacttccataagaagatagcgttgatgccatatgtagtacctttggaagaaaaacaggtaggtgtatgccacagggcggcacgcttctataagttcgaccgttcaatatataataagtcgggaacgaagtgataacagacagataactttagccttgttgtgattgctgtgagaatactccgcctggtcgtttcggggaatcggtatatgctttgggattcttcaccggcctttccttggaaggataatgctgatgcatcgggacagagactattatttttaaattcttaattttcaatttaaatgtacctattaggttatgatattggcagttcgtcggtaaaggcgagtttggtaaatgcagagaccggaaagtgtgtttcttctgcattctttcctaaaacagaggctgctattatggctgcccgccccggatgggctgagcaggatccgcaaaattggtgggaaaatctgaaattgtcaactcaggctgtcatggccgggagtgggatcggtccggatggaattgccgctatcggtatctcttatcagatgcacggactggtttgtgtggataaagggcaaaatgtattacgtccggctattatatggtgtgactcacgggcggttccatacgggcagaaagcgtttgaggcattgggggaaacgcaatgtctttctcatctgctgaactctccggggaattttaccgcttccaaactggcatggattaaagagaatgagcctgctgtatacgaacgtatttataaaataatgctgcccggcgattatatcgctatgaaactgacgggggatatttgtaccacggtgtccggtttgtccgaagggatgttctgggattttcaggcaaatgatgtcgcgggcttcctgatggattattatggattcgaccgttcgctgatagctgatatcaaaccgacttttggcgagcaggggcgtgtaaatgcatgggctgccaaagaattgggcctgaaagagggaattcctgtaacctatcgcgccggagaccagcctaataatgctttgtcgctcaatgtgttcaatccgggagagattgcttctacggcaggaacatcgggagtggtatatggcgtgaacggtgaggtgaattatgatccgaaatcccgggtgaatacttttgcccatgtaaatcatactgccgagcagacccgtctgggagtgttgttgtgtatcaatggtaccggtatattgaattcgtgggtgaaacgtaatgtggctcccgaaggtatttcttacagtgatatgaacaggctggcggcacaggctcctgtcggcagtgccggagtaagtattcttccttttggcaacggggcggagcgtatgctggaaaataaagagacaggatgctctatatgtggagttaattttaacctgcatggaaagcagcatattgttcgtgccgcacaggaagggatcgtgttctcgtttaaatacggcattgatatcatggagcagatgggtatccctgtacagaagattcatgccggacatgccaatatgtttctcagtcctatcttccgcgaaacgttggcgggagtgacaggggctgtaatcgaactgtatgacacggatggatcggtgggcgccgccaagggggccggcataggcgcgggtgtttataaagataacaacgaggcatttgccacattggaaaaactggaggtgatagagcctgatgtggcacagcgtactgcttacgatgatgcgtatgcccgctggaaatccaatctggagagagcgatggctgccttttaaggaccttcggataaagaaatggctattccgcctgcgtgttgaaaaaaaatagtagataaattagaacaagttattaaaataagtaaagaattatggctacaaaagagtattttcccggtataggaaagattaaatttgaaggtaaggaaagtaagaacccgatggcgttccgttattatgatgctgaaaaggtaattaacggaaagaagatgaaagactggttgaagtttgctatggcatggtggcatacgttgtgtgccgagggcggtgaccagtttggcggcggaacaaagaaattcccttggaacggtgatgccgataaggtgcaggctgccaagaataagatggatgccggctttgaattcatgcagaaaatgggaatcgaatattattgtttccatgatgtggacttgtgtgaggaagccgatacaatcgaggaatatgaagcgaatctgaaagagatagttgcttatgccaaacagaaacaggctgaaaccggaatcaaattgttatggggtacggcaaatgtttttggtcatgcacgctatatgaacggggctgctacaaaccccgaatttgatgtggttgcccgcgctgctgtccagataaagaacgctattgacgctaccatcgaactgggtggctccaattacgtgttctggggtggacgtgaagggtatatgtctttattgaatacagatcagaagcgtgagaaagaacatctggctcagatgttgaccatcgcccgcgattatgcccggagcaaagggtttacaggtactttcctgattgaacccaaaccgatggagccgactaagcatcaatatgatgtggataccgaaactgtggtagggttcttgaaaactcacggactggacaaggatttcaaggtgaacattgaagtgaatcatgctacgttggctggtcatacatttgaacatgaactggctgttgcggtagataacggaatgttgggatctattgacgctaaccgtggcgattatcagaacggatgggatacagaccagttccctatcgacaattacgaactgacccaggccatgatgcagattatccgcaacggcggtttgggtaatggcggtaccaactttgatgccaagacacgtcgtaactctactgatctggaagatatctttatcgcccatattgcaggtatggacgctatggcgcgtgcattggaaagtgctgctgctttgcttaatgaatctccttactgcaagatgttgtcagaccgctatgcttcattcgacagtggcaaaggcaaagaatttgaagaaggcaagctgacattggaagacgtagtggcttatgctaagcagaatggtgagcccaagcaagtaagcggtaagcaagaattgtacgaagccatcgtaaatatgtattgctgatccggccggaatggtattgcacaagttttacccttgcagaccttttttaagaaggagggctgtgcaatgaagtctgaatgaattctgctaacggattattaaagaataaacggctgtacaccgtcaggtggcagccgtttttatatttgttagagggatatttatgaaataatactcgcctatatcgaaaataatatctacctttgcggctgctaaattactaagtttattgaatttatatgataaaaaaactattatccgtactggtcttagtttttgccctctcaggttctgtgcttgcacagcaatctatgagtgaccaacaggtgttggaatatgtgaagacgggcatgcaacaaggaaaagaccaacgtcagattgctacagagttagcccgtagaggagtgacacaagaacaggctaagcgtgtaaagaaactttatgaacagcaaaatgggtctgctgataaagacgcaaatgcaacgatgcaaaatcggaaccgtttgcgtgaaaagacaaagacgcaggaagatatctatgtaacagagaattttactttcgaccaacgtccggttgcgggcagagtggtagggaagaacttgtcggacagtgtttctgccaatcgctattacgaggggatgggcatgggcgatatggaagaaatgcagaaggataaggtgtacggacgggacatttttgaaaccagaaaccttacattcgagccgagtgtgaatctggctactcctcctaattaccgtctggggccgggtgatgaggtaatcattgacatctggggtacaaaccaggccaccatccgcgataatgtatctccggacggatctatcacgatccccgatttgggattgatttatctgaacggcatgactattgccgaagccaaccaatatttgcgtaaagaactgaataagatttatgcagggcttgataatgaacagaacccgtcctcacaaatcaaggttactttgggaaacagccggacgatccaggtgaacgtgatgggggaagtgttccaaccgggaacttatgcattgtcttctttctctaccgtgtttcatgcactgtaccgtgccggtggcgtgagcgatatcggtagcttgcgcaatatacaagtagtgcgcggaggacagaaaatcgctaccgtagatgtgtacgattttattatgaaaggtaaaatcaatgatgatatccgcttgcaggaaggcgatgtgatcatcgttcctccatacgaggcgttggttagcatagagggtaatgtgaaacgccccatgaaatacgagatgaaaaacaacgaaagtgttgccacgttgttgaagtatgccggtggattttcgggggatgcctatacccgttctctccgcatgattcgtcaaaacggaaaggagtatcagatttatacgattgatgatattgattattccgtattccaggtaaaagatggtgatgcgctgactgctgaagctattctggaccgttttgagaacaagcttgaaatcaagggggctgtctatcgtccgggcatttatcagttcggaggaaccttgaatacagtccgccaactggtggaaaaggctgaaggccttatgggtgatgcctttacaggacgtgcggtgttgcatcgcgagcgcgagaatctgaagaaagaggttattcaagtagatataaaaggcatcatggacggtactgcacccgatgtacctttgcagcgtaatgatgtgctttatattcccagtattcatgacttggaggatgtgggaagcatcatggtgtatggtgaggttgcccgtccgggtgagttcgcttttgccgacaatacgactttggaggatattataatccaggctggcggattgatggaatcggcttctaccgtccgtgtggatgtttcccgccgtatcaaggatagcaaaggtacggaagcggtttccaccataggacaaatgtactcgttttctctgaaagacggttttgtgatagacggagaaccgggttttgtgttgcagccatacgatcaggtatatgtgcgtaagagccctgcttatcaggaacaggtgaatgtgcaggtgaccggtgaggttttgtatgaaggtgattatgcgctgacagagaagagcgaacgtctttccgatttgatcaagaaggcaggtggagtgactccgtttgcttatatcaaaggggcccgtttaagccgtcgtatcaatgccgatgaacgcaaacgtatggaaacggttctggacatggccaagactggaaaggactccattgatgtcaaccggctggatttgggagatatctattatgtgggtatcgatttggaaaaagcgatgcttaaacccggctccagtgcggatatcgtattgcgtgagggggatgtgattgaaattcccgaatacaacaacacggtacgtatcagcggggctgtgatgtatcccaataccgtttcatttgaagatggcaagacgttgaaatattatatagagcaggccggaggttacggtttccgtgcgaagaagagcaaggtgtatattgtatatatgaacggtcaggtgaagagagcgaagaaaggtagccgtgagctgatccagccgggctgtgaggtgattgttccggtgaaggaaaagagcaactggtctttgcagaacaccttgtccatagcaaccaccagtgcgtcgttggctactatgattgcatctattgctaatatcttaaaatagaaacagtatggcggaagataagaattatacgaataatacggaaagaccacgggaagacgaggagttggaaattgatttgatggagtatgtccgtaagttgtgggctgcccgaaagatgctgctgaaggttgccggaataggtgctattgtaggggtgattatcgctctgagtattcccaagcaatatacggtggaagtgacattgtctcccgaatccggtaaaagcggaggggggagcctgtcgggaatggctgccatgctggggatcggaggcatgagtctgggcagtgaggcggatgcgttgaacgtatctcttttcccggatatagtagcgtctactcctttcattctggaactgtttaatgcacatgtcactacgttggacggtgaggtggatactacttttgtagcttatctcgatgagcagaaagctccgtggtggggtgctgttatgggattgcccggggcggctataggcggggtgaaatctctcttctccgataaggaagaggaagaagggaacaggctggatcctttccacctgacagaagatcaggcgaagaaagtggaagccatgcgtaaggcgattactgctgatgtggataagaaaaccggcatcaccacagtgacggtgactttgcaggacccgatggttacggccgccattacagacacggtagtggtgaagcttcaggagtatatcacagcgtacagggtctccaaagcccagcaggattgtgcttatctggaacaattgtataaggaacgccagcaggagtattatgtagcccagcagaattatgccaattacatggatgccaacaagggggttgtccttcaaagtgctttgacggagagagaacggttgcagaatgatatgaatctggcatatcaggtgtatagccaggtggctacccaattgcaggtggcacgggccaaagtacaggaggccaaacctgtatttgccgttgtggaacctgccagtgtgccgttgctgccttcgggaaccagcaagaaggtgattcttgtcggatttattttcctggcagtggcgggcgcttccgcatggatcttgttcggacgtgaattctttgaaaatctgaaggcaggacttaatgctcctcaggaggggatggagaagaagtgatataaagatattgacctataaaaacagggtgcatctctttcgtaggaggtgcaccctgtttttataggtcaatcttcggaaatgttgccctgaacgttacgatagtccggtgtgcagttttcggcttctttaatttcactggcaaaaccggacaaacgcagaatcaaaactgcctttaatataaactttgattaaagtcgaaatccgtttgatagtctttcaatctcggatgtttcttgtccttgtcggacaaaataaccttgtcggccggaagtcgccagtctatgcctagatcggggtcgtcccatgcgattcctccttcgctttgcggagcataataatggtcacacttgtattggaacaacacctcgtcacttagtaccgcaaagccgtgtgcgaatccgcgggggataaaaaactgccggtgattctctccggtcaattctacagccacatgctttccgaaagtaggagaacctttccggatatctacagccacatccagtaccgctcccttgatcacacgcaccagcttgctttgtgtgaaaggaggtttctggaaatgcaggccgcgtaatacaccgtaagtagagaaactctcattatcctgtacaaatgtagtcctgcatactttttcttcaaattcacgtcctgagaagctttcaaagaaataccctcttgcatcattaaaaatacggggttccaaaatgaaaaccccgtctattgctgtttttataacttccattattctaatcccagttcttttataactttcagtaaatattgtccgtattggtttttaagcatcggctgggccagttcctgcatcttttccggagtaatccagccttttctcaaagctatgccctcaaggcacgccactttcagcccctggcgcttttcaatgacttcgatgtaggtacttgcctcggccagcgagtcgtgagtaccggtatccagccatgcgaaacctctgcccaatgtctgtactttcaattccttgtcctgaagaaattgctggtttacggtggtgatttccagttctccccgtgccgaaggcttgatattcttggctacttccaccaccttgttgggatagaaatagagtcccaccacggcatagttggacttaggttgggcaggtttttcttcaatagagaggcagttgccttccttgtcgaattccgctacgccatatctttcggggtcactgacccaataaccgaataccgttgctttcttgtcctcttcggcagcacgtacggattctctcaacatggcggacaggccgttgccgtggaatatgttatcacccagtacaaggcagacggaatcatttccgatgaatttctcgccgatgatgaaagcctgagccagtccgtcgggcgaaggctgttccgcatattcaaagcgtactccgaaatcgcttccgtctcctaacagtcttttgaagctcggtaagtcgtatggggtggagataatgagtatttcccgtatgccggccagcataagtaccgatataggataataaatcatgggtttgtcgaagacagggagcaactgtttggatactcctttggtaataggatagaggcgcgtgcccgaacctccggctagtacaatacctttcatatctttttattttttatatgtccctacgatttggattaataggcgtttttctcgccccggaacatgttggttactgtttttatcatgatgcggatgtcgagcaggaaagtccagttctcaatataccacaggtctcttcttaccctgccttccatttgggaaagttctttggtttctccccggtagccggtgacttgcgcccatccggtaattccgggtttgacaaggtggcgcatcatgtatttgttaatcagttgggaatattcctctgtatgtttcagcatatggggtctgggacctacaatggacatctctcctttgaatacattaatgaattgcggcagttcgtccagattgcttttacgcaggaagttgccgaacttggtcttgcggggatcattcttggtagcctgcaatgaatcggacaatgcgttcactttcatggaacggaacttatagcatttaaagattttcccgttttccccgtttctctcctgtttgaagaatatgggaccaggtgaggtaattttaataataagacctacaatcaggtacataaatggaaaaattgtaagtaaaaacagagaggaaaatgtcaaatcaaataaccgttttgccagtctgtttaccgggttctgcaacggctcggtacggatggacaatacaggaacttcacccaataattccagttgcagctgacgctttatgtaattacgtacatgaggtacgctatagaagcggatcagattgttctcgcaatagttcatgatggccagaatatcatcctttctgctggatggcagaccacagtacagttcgtgcacggtattatgggataaccattcaaataattggtttacaggacctttaaagggaattccttcggggtaattagagtccttctcatcatagaaaatgcctaaaaccctgtatccgtaagtcaaatcgttcaacgtatggtacagctccaccatattgtccccgtcgcctatcagtacagtggtgtgcaggttcctgccactgcggcggaacattttcacaaagaaccgcaatgtcagtcgccatcctatagctaaaggtatgaaagacagatagaaagcaagcagatagatgcgtgagaagttatctaccttaataatggccagcaccgtgaggaagatgactacatgcaaactgattgttcctaacaggcggcctacaatctgttccggacgcactatgcggttgtgcagtatgaccccaaagatggatatgcagggaatatagcacaggttggaagtcagcaggtaggttttcaatgaaatatgggctatggcctgtgaatctattcctttcagaataaaaaacacaagtatcatagaaaggttcaacaaggcaaaatcacctaatatcgctactagtttaattatatcagagttttcagttgtcgattgtttcatgacaaaaaaaatgttagtcgtatgcaaatataggacatataaattaaaacgcaatactttttttaaaaaataatacttatctttgcggtcatacaacgtaaaaaatgaatcatatgaacatcaagaataatcacctcgttataatggccggaggtgttggaagccgtttctggccgatgagtactcctgattatcctaagcaatttattgatgtactgggttgcggccgtacattgatccaacttacggctgaccgttttcaggggatctgtcctccggaaaatatttgggtggtgacatcagagaagtatgcggatactgtaaaggagcagttgcccgatattgctgatgatcatatcctgcgtgagccttgccgtcgcaatacggctccttgtatagcatacgtcagttggaaaataaaggcacgtaatcctaaggccaatatggtggtgacccccagcgatcacattgtgatgaatatcgcggagtttcagcgggtgattaattcggcgatgaattttacggccgattcggacgctatccttaccctgggcatgaaacctacccgtcctgagacgggctacggttacattgaagctgatctcagtgtaccttctaccgccaataaggaggtattccgggtgtactcttttaaagagaaacccgatctggaaacagccaggcgctatattcaaaaaaataatttcttctggaatgccggtatttttgtgtggaatgtaaatacggtggtgaacgccctgcgcgtatatcagcctgccatttcgaaggtgttcgagcgtttgcttccttattattatacggacaaggagcaggaaatgattgaccggaattttcctttgtgcgagaacatttcggtggattatgccattatggagaaggcggatgagatttttgtccttcctgccagctttgggtggagtgatctgggtacttggggatcattgcacgagaatttgccgaaagatgcccataataatacgcagataggtgagaatataaagttgtatgaaacccgtaactgtgtgattcacactacacaggaaaagagggtggtggtacagggactggacggatatatcgttgctgagaagaataacacattgctgatctgccggttgagcgaggaacagcgcatcaaagaattttcggcggagtaaatattctttcttgtatatattttatttctgcatacatggagtgtatgctgtctgtcatctgccgttctgtttggtcattccaccctttgccatgccgaaaggcagatagcagtagatagctatgtgatatgaaataaccaagagggcttgcataaggccatttacaataaacgaaatgaaaaaagtagctttaatttcaggtattacaggtcaggacggttcattcctggcagagtttttgattgaaaagggatatgaggttcacggtattctgcgccgttcttcttcattcaataccggtcgtatcgaacatctttatctggacgagtgggttcgtgatatgcaaaagacccgtctggtgaatctgcattggggggatatgaccgacagtagttcgctgatacgtatcattcaggctgtacagcccgatgaaatctataatctggctgctcagagccatgtgaaagtaagtttcgatgtacccgagtacactgcggaagcggatgcggtaggcacgctgcgtatgttggaagcggtccgtattctgggcctggaaaagaagaccaagatttatcaggcatcgacttccgaattgttcggactggtacaggaagtgcctcagaaggaaacgactcccttctatccccgttctccgtatggggtggccaagcagtatggtttctggattaccaagaactatcgtgaaagttacggtatgtttgccgtgaacggcatcctgttcaaccatgagagtgaacgccgtggtgaaaatttcgtaacacgcaagattactttggctgccgcacgtatagcccagggatatcaggacaagctgtatctgggaaatctggattctttgcgcgactggggctatgccaaggattatgtggagtgtatgtggatgattcttcagcatgatactcccgaagattttgtcattgcgaccggcgaataccatacggtgcgcgagttctgtaccttggccttcaaggaagtgggccttgaattgcgctgggaaggcaaaggggtggatgaaagaggtatcgatgtggcgacgggcaaggaactggttgccgtcgatcctaagtatttccgtcccgccgaagtggagcagttgttgggtgatcccactaaagccaaaacgttgctgggctggaatccccgtaagacttctttccccgaactggtgaaaatcatggtgaagcatgatatgaagttcgtgaagaaactgtatttaaaggctcaaatagcagaataatggaaaaaacagccaagatatatgtagcaggccaccacggactggtggggtctgctatatggaataatttgcagcaaaagggatataccaatctggtaggccgttctcacaaagaactggatttgctggacgggcaggctgtgaagaagttttttgatgaagagcagccccagtatgtcattctggcagcggcacatgtgggcggcatcatggcgaacagtctttaccgtgccgattttatttatcagaacttgcagattcagcagaatgtgataggggagagtttccgccatgatgtaaagaaactcttgtttttgggaagcacttgcatttatcctcgtgatgccgtacaacccatgaaggaagatgtgttactgacttctcccttggaatataccaacgaaccgtatgctattgcgaagattgccgggttgaagatgtgcgaaagctttaacttgcaatatggaaccaattacatagccgtgatgcctacgaacctttacggtcccaatgataatttccatttggagaacagccatgtgctgcctgccatgattcgtaagattcatttgggaaaatgcctgaatgaaggggactgggacgcggtgcgtaaagatatgaatcttcgtcccgtagaggggatagacggttcgcatacggatgaggagattctctccattctgaaaaagtatggcataaccgggcaggaagtaactttgtggggaacaggcaagccgttgcgtgagttcttatggagtgaggagatggctgatgccagtgtctatatcatggagcatgtggactttaaggatacatacacacccggttccaaggatatccgtaactgccatatcaatatcggtacggggaaggaaatcaccattgcccaactggcggacaagattgtcaaggaggtgggttatcagggcaaactgacttttgacgctacgaaaccggacggcactatgcgtaagctgacggatgtaagcaaattgcatagtctgggatggcagcataagattgatatagaagagggagtacaccgaatgtaccaatggtacttgtctaaaggatgaagatgtaagattatagatcttgcgggcataagattataaatctttcacatgcaagattatagatctttcaagcatgacatataaaaatttccggcataactttcaagaagctatgccggaaactgccctaaaaactatgtggatagattgtaaaaatcttctgccgttttctttattctttcgggaagcactttttattttaccgctttcagtgcggcctcataattcggttcctgggttatttcgggaacaagttcggtataaaccacttttccttccgggtcaatcactacaaccgagcgtgccaataatccagccaaaggaccatcagtcatcaatacaccatacttttcagcgaaatcggaagtatagcgataatcagacaaaggaataacgttggtgatgccttcagtagtgcagaagcgtccctgggcgaatggcaggtctttagagattgccaacaccaccgtattgggctggtttgcagccagctggttgaacttgcgtacggaagtagcgcacacgccggtatccatactggggaaaatgttcagaatcagatatttgcccttcccgtcttttaatgtataattgctcaaatctccttttaccaatgtaaattccggagctgaggttcctgctttcacaaattctccggctagtgttaccggtgttcctttaaatgctgtttttgccataattttattatattttagttcgatactgtaatgataacaaatttaaatggaaaaaagttcattcttttttattttcttcctttataaattaggaaacctactattaaaacgccgatagctataaagcaatatcctaactcgtggctgtattcggtgacggtactcaataactgctcttcgggaaccactgattgcagatagtaaccgatggctgccaggatggcattccagatacctgctcccagcgttgtgtacagcaggaaagtggataatttcatcttggccagaccggcaggaatggagataagctggcggacggcaggaataagacgtccgataaaggtggagagtgccccgtgcttgtcaaagtagtgttctgcgttctgaaccttggcttcatcaatcaggcacatgtgcccgaagcggctgttcgcaaatttataaaccagcggacggcctacgaaataggctatataataattgatgatggctcctatattggctccgatggtcgcaaatataactaccagaaatacattcaggtcactgtttcctccggcagccttataggcggcgggcggcactaccacttccgaggggaaagggataaaagagctttcgatggccattaataacgttattgtccaataattcaagtggtccagacaccactggataaatgcaactgattccataaaattattataaatatttgtttaagtttagcttgcctttgctgatatcgtccttgattacgcgtatcgcttcgttgaataacttgtcgggcaactgtgcgttttcatcaactcccagagctgcatacgtatcaggaagttctttattgattttagccagatagtgtatgaacggacctggtttctgtaaataaagatagccataaattagaaagaaataagtgctatgggcgttttggggaaattctttgtttatttgctcaaaataccggttggcatattcaaagagatgttcatcgaagtatttggagccgattttgaacaaaatatccatccgttcctctttcggggtgaattccagggcgaggttgaattgttcctccgccttgtcgatattgttctttctttcctcctcgctgatgtccttgctgcctgccattatcgtgaaaaactgtccggcatagatacgtgtttccgcatcgttcccgttctgcttcagcacttggtccagatacatatatccctcttcaggatgccccagggctacatgacagagggctgcgatgctatatatatcggttagctcgaatgcagtaatctcctgtttctgttttaacagcttttgtgtatacttcatggcggtttcgtaatccttcatctcgaagtggagaccggccaatgccatataaacgggaggcttcttctctgtcgccttttccaaacggagataatagttgatagattccttgatatttgctgtctggctgtaaaggaatgctttcaaggtcaatgtctctgtgttgttttcatcaatggctaatgcgaaatcgaaagcctcgtgcgcgttttcgtattgctcttgttgcagatagcatttacccagttcattccaatgctgaacggaataggggaactcgttcagggtcatgttcaggtaagggatagccaagtccggtttgttgaaagtactgtaataatcgcacagcacgtcgcgaagacgttggttggtttccggcagggtttgcatgtcgaaatgggcaaacaggcagtcgatccacttcttggcgtattctttctggttgacgtcaacgtagttcagaatgatgtccagcagcgtatccagttcatactcctcgtccatggccagttgttgtaatatctcatcggcctcttccatgtgttcctcctctatcagcaggtcggcttgcaggaatctgaattcacggtcggcagggttgttgatgagctgcatcaccatttgggcttcttctttttttcctagcagcatcaaggaacgtgcccggaaaatcagggcgtccgtgttatcggggtgcaattggattgcaaggtctatggccttgtcagcgtctttatgtcttccttttgaggcgtaatattcggcgatatcgatcaattcatcagcttcaaaataagcgggggtatggctttccaccataccctcgtattttgccaatgcttctttaaattccgggtcttcaaagtaagaagacatgtcgtagttcataagcttgtttttatttattgattttgctccaggtatcttttaaagatacggtgcggttgaacaccagatgttccggtgtagagtctttgtctacattgaaataaccgatgcgctggaactgcaagtaatccagcggtttggcatcggccagatatttctctacatagcagttggttaatacattcaacgaatcggggttgatcatttctttcatggcttccagtgcgtcgcagttctttgcttcgcggatggcggccatctcatcacgcgggttctccactttccacaggcggtcgtacaggcgtacttcggcaggcagacagtgtgcgtagcttacccagtggatggtacctttgattttgcggttgctgcccggcatacctgttttgctgtcgggatcgtattcgcagtatacctccaccacgttgccgttgtcgtctttcttgcagcctgtgcatttcacgatgtatccgcttttcagacgcacttcctgtcccggagtcatacggaaatatttcttcggggcgtcttccatgaagtcgtcgcgttctatccacagttcgcggctgaattcgatggtgtgtgtgcctgccgacggatcttccgggttgttgacagcttccatttcctccacctgtccttcgggatagttggtaatgatcagtttcaccggattgatgactgccgatacacgggtggcacggctgttcaagtcttcgcggacagcgctttccagcagggcgaagtcattcagggcatcgtaagtggtataacctatcttgtctacaaatttgcggatggactcgggcgagtagccgcgacggcggaaaccgcagagagtcggcatacgggggtcgtcccaaccgtttactagatgttcttttaccagaatcagcaggttacgcttgctcatcaaggtgtagttcaggttcagtttgttgaactcatactgatgaggacggttgtcgtccagatctttaccctcttttacccagtccacgaacaggtcgtacaacggacggtggggtacgaactccagggtacacagcgaatgggtcactccttcaaaatagtcgctctgtccgtgtgcgaagtcatacatggggtatgctttccaggtttcgcctgtacggtggtgcggagtctttaccacacgataaataatagggtcgcggaagtgcatgttggggcttgccatgtctattttggcacggagcaccattttgccttcttctatttcaccgctgttcattttgttgaacagttccaggctttcctcgatgggacggttgcggtaagggctctcggttccgggttgggtgggagtgcctttttgtgccgcgatttgttctgagttctgttcgtctatataagcctttccttcctttatcagattgacggcgaaatcccataattgctggaagtagtcggatgcataatattcgtttccccactggaatccgagccattggatgtcctccttgatggcttccacgtattccatatcttctttggtcgggttggtgtcgtcaaaacgcaggttacatacgccaccatagcgtgcagctatcccgaaatccagacagatggctttggcatgaccgatgtgcaggtagccgttcggctcgggcggaaagcgggtttgtactttccctccgtttttaccttctctcaggtcgttctcaactgcctgttcaatgaagttcagacttttcttctctgtagcttctgtagcgttcatttcagtcattgtgatatcaattttacacttttgctgcaaaagtacgcattctttttgggatatcctttatttcacaggaatatatccaccgttttttataatattttgcccctggggcgacaggatatactcgatgaacggggttactttttccttattggctacgttgtaatagtagtaaagagggcgtactacggggtaaagtttcttctttccgttttcaaggctgggcagtacatagtgcttgccgtcgtcgtaggaaacggcgatggctttcacccggggggacaagtaggccagtcctacatagccgatagcgcctttggtctggcttacagactggatcacggctccggtggcgggcatggacaagctgctgctcatgtagttcttgttcttcagggcgctttctttgaaaaattcgtaagttcccgaagaagtttcgcgggaatagacaataattttcatatcgggtcctcccagttgcttccaattggttatcttgccgcggaatatggcttccagttgctggcgtgtcagttggctgacagggttggacgggtttacaatgacggccagggcatcatacgctatgattacctcctccacttcctgtttggcggctttcagtttcatcttttcgctgaatttgatgggacgggaagccatagcgatatctgtcgtgttgtccatcagggcggaaattcccactccggttcctccgccggtgacggttacccgccggtcgggatcatctttcatgaaaatctcggctgtttcctgtgacacaggcaacaccgtgtcactgccttttatgcgttgtgcggtaatattcagactacaagccaatagaataaaaagaaatagagcttttaattgattcataagttcttatattaattcgtgtgcaaaagaaacgttttcttgtgtcatttgttttactggtgtgttacgattctgttacgggcaatattcgccggcaagggtggattgaatccgtccttgcgggaaaatggcaataagatcaggattgtctttgcttgtaacaagtttgtaatataattgtagcaaatacttcaagcttctttcatatcaccttaatataaagaggctttttttgcatcggttattaaaatagaagactaaaactgtatgaaacgagtttgggaaaagattgtagaagggatattgacttgcagcggttttgtaacgagcattactattttgctgattgtcgtattcttgtttgcggaagctttgggactttttaataaaaaagtcatagaagagggatatgtgctggcggtgaataaagccaatccggtgcaggaactgagtgcggcacaaataaaagacgtttttgacgaagagattaccaactggaaagagctgggaggaccggatgcggaggttaaagttttccggttggaggatatcacttcctatttctcggaggaagagttgggagccgggtacgagaaagccccccggtgcatcggcgagatcgttgccggtaatccaggcatcatcgcctttgttccctccaaatttatagaaaaggattttccgggccacctgctgaaagacgagtctatttcttttgacgaggtttttgccggaaaggaatggttccctacggctactcccgcccctcagttcggatttcttcctttgattacgggtacgctttgggtgagtttctttgccatcctgttcgctttgcctttcggcttgtcggtggcggtgtatatgtccgaggtggccgaccatcggacccgtagttttctgaagccggttattgagctgctcagtggtattccgtccgtggtctacggtttctttgggttgatagtcatcgtaccgcttattcagaaagtctttaatctgcctgtgggcgagaccggattggccggaagtattgttttggctatcatggcactccccactatcattaccgtaagcgaggatgcgatgcggaattgcccccgtgccatgcgcgaagccagtctggcattgggcgctacccgttggcagactatatataaggtggtgatacctttctctgtttcgggaatcacttcgggcgttgtcttgggcatcggacgtgccataggcgagacgatggcggtgctgatggttacaggaaatgcggccgtgatacccaccactattctggagccgctccgtaccattccggcgactattgcagcggaactgggagaggctcctgccggcggcgcgcactatgaagccctgttcctgttgggagtagtgttgtttttcatcacgatgcttatcaactttagtgtagaatatatttcatcaagaacaaataaataatgtactgatttgccggtgtgctaatgatcatgcggcacacagcgtagccaatgggtatatggatagattgacaaatgattaattaagtatttaagatatgaagcaagatgttttccctgtcgggcaaggggcgcgtaaaagacgttcgcaatggctggcattcggcattttcaaactgttgagttatagcattgtcctcattctgttcgccattctcggttttattatatataaaggtataggagtaatcagctgggagtttctgaccacggcgcccagtgacggcatgacgggtggcggtatatggccggccattgtaggtactttttatctgatggcgggcagtgcgctgttcgcttttccggtgggagtgatgagtggcatttatatgaacgagtatgcgccgaaaggcaagctggtctgctttatccggatgatgaccaataacctgagcggtattccgtccattgtgttcggtttgtttggtatggcactgtttgtgaaatacatggggttcggcgacagcatcctggccggttctttgacgttgggattgctttgtgtacctttggtgatacgcaccaccgaagaagccttgaaggcgattcccgacagcttccgtgaagggagtctggctttgggcgcgaccaagctgcaaaccatctggcatgtgattctgcctatggggatgcccaacatcattaccggactgattctggctttgggacgtgtatcgggtgaaacggcgcccatcttgtttacgtgtgccgcttacttcctgccgcaactgccgcatagcattctggaccaatgtatggcattgccttatcacctttatgtgatttctaccagcggaacagatatggagtcacagcttcctttggcatacggtacggcgttggtactgatccttattattttaattataaacctgttggcaaatgcactccgccggtatttttccaacaaagtaaaaacgaattaataatttgtcgatgtgccgatgggttgcgctgtgtaccgcacggacattggtacattagcacatagacaaatcagcaaattattaaaacattaagaatatgaataagatagatgcaaaacatgtaaattttttctatggtgattttcaggcactgaaagatataagcatggcgattgaagagaaatcggtggtggctttcataggcccgtccggctgtggcaagtccaccttcctccgtctgttcaaccgcatgaacgacctcattcccggctctcgtctggagggggagattttgattgacgggagaaatatatacgacaagtccgtgcaggtggacgagttgcgcaagagcgtagggatggtctttcagcgtcccaacccgttcccgaaaagcattttcgagaatgtggcctacgggcttcgggtaaatggggtgaaagacaatgagtttatccgccacagggtggaggaaaccttgaaaggagccgcattgtgggatgaggtgaagaataagttgaaagagtctgcgtttgccctgtccggtggtcagcagcagcggttgtgcatagcccgtgccatggctgtatctccttcggttctgcttatggatgaaccggcttcggcactggaccctatctctacagccaaggtagaagagttgattcatgagctgaagaaagaatataccatcgttattgtcacccacaacatgcagcaggccgcgcgtgtcagtgacaagacagccttcttctatatgggcaatatggtggaatatgatgatacgaagaaaatatttacgaatccgggcaaggaagcgacccagaattatattacagggcgtttcgggtaaagcattcatcacagcgttgcacagatgggagataagataaaactggaactgatgtgccacaacccgatgcgggcttgcttgcttttcagatctaatggtacggatttgtctttttattcttctgtccggaaaattaaaatcagtgtgaatctgcgcaatctgcggtgaaagaaataatgataaacaaaacaagaattaagaatatggtgaaatttatagaatcagaacttgtatcactgaagaaggaagtgaacgagatgtggacattggtttacaatcagctggacagggcaggagaggctgtgctgacctttaaccgtgaccaggcacagcaagtcattgtccgtgagaaaagggtgaatgcgttcgagttgaaaatagacagtgatgtagaggacactatcgctctatacaatccggtagccattgacctgcgttttgtgctggccatgttcaagataaacagtgatttggagcgtttgggagattttgccgaaggcatagcccgttttgtggtgagaagcgaggaaaccgtgctggatagtgaactgctccacagcctgcgtatagaagagatgctgaaacaagtgctcggtatgctcgaaatgaccaagaacgcgttgaatgaagaaaatctggagttagccctcaatgtattcagtaaagataatttgctggacgaaatcaatgcggctgctcctgccgtccttacaaaatatctggaaacacaccccgataatttcctgacttgcctggaactcggcaccgttatccgtaagctggaacgtgccggagaccatataaccaatatcgccgaagaaattgttttcttcatcgatgcaaaggtgctgaaacatcgcgataaggtagatggacatttcttgggaaaagaaaaaactcattaaaatgctgttttagtctatatttttgctacctttgtatatataatgaggccgataaagatcattttgaataataatctgccaaaaaagacagaaaaatctaaaaacatgttgtatggcatagttttttatttggctggtttaaaaaaaggctcgatatttgcatcgttatcctgaaaacaatctttttaccttaaaaaaaaactaatacctattgaaaacttaaaaagggggctttgtgaaaagaccccttttttatttgctgcataatggttcttccggtgttaaatttcacctatttattggtcaatatgtaagatttctgtatttattagcttatattagcaactttcttttaagttaatgcttaactttgttccctcataaaaatagcggtgaaaagaatgaagacaaaatatatcaagtcgtttctactatttttgttattaggatgctgcatttcggtgtcagctcaaaatatacaaggcgttgtaacagactcattgacgaatgaacccataccctacttgtcagtcttttatgaaggaaaaggcgtaggaagtattaccgataatgatggaaattataaggtcgaaacccgtaaaggctggaataaactcaccttttcggcggtgggatatgtaacaaaagtggtgaatataattcccggcgtcaccaagaacctgaatgtgaggatgagaccggatgatatcatgctggacgaagtggtggtgaagcccaaacgagagaaatactcccgtaagaataatccggcagtggaactgatgaagaaggtgatcgctcataaaaagaataataagctgagcgagaacgattactatcagtacaataagtatcagaagatcacgatgtcactgaatgatgtgactcccgagatgctggaaaaaggcatgtataaaaagatgcctttcctgaaagaccagatcgaactttgtgaggaaaccaataaattcatccttcctatttcggtggacgagaccgcttcgcagaaaatttaccgtaaacatcccaagagtgagaagaccattatcaaaggaatgagctctacgggggtgaacgagctgtttgcaacgggagatatgctgagcacggtgctgaaggatgtatttacggatgtgaatatttacgacaatgatatccgtctgttgcagtatcctttcatcagccctatttcgtccagtgatgccatctctttttataagttttacattatggacaccacattcgtggacaaggacaagtgtttccatctcaccttcgttcccaataactcgcaggacttcggttttacggggcatctttacgtattggccgactcgtcttatacggtgaagaaatgtacaatgaacctgcccaagaaatcgggggtgaactttgtagacaatatggatattattcaggagttcgagcaattgcccaatggggagtgggtgttgaaaaccgatgacatgattgtggagatgaccttgatgaagatcatgcaaggattccagatacgaaggactacccgttactctgattatgccttcgatgagcttccgcagcaacttttcaagcgtaagggggccgagatcaaagaggcggacgccatgatgcgcggagacgatttctggaatcaataccggccggttccgcttacgcagaccgagagttctatggatatgctggtaaagcgtctggagcagatgccgggattcaaatatgtgatttttgtattgaaggcgtttatcgagaactttgtggaaaccgggaccaaggagcatcccagcaaggtagatatcggtccggtaaacaccatgatctccaataactatatcgacggattgcgtctgcgtatgagcgcgcagaccacggccaacctgaatccgcatctgttcttcaagggatattacgcttacggattcaaggatcatcgttccaagtatatgggtgaggtggaatactctttcaacaagaaggaatacctgccgcgcgagttcccgaagaactccatcacgttcagctatcagtatgatgtgatgtctcccacggataagttcctgaagacagataaagacaacgtgttcgtatctttcaagacttctacggtagaccagatgtcctacgtgcggaatatcgccttgaagtatgagaacgagacacagtttggcctgaagaccacggtggaagtgaaacacagcacagacgagcctaccggcggtctggcctatataaccaatgatgaccagaaaacgttggttcctgagattcagaccatggaagcctccctggccttccgttacgctccgggtgagacatttgtcaataccaagcaacgccgtattccggtttcttttgacgctccggtatttacgctgtcgcacacggccggtttcaagggcgtgctgggcggagagtataactataacttgacagagatcgggctgtacaagcgtttctggttctcgtcatggggtaagatcgacatgttcgtgaaaggcggtgcgcagtggaacaaagttccgttcccgttgctgatcatgccggcggccaacttgtcctatatcctgcagcgcgagactttcaacttgattaataatatggagttcctgaacgaccgttacgcctctctggatgtatcgtgggatttgaacggtaagattttcaaccgtattcctttgctgaaaaaactgaagtggcgtgaggctatcggcttcaagatgctgtatggtcatttaaccgacaagaacaatccgatgaagcatccgggtgacagcgagcttttcctgttcccgacccgtgacggacgtcctaccagctttgtgatggatccgaagaccccgtacatggaatgctctgtgggtattcacaatattttcaagatattgcacatagactatgtccgccgtctgaattatctggatcatcccgatgcgaacaaatggggcgtgcggtttatggtgatgatgacgttctgatgcaaggagagctctgatggtgtgtgaaatgaagaaaccgaggtaagaacttgtatcgttcaaataaaaagtttatctttgttccagtacctaaagttggtgaaaagtatgttatgcttagatgaatgtaaggcaaagttagttagtttcaaacaatgttttgggcatgagtttggaattaaatcaattggtatcttcggttcggttgcacgtcaagagaacagggaagatagtgatttggatattgttgtagatattgataatcctactttatccactatgtacactttgaagactgttttgacggaaatgtttcattgtgaaattgatttagtgcgtttccgttcctcactgcctccatttttgaaacagaatattgaaaaagaagccatttatgtataaaggaggacgactaaccatttgcgacaggttaacccagataaaagaatccatttactatatacagcaatggagtaaagaaataaattgtgctgatgattttttagcctccatggataaagtgatggtgttcaatgcatgtgttatgcgccttcaagtaataggtgaacaggtaggaaagttgttgtttttacaaccatcaccgctttctgaatataaggaaattccttggttggctatttatgatatgcgcaatcttatttcgcatgaatatagtaatgtagacgagcagatagtatttactactataaagaatgaccttatagaattggataaggttattacagtcctattgaataaatatttgtaaaacttgaatcttttattgtgattacgaaatatacccatctcttattttcttatcaaaagtaagttttcctattttttaagcgcttttattgtgtaatacacaattatagtgtatctttgtgccctcaaaaagtttctaaattccttttatataaagggtaaagaaccttttttgagggtataaacatgtctataaaaagcagacagaaaagacgtcttcggacgaaagaaacaacaaataaaagatttcagaaatacaaaatgaaatctgtgtaaaaagctatttatcagccagttataaacactgtgctgatatggtcttccagtatcggtcagcgtggatttctgacgataaacctcatgaaaaagctatcccatcagtttgataaaccgaagcgttctgtggcatctcccgaagcgttggaggctttgcggaataacaatgccgtgcgttggtatgtgttgtcgcttcccgactgtcatcggggaggagtgcgcggtttgcaacgggaacaggaccgccgcatacaggcaggcgagccctcattcggcttttttgctccttcctatcaggaagtgaggcgtatagacggcaaattcgtcaatacccagcgtcccttactcttcaactatgtatttgtccgtgcttccgagcgtgatgttttccaactgatgcaacgttttcctgtactcagtttcctgcctcgggtgagggaacggaagcgggagtattttccctacctttccgatgccgcaatggagaatttgcagtgggtggcccgttcttattccaatacacttcctgtttatataccccagccggatggtttgcgcaagggcgaccggatacgcattaccgagggacggtttaagggggtggaggcgactgttgtcattcagccgggagccggtcgaaaggatgtgatggtatgtgtggagaactggatgtgggttccgctgctgcgtgtgatgccgggtgagtatgaggtaattgccctgaatgatgaggacaagcatgtatatacccgtctggacaatgactgtatgttgaatggtttgcacagtgctcttcagcgttatcacagtgtggagggggtgagtgaggaagatcgttccctggctgccagggcgttgaaagaatatggcaatctccggatggatacggatgtgatgcgttgcaagctttatgccattttgctgccggcttatactatattgggtatggaagaagaggcggcaaagctggttggcgttatgcagactatgcttcctctcgtcaaggcggagcagtcgcgtgcacttgctgtggttacactttatggttgtacggatagcagtatctattatcatttggcgcacgaggcggttgatccgtggaagaaagaggaaaagccgaaaaagagtaagcagcagctgatcaaccggttggatgattatgatcggtggttgaggcattgaaatggctttgtagctggtaagaacagtgttgtgaattaaaaacaggttgaatcgctaggataagtgaaatataatttgttcttttgtttgcaataaaaactagagaatatgaaatcagaaccttttaacccagtccagttacacttgttaaagatgttttcttatgctaaaggcgagcgtgccttggaagaaatacgtaaatctttgacagcctactttgctcaaagagtagaggaggatatggataagttgtgggatgaaggtctgtgggatcaggataagaatgaggctatattgaaagaacatttgagagtgccttataatgattgatatagtattggatgctaattgtctgatttcatatatttcgttaaaaagttgttcaatgaatacgttgaaaggcttaggttctgatattaagttaagatcaataaaacaagtgtctgcttctttactagctgatgatgatgtgccagatactcttctcgattggacctcagaatttgcaggacaatgggaagatgatcgtacggcagatgaggttattgaggatatacgtggtgcaaggacttcgaatagggaaatacaacaatgaaaatcatcaaagcatttgcttcccttttgctttcttgaccttattctagtgcattcagtgcccaaataacagttatatatttataatggcgaaatcagtaaaagcgaattatctatttaatctgataaattccgcttcccaactcttatttccactcattacttttccttacgcttctcgtataatgatggcggatggtataggacaagtgaacttttttcaatccattatttcctatatcagcttgttcacttgtttgggtattccgatgtatgctatacgtgaggtagctaaagtacgggataatccggaaaaaatgacacggattacagttgaaatattattgttacatgcctttcttactcttttgggttatatggctgttgctgtcatttgcttgacggtaactaaggtgcaaaccgatatacctttgtttcttctgctcagtgccaccattttttttacggcgataggttgcgaatggttttatcaaggaatagaagattttaaatatgttgctattcgtgggatggtagtaaagaccatctccgttatattactgtttctgctggtaaagtcaaaagaggatattttatggtatggagcttattctgttttaggcgtactgggaggaaatatttttaattttgtccgtttaagaaaatatctgcataaggatatgattgaatttagggcgttgcatcctttcagtcatttaaaaccggctatacatatttttgcttttaatgtcattgttagtatttatcttcaattaaacaatgtattattgggttttatgaaagatgctgaggctgtgggatattttacggctgcaactaaaattctagtcataactatgagtctttctagttctttgggagcggtaattatgccacgcacttccaatttgatagctgaaaataagatggatgaatttaaggtcttgattcagaaatcatacgattttattttagctttggcaatgcccttgactgtgggattgatatttactagtcctagtgttattctattgttaagtggtgaaagttttgccccagctatattaacttcacaaatagtagctttgaatattttaatggtaggcatctcgggtgtaatggggcttcaggtgctttatccgatgggtagaataaatattgttattctttgcacattcataggtgcggtagtgaacgtggtgttgaatgtattactgattcctgtttatggacataatggtacggcagtggcttatatgttggcggaagtagctgttactgtttccatgttcattattgggagaaggtatattcctattcagttttttaagaaagaacatttgcattatgtgttaggaagtgttgtgatgggaggctgtttgtatat

SEQ ID NO: 3874 - DNA, 48119 bp, Unknown
  gut microbiota DNA sequence
gcgtcacagtgggagagtaggtagccgccgttttgattgaagcctccggacttgaagaagttccggaggctttttttgtatacgcacgtgtgtggggagtctagtaacggaaataatcctatgttctgtaacatgaatatggtatatttttctctttttgcagtacttttagtgtaaattctatcattaaattctttttctatcattgatttttgtacttttgggctattctttttgaatttattgaagaaagaaagtgttaaactcaaaaaaatatcttctaagaatatggaaaataaaattcaggagcttaccgataagatttatcgtgaaggtgtggaaaaaggaaatgaagaagcacagcgacttatcagtagtgctcgcgatgaagcagcaaagattgtagaggatgcccgtaaggaagctgagtctattctcgctgtagctcggaagtcagccaaggaaactgccgaaaatacacaatcagaaattaaattgtttgccggacaagcagtaaatgcattgaagaccgaaatagctaccttgttgaccaatgaggtagtcagtgaaagtgtgaaaggatttgtggcagataaggagtatctgaataagtttatagtttcattagctgcccaatggtctgctaacgaatctatcgtgatctctaccgcagatgccgaaggacttaagaaatattttgcagcgaacgcaaaagctttgttggataaaggagtgagaatagaagaagtgaacggaacgaaatcactttttactatctcaccagctgacggctcttacaaagtgaacttcggtgaagaggaatttgaaaattatttcaaggatttccttcgtcctcaattagtagaaatgttgttttaaaacgggactatgacaaattattattgcctggtagccggtttgccggatctttcgttggaggatggcaaactgaactatacagtggctaattttaaatcggaaatctattcggaattatcggaaaaggataggaagttaatcgacttgttctatttgaaattcgataatgctaacctgttgaaactgttgaaagataaggaagctacgacagattttgaggggaattattctcagaatgagttgctggcgcttatcagttcggtgcgtgaaggcgatgctccggataagagatacccatcttatctttatgaatttattactgcttatttggctctttccgcagaggaactctatcgtgcggaagatatgttatctgcctgctattatgcgtatgccatgaactgcggtaatcaatttgtttcctcctggtttgaatttaatttgaatatcaataatatactggctgccttagctgcacgtaaatataaaatggacgtatctcaggtagtagtgggcaagacggatgtgagtgagatgattcgtacatcgaatgcccgagatttcggtttgtccgagatgctggaatattttgagcaggtactccgtatcagcgagattgaagaattagtggaaagggaaaagaagatagatttgttgaaatggaactggatggaagacgctgtctttttcaactattttactgtggagcggattttcgtgtttttgttgaaactggaaatgattggccgttggatttctatggataaggaaaagggaagcgaactgttccgtcagattattgataaattaaaggacgagatacagattcccgcagaattcagataataaacagattaaagatatatggcaacaaaaggaactgttagtggcgtaatagccaacatggttactcttaccgttgacggaccggtggcacagaatgagatttgttacattctgactggcggagaccgcttgatggcagaggttattaaggtggtaggcagcaatgtttatgtgcaggtgtttgaaagtacacgtggattgaaagttggtgctgaagccgaatttacgggacacatgcttgaagtgactctaggtccgggtatgttgtctaaaaattatgatggtctgcaaaacgaccttgataaaatggatggagtgttcctgaaacgcggacaatacacctatccattggataaagaaagagtgtggcattttgtaccgttggtgaaaatgggtgatgaagttggtccatcggcttggttgggacaggtggatgagaacttccagccactgaaaattatggtaccatttcagttgacaggtacttataaagtgaaatccattgttcctgaaggtgattatactattgaggatactgtagtggttctgacggacagagaaggtaaagatattccggtaaacatgattcagaagtggccggtaaagaaggctatgactaattataaggaaaagccgcgtccttataaattattggaaaccggtgtccgtgttattgatacggtcaaccccattgtagaagggggaacgggatttattcccggtccgtttggtacagggaaaacagtgcttcagcatgccatctccaagcaggcggaagcggatatcgtaattatcgctgcttgtggtgaacgtgcgaatgaggtggtggaaatctttacggagttccccgaactggtagatccgcatacaggacgtaagctgatggaacgtactatcattattgccaatacctcgaacatgccggtggctgcccgtgaagcgtctgtgtacacggctatgaccatttctgagtattatcgtgctatgggattgaaagtcttactgatggcagattctacttcccgttgggcgcaggccttgcgtgagatgtccaaccgtatggaagaattgcctggtccggatgcattcccgatggatatctcggctattatctccaacttttacggacgtgcgggatatgtacatctgaataatggtgagaccggttctattacctttatcggtactgtatctccggcaggtggtaacttgaaggaacctgtaacggagaatactaaaaaggtggcccgttgcttttatgccttggagcaggaacgtgccgacaggaagcgttatccggctgtgaacccgattgactcttattcaaaatatctggaatatccggaatttgaggaatatatcgccaaacgtattaatggtgaatggattggtaaggtgaacgaaatcaaaacaagattgttgcgtggtaaggaaattgctgaacagattaatattttgggtgatgatggcgtacctgtagaatatcatgtaatcttttggaaatcagagttgattgattttgtgattctgcaacaggatgcttttgatgaagtggattcagtgactccgatggaacgtcaggaggagatcttgaatatggtaatcgacatctgtcatacggaattcaagtttgatactttcattgaggtgatggattatttcaaaaagatgatcaacctttgcaaacagatgaactatgctaaatataaatctgagcagtatgaggattttaagaagcagttacaggaattggttgccgagagaagtgtctgattttaatttttaattttaatttataatgagtagagatggcaacaaaagcatttcaaaagatatatactaagattagccagattaccaaggcaacctgttcgctgaaagcgtcaggagtgggctatgatgagttggcaatggttaatgggaaattagcccaggtggtaaaaatcatgggtgatgaagtgactttgcaggtgttcgagggtacggaaggtattccgaccaatgctgaggtcgtattcttgggcaagtcgcctacactgaaagtgagcgaccagttggctggacgtttcttcaacgcttttggtgatccgattgatgggggaccggaaattgagggacaggaagtgcctatcggcggtccgtctgtgaatccggttcgccgtaaacagccgtcggaactgattgcgaccggtattgccggtatcgatttgaacaatacgttggtatcaggacagaagattcctttttttgctgaccctgaccagccgttcaatcaagtgatggccaatgtggcattgcgtgccgaaaccgataagattatcttgggcggtatgggtatgactaatgacgactacctgtattttaagaatgtattttctaatgccggtgcgctcgaccgtattatcagtttcgtgaatactacggaaaatcctccggtagaacgtctgttgattccggatatggcgctgacggctgctgaatattttgcagtggaacataatcagaaagtattggtgttgctgactgatatgaccagttatgctgatgcgttagctattgtgtctaaccgtatggatcagattccttccaaggactctatgccgggatctctttattcggatttggcgaagatttatgaaaaagcggtacaattccccgcaggtggttcaatcactattattgcggtaactaccttgagtggcggtgatattacgcacgctgttcctgataatacgggttatatcactgaaggtcagctgttcctgcgtcgcgatagtgatatcggtaaggttatcgtggacccgttccgttcgttgtctcgtttgaaacagttggtgagtggtaagaaaacccgtaaggatcatcctcaggtgatgaatgctgctgtacgtttgtatgctgatgccgccaatgccaagactaagatggaaaatggttttgacttgactaattatgatgaacgtactttggcattcgctaaagattacgctaatcagttactcgccattgatgtgaatctggatactactgaaatgctggatgttacatggggattgttcagcaaatactttaagccggaagaagtcaatataaagaaagaattggttgaccagcattggaaaaaacaataaattaacgaagaaacatggcaataaagtttcaatataacaagacctcgctacaacagcttgagaagcagctcaaggtccgtgtgcgtacgcttcctattattaaaaataaggaaagcgctctccgcatggaagtaaagagatgcaagacagaagctgccgggttggaggaaaggcttgaaaaacagattcaggcatacgaggccatgttcgcactttggaatgaatttgatgcttcattaataaaagtgagtgatgttcatttgggtataaagaagattgccggtgtacgagttcccttgttggaaaacgtagactttgacatccgtccctacagtctgttcaacagcccgaagtggtattccgatggaatatatttgttgaaaggattggcacagactgctattgaaagggaatttatgcttgccaaactgaacctgctggaacatgcgcgtaaaaagaccactcaaaaagtgaatctttttgagaaagtgcagatacccggatatcaggatgctctgcgaaagataaaacgatttatggaggatgaagagaatttgtccaaatcatcgcagaagattctgaaatctattcaagagaaaagaaaggaggcggaggcatgattacaaaaatgaagaagttgactttccttatttatcataaggactatgaatgtttcctgcaaaatatccgtgatttgggcgtagtccacgtggcggaaaaagcgcaggggacagcggagaataccgaacttcaagagagcatccgtctgtccgaccactatgcttcaactattaagtttttgcaaggttttaatgttgaactgcaagaacagaagggggatacagcccgtggagagaaagcgttggaggaagtggaggcgttacaactggagaaaacccagttgcagcatcagttgcagatttgcgacaaagagcgtgccgcgttagaggtatggggagatttcgatcctgcgtcggttatgcggttgcaagaagttggatatcaggtgaatttctatatttgctcagagaagaactttaacgaggaatggttggatacgtactatgctacggaggttaaccgtattggttcacgcatttatttcattaccataaccaaagaaggaacgttgcccgaattggaagtggaatcggtcaaattgccggtaatgtccttgagtaggcttgctgccagatgtgaagatttggaacagcaaatgaagagtgtggatgataagttagctgccatagcaggagaaaaacttctttctttgcaagttgcacaagctaatatccgctcacagatagaattctcaaaagtggtgctaagtactgaacaagctgcggatgacaaattgatgttgttacaggggtgggcaccggctacgcagattccggagattactaattttctgaatcaacaggaggcgtactttgaaattgctgaccctacgccggaggacaatgtacctattcagttgaataataaaggattcttccgtctgtttgaaccgattatgaaactgtatatgcttcctaagtataatgaactggatttgacgccgttctttgcccctttctttatgctctttttcgggctgtgtttgggcgattcgggctatggtctgttcatggtattaggagtaactgtttatcgtatgttggcgaagaatgtcggtgcttccatgaagcccatcttaactttggtgcagattttgggtgcttctactttcttctgcggtatgctgacaggtacttttttcggatttaatctgtatggtaatgatattccgttctttaataagatgcgtgatttgttcttcttggacaatcaatggatgtttaatctttcattgattttgggagcggtacagattattttcggtatgatactgaaagcggctaatcagaccattcagttcggattgaaatatgcattgtcaactatcggatggattattgtattggtaagtacagctttggcattcctattgggagataccatgccgatgggaggaactgtccatttggtaattctggggcttgccggtgtgctgattttcttgctcaacagtccaggaaagaatatttttctcaatatcggtttgggtttgtgggattcctacaatatggcaaccggtttgctgggggatatcctttcgtatgtgcgtttgtttgctttaggtctgtcgggtggtattcttgccagcgtattcaatagtctggcggctggaatgagtcctgataatgcaattgcaggtccgatagtgatggtattgattttcttgataggtcattctatcaacatgtttatgaatatattgggagcgatggttcatccgatgcgtctgactttcgtggagttttttaagaattcgggttacgaaggagggggtaaggagtacaagcctttcaagaattgaagaatgagaataaagaattaaaagctgtttaagccttttcggcattgtcattttgaataaatgttgtatccttgtgcagacagaaaagctagaaagggagaatctgaagcatagtatgcagatatttcgctaagttctggatgacatgaaaagtattccttttaggagaagtttgataaaataaagaatttaaaaattaaaaatagaagaattatggaaatgaatttattgattgcttatgtaggtattgcaattatggttggtttatcaggtatcggtagtgcgtatggtgtaactatcgcaggtaatgcatctatcggtgcattgaagaagaatgatagtgcattcggtaacttcttggtgttgactgcacttcccggtacacagggactgtatggttttgccggttatttcatgttccagagtattttcggtgttctgactccggctattacaggtattcaagctgctgccgtgttgggttccggtattgctttgggacttgtagctcttttctccgctatccgtcaggggcaggtttgtgctaatggtattgctgccattggccaaggacataatgtatttggtaatacattgattttggccgtttttcctgaattgtatgctattgttgctttggctgcaaccttcttgatgggatctgcattggctgcgtaatcagattagtttttttatatgggcggctatttcctgtttttatggaaatagccgcttttcttattctaatgtaagacagaaccttaaaaatatttattattgtagccgatatcagtattttttgtgaagattgttagagtaaaataattgaatgctaattcagaaactatctgaataacataaagttgcaaaaaaactttattatctcattgaaaatatgtaactttgcgctcgaattaagattagttaatagatggcaaaagaattgttagcccctgattatatattcgaagcaagttgggaggtatgtaataaagtagggggaatttatacggtgttgtccaccagggccaaaacactgcaggaagcattcaaagacaaagtctttttcataggacccgatttttgggcaggaaaggaaaatcctttgttcagtgaaaatgaaaatctttgtgcggcatggcgtgaacatgctttgaagaaagacggattgaaagttcgtgtgggacgctggaatattccgggagagcctattgtcatattggtggatttttatccttttttctctaaaagaaatgaaatatatggccggatgtgggaggatttcaaagttgattcacttcatgcttatggagattacgacgaagcgtctatgttttcttatgcagccggaaaagtggttgaaagcttttatcgtttcaatctgaccgaaaatgataaggtcatttatcaggcacatgaatggatgacaggtatgggggccctttatttgcagaaagcggtacccgaaatagctaccatttttactactcacgctacttctataggccggtctatcgccggaaacaataaacccctttacgattacttatttgcttataatggcgaccaaatggcgcgtgaactcaatatggaggcaaagcattctattgagaagcagactgcgcatcatgtggattgctttactacggtcagtgagattaccaacaacgaatgcaaggagttgttggacaagccggcagatgtggtgttgatgaatgggtttgaggatgactttgttccgcaaggtcgtacatttgccgccaagcgtaagaaagctcgtgctgcgatgttgaatttggctaataaattgcttggcttgacgatgagcgatgatactcttattgtgggtacaagcggtcgttatgagtttaaaaataaaggtatcaatgtctatttggagtccttgaaccgattgacccgtgataaaaatttgaaaaaagaggtgctggcatttattaatgtaccaggttgggtaggggatcctcgtgaggatttggtggaacgtttgaaaagcaaagagaatttcacaactccgttggagtgtccgtttatcacacattggttgcataatatgagtcatgatcaggtacttgatatgatgaagtatttgggaatgtccaattcggcggaatctaaggtaaaagtaatatttgtaccttgttatctggatggaaaggatggtatcttgaatttggaatattatgatttggtgttggggaatgacttgagtgtttatccttcctattatgaaccttgggggtatacacctttggaaagtgtagcattccatgtacctactataacaactgatctggctggatttggtttgtgggtaaactcgttgaagggtagatacagtgagttgaaagatggtgtgaaagttatccatcgctcggattacaactattctgaagtggcggatgttataaaggacactatatcggaattttcgggattgccggaaaatacaatcaagacagtgcgtaaaaatgcggcggacattgctgaaaaggcattgtggaagcattttatcaaatattattatgaagcttatgatgtggcattgcataatgcacagaaaaggcttgttatgaatagctaattaattattaataaataatttgagagacatgaaaatcaaagtaagtaatgcgaatactcctaattggaaggaagttacagtaaaatcacacattcccgaagaactgaagaagttggaggaaatggctcgtaacatctggtgggcatggaattacgaagcaacagacctgtttagagatttagatcctgcaacttggaaagaagtggggcagaatcccgttgctttattggaacgtttgagctatgaaaagctggaggcattaactcaggataaggtgattgtaaagcgcatgaatgatgtatatgctaaattcaaagcttatgtagatgctaagccggatagcaaacgtccttctgttgcttatttctgtatggagtatggtttgacacatgttttgaaaatctattccggtgggctgggtattttggccggtgactacttgaaagaagcatcagacagtaatgtagatatgtgtggtgttggcttcttgtatcgttatgggtattttagccaaagcctttcaatggatggtcagcagattgctaactatgaatcacagaatttcggtagcctgcctattgaacgtgtaatggatgaaaacggacagccgatggtagttgatgttccttatttgaactatttcgttcatgcatacgtatggaaggtaaatgtaggacgtgttcctttgtatctgctagatacggataatgaaatgaacagcgaatttgatcgtcctatcacttatcagttgtatggtggagattgggagaaccgtttgaaacaagaaatcttgttaggtatcggtggtgtgttgctgctgaagaaattgggcattaagaaagatgtctatcattgtaatgaaggacacgctgctttgtgtaatgtgcagcgtttgtgtgattatgtagaaagcgggctgacatttgaccaggctttggaagtagttcgttcttcttctttatatacggttcatactccggttcctgcggggcatgactattttgatgaaggcttgtttggaaaatatatgggtggttatccacagcgtatggggatttcttggcaggatttgatggacttgggtcgtattaatccgggtgatgcaggcgaacgtttttgtatgtctacatttgcttgtaacacttgtcaggaagtaaacggtgtgagctggttgcatggcaaggtttctcaggagatgttctctggaatttggaaaggctatttccctgaagaaagtcatgtgggttatgtaactaatggtgttcatttcccaacgtggagtgctactgaatggaagaagctatatgctaagcattttgctcctaatttcctggaagatcagtctaatgagaaaatttgggaagctatttataatgtagccgatgaagaaatttgggaaacccgtatggctttgaagtacaaattggttgaccatattcgtaagcagttcagtgaaagctggttgaagaaccaaggtgatccttcacgtatcgtttctctgatggaaaagattaatccgaatgccttgttgattgggtttgcccgtcgttttgctacttacaaacgtgcgcatctgctgtttactgatttggaacgtttgtctaagattgtgaacaatcctgattatccggtacagttcttatttgcaggtaaggctcatccacacgatggtgcaggtcaggggttgatcaagaagattgtggaaatttctcgtcgtccggaattcttgggcaaaatcatcttcttggaaaattatgatatgcagttggcacggcgtctggtctcaggtgttgatatttggatgaatactcctacccgtcctttggaagcttctggaacatcaggcgagaaggctttgatgaatggtgttgttaacttctctgtgcttgacggttggtggctggaaggttaccgtgaaggagcaggatgggcgttaactgaaaaacgtacttatcagaatcaagatcatcaagatcaattggatgccgcaactatttatagtattttggaaaatgagattcttccattgtattatgcacgtaaccgtaagggatattctgagggttgggtgaagactatcaagaattctattgctcaggtggctcctcattatacaatgaaacgtcagttagacgattattatgctaagttctatactaaagaagcaaaacgttttaaagaattggtagccaatgattatgcaaaggctaaggaactggctgcttggaaagaaagagttgcagaactttgggattccattgaaatcgtttcatgtgaaaagacggaagagctggctagcggtaatattgaaagcggaaaagaatatatcattacttatgttatagatgaaaagggattggatgatgcagtaggtattgaactggttaccactttcacgaatgcggaaggtaaagagcatatctattctgtagaaccaatggaagtaattaagaaagaaggtaacttgtatacattccaggttaaacacagtttgtctaactcaggcagcttcaaggtggcataccgtatgttcccgaagaatgttgatttgcctcatcgtcaggacttctgctatgttcgttggtttaactaatcattgaattaagataatatttctatttaaagaactgtttccttggaaaagagaggaagcagttcttttttattagtatgttcgcccaaagtttcattgatattatcattccagttaagattgttatggaaagtgcgcattattgggaaggataggacgagtataaaaaatgaaggtgtgtcgtaatacacgatgcgccttcttttttttcattgactataaaaatcgactcatttttttaagctgcgatattttgaggatttctttgatttatgcgttctcaacatctaaatagaacaactgtaagctcataaaacggtctaatcagccaatccataccttctttagtcatttttgcacacatcttttttatattgaaggcaatggcaaagaaggcaaagtccatgaagaccttatcctttccaaaatggcggaaacgtttgtaattcatattgtttttcatttgtccgaacacggcttccggttctatgcatctctgtcctctgtgtttcagcccttcctctgagcagagcaactctttggctttttgcttgtattttctgagtctgtgattcaactctatcgttctgttcccctttgctttaaaacatcggcatcttagcggacagccttcacatctgatggctctgtacctggcattttcgctgacatatccggatgctgttttcacatgtctagtccctatcctttgcatcttctgtcccatggggcagatacaaaagtcttgttcttcattgtagtagaagttttcggccttgaacgggtccggtttgaatctcggccgctgttccatgtggaagtagttgtacttgacgtaggcttccataccgttttctgacatgaagcggtaattctcctcagaaccgtagccggaatcggcaaccaccgtatggaccagcctgtcatatctgcttgagaaggattgcaggaaaggtatcagggtcagtgtatccgtagggttcgggaagagtgcaaagtcggtaatgaactggttcccggtgccgatctggaggttgtaaccgggctttgtctggccgttacgcatggcatcctccttcattctcatgaaagtagcgtcattgtccgttttggaataggaattcctgtcctgcagcgtgtccagacggttgtcgtattcctgtagcttgtccctgtgctcttccaactccttcagctgtttgcgtttctttttcaacgcagtcttttcctctttcgtggagggttcaggaacctgttcgagtgcttgacgcaattctcccgccatttcagtcagcatgaccggagtgaactcaatctcctcattgctttccgatgagttctcctgggcgatgacattgtctatctgccctagcaggatatgtatcttcttcatcaggcgttcacggttccgctcaaccgttttccgccagacgaaagtatacttattggctttggactcaatctttgtcccgtcaatgtattccacattcaagctgatgaagcctttggaagagagaaggagtacggtttgggtaaacacctcgttgatttcattcttcacccggttgcggaaacggttgatggtgatgaaatccggtttctcatatccggcaagccagatataatggatgtcacggtgaaggagcttttcgattttccggcaggagtagatgttgttcatataggcatacagaatgaccttgagcatcatcctgggatggtaagggctgcgcccgcattccttatacaacttcctgaaactttcaaggttcaggctctcaaccagagcgtcaaccatccgaactggatcatgctctgcaatatcctcgtcaattcttggaggaaaaagcactgtttggttgggattgtaaggacgaaaatgtatctttgtcatagtataaaatgttatgcttaaagatacaaaatctttaggtaataacaaagcccctgcttgtgaaagtcggggctttgtgcataaaaaaagaaggtgcgcattttgacacaccttcattttactttgtaaactattttgcagttattttatttcaatagttcgttcagtttggacttgatggcatctccacggagattacgtgcaacaatggtaccttcctgatcaaccaatacggtagcaggaattgaattgacaccataaagttttgcacctgcattgttccaaccttgcaggtcagacatttgcggccatgtaatattcaaggcagtgatagcctctttccacttgtctgcattctcgtctaaagaaatacctacaattccgaagcctttatctttgaaagccttgtatgcttctacaacattgggcatttctttacggcaaggtccgcaccagctagcccaaaagtcaatcaaagtatatttatttttgctgacgaaatcagacaggcttacagttttaccttcaggggtctgcatagagaaatcaatgtatttctgacctacagccgttttctctgaagtttcaatgtgggctttcaacttgttgatacgttcattaactaatgcagcgggaattttttctaccaacgctttttgtttgtcgagttcgaatgcgcctgcataggaagggagaagatatacaccgaccggattggtgatattggcttcaattgtttgataaaccatatccatgcctacactgtctttcttttcaatctcagccatgatagcttctacctgttcttctgtcaagctagtgtcgctttgagccttttggtacatttcattcatttccttgcttaaagccatgaagccatctttgaatttttggtaagcgtcgttattaggagtacctgaaactttgctttccttacctaaggttacattaatatttccattttcaagaaaaagatcagtaaagtaacgcttgtctcctttcatataagtgatgtagcggtttacagccgtatcttgttttccggtgaatacgaaagttccgcttttgacaatagcagaatcaagttttacaaggtttcctcctgcgtattcctgtaaatagatcgtgtcgccatcagtgatgtcttctactgaacctgtaaccttataggaaggcgaattctgacatgcaacgaaagccatacttcctgcagccaataaataaactaattttttcattttaatatgattataatttgaacgcaaagataactacttaattaatatgtttgcggaaaaaaggtttttattttcagaatgaaataaggaatctatagttttgctttgctttttttgaattttatgggcactcattcaattcctttggttataatttgtacagggggctgccttactgttacagttgatcggtaatattctggatctttcgaaaatcgaatcgggcacattgaagtttgtgtagagtgatgtgaatattaatgcaatgatgtacgatttggaggaattatttcaattacggaataaaaataatccggaggtggagatcgggtagatgttgaatccgagcagggagaaggtctcatttttttgtttacaatttctcaaaagcctatcattcactttgctgggagaagagaaatagtacgcacaatggaaaattattagtcggatgaataaatattactttatttatatcctccattcttgaaaaataccgtaattttgcaactcaattacaaaatgagtatgcaacaatctaattatataattgaggtaaaaggtgtttccaagttttttggtgataaaatggtcttggataacattaatttatatgtaaaaaaaggtgagtttgtaactgtgttggggccctccggttgcggaaagacaactcttttacgtttgattgccggttttcagactgcttcggaaggcgagataaagatagctggaaaagagatcacgcagacacctccgcataagcgtccggtaaatactgtgttccagaagtatgctttgttccctcatttgaatgtgttcgataatattgccttcggattgaaattgaaaaagacctctaagcagactatcgagaagaaagtaaaggctgctcttcgtatggtagggatgacggactatgagtatcgggatgtgaattccttgtcaggcgggcagcaacagcgtgtagccatagcccgtgctattgtcaatgagccggaggtgttgttgctggatgagcctttggctgctttggacttgaagatgcgtaaagatatgcagatggaattaaaagagatgcataagacattgggcatcacttttatttatgtgacgcatgaccaagaggaagctttaacactgagcgacacgattgttgtaatgagtgaaggaaaaatacagcagatcggaacaccggtggatatttataacgaacccatcaattcgtttgtagctgattttataggtgagagcaatattctgaacggaactatgatacaggacaagcttgtgcgttttgcaggagtggaatttgaatgtgtagatgaaggtttcggtgaaaatatgccggtagatgttgtggtacgtcctgaagattggtatatttttccggattcggatgcttcacagatttcaggtatcgtaacctcatccatctttaaaggtgtgcattatgaaatggtggtcgaggccaatggttatgaatttattgtacaggactatcatcattttgctgtgggtgagcaggtaggtttgttgataaaaccttttgatatccatattatgaaaaaagaacgtgtatgcaatacgtttgaaggagaactgatagatggaacgcatgtggaatttctgggatgtacgtttgagtgtctgccagtggttgacattgagccgggaactaaagtaaaagtgcaggtagatttcaaggatatcattttgcaggataatgaagaggatggaactttaaccggagatgtacgttttatcctatataagggagatcattatcacctcactgtgtcatcggactggggtgaggatatttttgttgataccaatgatgtatgggacaatggtgatcatgtaggtatcagcatctttcctgaaagtataaaaataactcagattgtagaatcataataaagaaaagaggtgctcagaacgatacgatttttcttgtcttcacgtaaaagttggactattccttacgtgatattttcggcggtatttgttattcttccgctacttttaatagtggtttatgcatttatggatgatgcggggcatttcacattgggaaattttgctaaatttttcgctcatcccgaggcaatcaacacatttgtttattctattggcgtggccattatcacaacagtggtatgtatcttattgggatatcctgctgcctatattctgacacagacgcggatgaaatatgcatcgacagtggtggtattgtttattttgcccatgtgggtgaatattttaatacgtacactggctacggtggccttgttcgattttatgaacgtatctttaggagagggggctttgatattcggtatggtatataattttttgccttttatgatttatcctatttacaacactttgcagaaattggataaaagttatgtggaagcggcgcaagatttgggcgccaatcccatgcaagtgtttttcaaggctgtgttgcccctgtctatgccgggtattgtgagtggtatattaatggtatttatgcctactatctccacatttgctattgccgaattattgacaatgaataatattaaattatttggcactactatccaggaaaatattaataatagtatgtggaattatggggcggccttgtcgttgatcatgttgttccttattggtgcgacaaccttgctcgcttcagatgataaggatcataacgaaggaggtggactatggtaaagaaaattttgtgtcaggggtatttgtggctgcttctgctattgctttatgcgcctatttttatcattatgatctattcgtttaccgaagcaaaggtgctgggcaactggaccgggttttccaccaaactctattcatccctatttgttgcgggtacacatcattcattgacaaatgccttggtcaataccttgagcattgcctttattgcagctaccgtatccaccttgctgggcagtattacggcaatcggcatattcaatcttcgtccccgtgcccgtaaagcaatcagttttgtcaataacattcctattttgaatggagatattattattggtatatctctattcttgctgttcgtatctttgggtattccacaaggatataccactgtagtgcttgcacatatcacattctgtactccatatgtggtgttaagtgtgttgccgcgtttgaaacagatgaatccgaatatttatgaggcggcgcttgacttgggggctactcctatgcaggcactccgcaaggtgattgttcctgagattcttccgggaatgatttcaggttttatgttggcggtgactttgtccattgacgattttgccgtgactgtatttactattggtaatgaagggcttgaaactctttccacctatatttatgcggatgcacggaaaggagggttgacccctgaacttcgtccgctttctaccattatattcgtattggtgctggtattgctggttatcatcaatcgccgtgcaggcaagaaaaaggaggtataaaaaatgaggaaaataaatagatggctgatggtgtgtgtgtgcgcgttattctctttaaccggatgctataacacagagcctcgtgagagtgtgctgaaaatatataattgggccgattacattgatgaggatatgttggcggaatttccccggtggtacaaagaacagacgggggaagatattcggattgtctatcagacttttgacatcaatgaaatcatgttgaccaagatagaacgcgggcatgaagattttgatgtagtttgtccttcggagtatatcatagagcgcatgctgaggaaaggtttattgcttcccattgataccgtttttggaaagacccccaattatctgcataatgaatctccttatatccgtgaacaattggataaattgagctggtcggggcatcgtgcttcagattatgccatcggttatatgtggggaacagcaggtatcctttttaataccgatcatgttccagcggaagatgccaggacttgggccagtctttggaatctgaaatatgagaacaagatcctgatgaaggaaagttatcgtgatgcatatggtaccgcattgatttatgccaataccgaggatttgaaaaaaggcaaggttacggtagaggagttgatgaacaactattcgcaagcatccatcgatacagttgagaagtatctgaaagccatgaaacccttgatagcaggttgggaagctgattttggcaaggaaatgatgactaaaggtaaagcatggctgaacatgacctggagcggggatgcggtatgggcgatagaagaggctgaaggagtgggtatccatctggactatgaggtgccggtggaaggaagtaatgtgtggtatgacggatgggtgatccctaagtatgctagaaataaaaaggctgccagttattttattaattatttatgccgtcccgatgtggctttacgtaatatggacgcctgtggttatgtgagtgccgttgctactcccgagattttggaggcaaaaatagatactactttatcttactttgcagatttaagctattttttcggtcctgctgccgatagtatacaaatagataaggtacagtatcctgaccgtacagtggtggagcgttgtgccatgattcgtgattccggtgacaagaccgaattggtcttggaaatgtggtcgcgtgtaaagggggataatttgggggtaggcgtggttattgtgattctggtatctgccgggattatggtagtattcaccgtgtatagaaaacttcagcgttatcagcatgaaaaggctcaatatcgtcgcaggaatcatcgaagaaagaaatgactttataagggaaggaaacatttagtcttgctgataaaacgatttagggaatccaatctttaggtagaattaaaataaaagtccgaacttgggaaagtccggacttttatttctataatcatataaagattaaatgatgtattgtgaagagatagactcattattcatcacgcggcggattgtttcagcaaacatatcagcaatggtcagttgcttcactttagagcaacggttagcataaggaatactatcggtaaataccatttcttccaagccggagttctgaacgcgttcggatgcaggacctgacattacacagtgagaagcgatagcgcggacggaaatagctcccgcttctttcataatatcggcagctttggtaatagtacctgctgtatctaccatatcgtcaattaagatgacatttttattttttacatcaccgataatttgcatggtggccacttcattggctttcaggcgcgtcttgttgcagagtactaagggtacacccaaatatttggaataagtgctggcgcgttttgaaccacccacgtccggagttgcgattaccaagtcttccagttgcaatgattcaatgtaaggcaggaatacgccagaagcgtagaggtggtctaccggtacatcaaagaatccttgaatctgatcggcatgcaaatccattgtgattaaacggtcgatgcctgctacgctcagaagatcggctaccagtttagcaccgatagaaacacgaggtttgtcttttctgtcctgacgtgcccatccaaagtagggaataacggctacaatgctttttgcagaggctcttttagctgcatcaatcattagcagcagttccattaagttgtcagagttaggaaaggtagattgaactagaaaaacatgtgcgcctctaattgattcttcataagaaacagcgaactcaccatcagcaaaatgcatgatgttcatgtttcctaatttgcaaccgaggctgttgcaaatcttttctgcaaggtatctcgaatttgttcctgagaataccctaaaaggtgatgttttgctcatttttgtaatagatattacctatttgttaatttgcgtgcaaaggtacgtattataattagaaattaaaaatagaaatttaaaaataacttctcattattgtaatatgcttggtttgaagcatattcttcgttttttaggcttctattctaaattattttgataaatcagtctgctaaatctcttaatttccggaaatgttctatcacgcaccgataatcgcgatcggtacacgcatcgaatttattccaaagggcgcccaatatggcggctcctccgaaaccaaagtcctttacctccagcaagttttcttcgtcaatgcctcccaaagctatgacttttttgtcaataatgcctgctttggcggcagtacggagttcttcggcggtgtatgccgagttataatttagtttggatatgctattgaataccggactcagaaagacataatcgcaactggatttgcgctctttaacttcgtctagcgaatggcaagaacaactgacatgtcctttgtatccttccggcaggttcggattacgaccgttcaggtgaattcctttcagtttgtattcctctttcagataaaaatgtccgtgaaccacgatgcgtttatgatattgttcggggataagggttagcagacgttctgcaaacatgggtgctgtaccgggctttcgcagatggagtgtgtctagtccctcctcgaaaagagctgtaattattttatcttcctccacaaaataagtggggggcgttattagaattaacttcataccttatgactaattgctaagcaaagatagcaacctatttgtaataatcctagtggatttatagatttattttcgataaaactgtaaatcaatgggatactttccccgaaaaagtgattcatgcgatggaaaagttttaaataatctgtgtgtatctgtatgaaataggcgttttttatttacttttgcgctaataaaacaagacgaatagatagaattatgaataaaaaacaatttcttgcagccgcattttgtttgatggcacttgccggatgtacgcaaaaaacggaattgcctgagaatcctaaagatcaagaagagtaccgtgatcatcagggaaacagttggatttataacgctatgctaatgcgttgggcattaatgccgtctatggccaacggactttctaccacacattattattatcctaaatctgattcgtggacagatgctaacggaatgaaagtggatgctccttcaaaagtgaatgtgggggcaaaatcgtctacaaaatcaaaatcgagcggaagtgtttttgggaaaacacgccgttcatccggtgttcatagttaataggaagcggatatgaaaagaatacctgttacgccacgttcagactaccgtgagaaaatagaagcgctgggctttgattttcatggtgattattggcgcgaggaagcgtattatcgttttacggctgaagaaacagcctgtttggaggaagcaaccaatgaggcgtaccatctgtattgtgaggctgctcaattcattattgaagataacccggaatttatggagcgtgcattgaatattccgaaggagattggtgagcgtatccgtgcttcttggggtgcggatgagttaagtctgtatggtcgttttgattttatattagccaaggatggtactccgaaaatattggagttcaatgctgatacaccgacttctttgcttgaagcatctgttatccaatggcaatggaaagaggatgtttttccggaatgcgaccagtttaatggtattcatgaaggattggtgcagtcatggaaagatattttccccaaaaaaggagagattcattttgctggtgcattagagaataatgaagatacaggaacgttgcaatatctggcaagtacggcgatggaggctgggttttctacccgagtattggatatgcaggcgctggatttgcaaaatggacgattttttgatccggcaggtgaactagtgaaccggtgctttaaactttatccgtgggagtggatggtggacgaaagtcctgacggatgtctagcggaaatggaatggttggagccgatatggaaattggtgatgtccaataaggcgatccttgccacattgtacgagttgtttccggattctccttatgtgcttccttgttatttgtcgcgccctcggtcgggattgttttgtaaaaaaccggtcttctctcgtgaaggtcataatgtaagcgttgttgatatccgggattgggaggaatatgtacgtatagctgaaacggagggtgattataacactggagcttatgtatatcaggagtatgtggaaccgacagcgtacagtggcagatatccagttattggttcttggattataggaggagaagctgcgggcatcggtattcgcgaaaatcgtatggaggttacagataacttgtccgagtttgtaccacatattataggataaagtcaaactattcatgtgccggtcgatgccggacgacggatgtcgtcatgcctcgactgttggcacataattgaggaattaatgtcttttgaatagggccggttcgattcctctagaaggaaatgagatgggtttccatcgtttttatgttaatcgtccataatttgccgcttaacactttgccatattcacctataatcttcaacacttcagcagcttcggcacaacctattatgccgggggttacacctaatactcctttgggcggatggggcatggatagcatttctgtttcgtcggggaaaaagtggcggtaatcggggcctccttggtaattgaaaacggatacttgaccttcgaaggcacggatggcaccatatacataaacttttccccatttcacacagatgtcattgataagatagcgggtagcgaaattatcacatccatctataatgatgtcgtaggtacggataatttcatccgcattctctttagtcagtcttgtgggataggcattgatttgtacatcatggttcagggcttcaagacgtttcttagcttggatagctttgggcatacctacctcggcttcactataaagtacttgacgttgcaagttgctgacacttaccacatcatcgtctattaatccgatggtacctactccggctcctgtcaggtacaaggcaacaggagatcccagaccacctacaccgacaataagcactttggcctgctgaagccgttgttgtcctttttctcccaattcagggagaataatttgacggttatatctttccactttgtttgttgttaatttgaaaaaaaaggagctttgtatcatttatacagccccattcctttaaaaatatgggtaaaatctatcgtattggcgtgaacttgtcaaaagaaacatcccagtctttccataccggctcccttcctaatgatttcagtgcgtgttctacttctacggctgtacgctcatcacttacatggaattgttccaaagcttgcggataggtatagtatccccccggttcagttttgctttcagcactcatggtagtcactcctagccctgccatgttgtcgcggatttgtgccggttcacgagtggagtaggagatatctacatcgtgatcgaaaatacgcatggcaaaagtgagctgtgccaactcacgatcattcatgatgacattcggctggaaaccaccgttttctgccggacgcatacgggggaagttgacactgtacttggttttccaatactttttctgaagatagcgtaagtgataagccatcatggtcacatcggtgcgccattcttccagtccgataagtactcccatgccgatggagtggactcctgcctgtcccatgcggtcgaagccgtttacccgccactcgaatttggatttcatcccgcgtgggtgatatatattataacgggctttgttataagtttcctgaaagcaaatgactccattcagtccgtgttctttcagttcggcatattcttcggctttgaggggcattacctctatcttcagattgctgaaatattttttggcgatgtccaaagctttagccagataagggactccggcttttgccggattctctccggtcaccagtaacaggttctcaaaaggccccagtttcttgatggctttgtattcatcttcaatctgttcgggggtgaggatggtacgtgccatcgggttgctgatatggaaaccacaatacacacaagaattggtgcaggagttggtgatatacagcggtataaacatggagatggttttgccgaaacgttcttcggtatattttttgcttagttgcgccatcggctccaggtattttgctgctgcgggggagatgagcgccataaagtcgtccacatcgcaatgttccttgccaagagcgcggagcacatcactttcggtcttggagtagatggttttggtggtttcctcccaatctattttttcaagttcttctgaaaacataattgttatttttgttatagttctataagatgatttcgcttctataagagcctatttaaactttttcggcatttaaacaggtttcaagctataagttccttattatttttctacatttctttttgtcgctttccgtcagctcgggatgttgcttcgttcctcccttctggataacgcctttgatagagaatccgctccacttcagaatttcgcgcaacgcttttactacaccgcgtgtctggttaaaccagatattgaacggccatggggtggagcaggtgcttacgatgactgctttcttgcctttatgcaacgcttgggggatccctttcggactttctcccatcatgccgtacacgatgcggtcgaacactactttcagatgtccgttcatgtttccccaatagcagggtgatccgacaatcaacacgtctgcccattgtatcttttgaagcgtgcgctgcgcattgtcttcgggtaggacacaggcctgccggctgcggcaagccatgcatcctgtacaggggcgtacctgcaatttatggatggatattgcttccacttcggcgccacgtatgcgagcttcttcggccatgatgtccagcattcggctgataagtccttggcaacgaggacttccgttgagtatcaatatcttcattaccttattttttttaggatgttgttgcggacacattgcactgcaaccgtatagtattccggttccatattttccagatatgctttcagctctcctgtcagttccggttcttccaggcagatgtcgtaggcaagtttcatgcagacggcttgtccggatgcgctttcggcagaagatagcataccttgaaggcagaaatcgaagaaagctgcgttgacaggcttcgggacaggaagatgatgaaggatattcagtagcaggcgtcttgttccatcgtgggggcattgcatggcccgtaacatcagttcctcccttttatccatcaatagggaaggaaggaggaaactcagtttttcacaagcccaagtggcacgccaggctatccttgtttcttcatgctgcgttagagtataaagagcatcaaagcggtcgggggagctggccacttgatctactatgttgtctatgtgttttcttcctaaagttccttcaagtgctttcttgaaatcttccatagtttttacaaagtcagttgtttaattacccacgttcttcaagtcgcggctcagtttcatagcgcagaagttgggtccgcacatggtacagtactcaccgtccgtatggcggccttcattgaagtattccaaagcgcggtcgggatccagactcagatggaactggtcgcgccaacggaattcataacgtgccttgcttaaagcattgtcgcggatctgtgcgcccggatgccctttcgctagatcggcagcatgggcagcaatcttgtaagtgatgacacctatgcgtacatcttctttgttgggcaatcccagatgttctttcggggtgacataacatagcatggcagtgcctaaccagccgatttgtgcggcaccgatggccgaagtgatatggtcatatcccggagcgatgtccgttaccagcggaccgagggtgtagaacggtgcgttgtgacagtgagagatctggcgttccatgttttctttgattttatgcaaaggtacatgccccggtccttcaatgaatgcctgtacgtttttgttccatgctcggagtacaagttcacccatggtatccagttcggcaaactgtgcctcgtcattagcgtcagcgatacagcccggacgaagtccgtcacccaaggatacggctacatcatattgtgccagaatatcacagatgtcatcaaaatgctcatataagaaactttccttgtcatgtaccagacaccacttgctcatgatgctgcctccgcggcttacgatgccacacagacgtttgtcggccagatgtacattctggcggcgtattccggcatggatggtaaagtagtccactccttgttcgcattgttcgattaatgtatctttataaatctcccaattcagattctctactttaccgtttactttctctaatgcctgataaataggtacggtacctacggggacaggacagttgcggacaatccattcgcgtgtttcgtgaatgttatcgccggtcgagagatccatcagggtatcacctccccatttgcagctccacacggctttttccacctcttcgtcaatggaggaagtggtggcggagtttccgatgttcgtgttgatcttcactaaaaagttcctgccgataatcataggctcgctttcggggtggttgatattggcgggaagtacggcacgccctgcggctatttcatcacgcacgaattcaggggtgataaaggtgtcgatgcccagttcccggcaattcatgttttcacggatggctacatattccatttccggtgtaactatgccggctttggcgtatgccatttgtgtgatggcctttccggctttggcacgatagggcagggcgatgtgttcaaagcgcaggtggtccagacttttatcgtcacggcgcatctttccgtattctgaggtaatggagggcagtttttccacgtcttcccgtccaataatccagctttcgcgcatacggggaagtccttttttcagatcgatttccatattgggatcactgaacggaccactggtgtcataaatataaacaggagcattgggcgttgttaccttttcaccgttcactatgtttacagtaggagtcaggtttactttctgcattcctactttgatgtatgggaacagggttccttgcatatatgccttttctgcatgagcgtatgcttttttatcttgctttttgtctatcatatttctgtttaatctaagaatgaagttaaaggggatgaggcggatgcgatcaagttctgtcctactgctcctaagcctgcttcataggcgcggcgtccggcaatgacagcttccttgaaggctattgccatttctactggttggccggctactgcgatggctgtattgaccagacaggcgtccgcacccatttccatcgcttcggtggcatggctgggggcgcctattccggcgtctactaccacaggaacggaagcttgttcgataatgatgcgcaggaagtcacgtgtctgcaagcctttgtttgtcccgatgggggcggcaagcggcatgacggttgctgctcctgcctcttccagccgtttgcataatgtaggatctgcctggcaatagggcaatacgacgaaacctagtttgactagttcctcggttgctttcaatgtttcggtagaatctggcaacaagtagcgcggatcgggatgaatttccagtttcagccagttggtgccaaaggcctcgcgggccatttgtgcggcaaagacggcttcttcggctgtgcgcacaccggaggtattgggcaatagctgtatgtgggggtgaatgatatgtttcagcatatcatcttccttatcgtccagttcaatgcgtttcatggctacggttaccatttcacaccctgatgccagaatggcttcttccattacggtgtttgaattgaatttaccggttcccaggaataaacgggaattaaattcttttccagctataatcagtttcttcattgtattttgtgattttattataaattcatgattcgtttagtttccgctaccgggtctttcgcccggagtatggttccgctcaaggcaataccggtgattcccgtttccatgatggaagggatatcttccaaagtaattcccccgatagcaacgatgggcaaatggatatttgcctctttcatttgcagaataatggaacggtaaccttccagtcccagcactggagagagatccttttttgtagtagtaaaacggaacgggccacagccgatgtagtcagctccggctttgtaatgcatctttacatcgtcaaatgtattggcggtgcctccgatgatgaattcttttcctaatattccccgtgcttcggctacgggcatgtccttttttcctaaatgcactccgtcagcatgaattttcttaactaactccacgtggtcgtctatgacaaatgtcgctccatagtctttgcataagccttgcaggcgtatggcttcccgttccacttcgtcaacgggagtgtctttcatgcgtagctggatccagcggcaaccgccttccaaggccatgcgtgcggaatcataataggaatatgtgtcggtgaagtgagtgatgaattgaagttccacggtcttatcctccacatgcagctttaatgactaccagactgtcattggggtgtaacacacatttctcccactctatacggggaaccatccggttgtttaccgctatggcgatacctttctcaggaagtgccagaaaggtggaaagttcggctatggtgcatccgtcctttacttcggtttctttgctgtttactgtcagtttcatactatatcagtttatgaatttacttgtaaatacaaagagttgctttttgaccggatggtatgaggtaagaagtaacaatcccttcggcggtactaaccgcatcaggttcacagggtataatctcagcccgtccgctgtttacgtggggcacccctttgttttacgatggcaaagatatgggaaagaaatgaataatgctacaacagactgctttattttttgtggaagaatgtttttttatgattatcttgcattatgcttgtttattcttgtaaaaggatgaatgcatatctgctgtatctttgcatcttaaagcagattgccccgctccctgaatgaatagggtgcgaggcagctttattatgatgtatagttaagggttcttttatagacgtttttctactacatcccagtcaatgatttcccataacttgttcacatgatctgcacggcggttctggtaatccaaatagtaagcatgttcccatacatcgaaacccagcaatggtttcaggcctgcacgccacgggttgcttccgtttggctctttggtgatatgtagttttccttgcttgtctatagaaagccaagcccagcccgaaccaaacagtcctgtggaagcggcgttgaattctttcttgaagttttcaaagcttccgaagtcccggttgatggcttctgccaatttgccggacggttcatgcttgttgggtttgggggtgaactgaaggaaatataatgtatggttcaatacttgtccggcgttattgaatatcgctccgtcgggagctgatgcaacaatttcctctacggtctttccttcaaattctgtactcggaaccaaagagttcaaattgtttacgtatgtttgtaagtgcttgccataatggtagtctatagtagcctgactgattacaggttcgagtccgttgtttgcatacgggagtttgggcatttcgtaagtcataactaatgaaattaaagtggttaataatatattcatttttagtcgaggttttaattaaacttctatcataataacattattgagcatagaattgttctgataaactcaaactttctctatctttgcgggcgaaaggtgaaatttatgacgaactatttagaagaattgaatgaaagtcagcgcaatgcggtgctttacaacgaaggtccctctttggtgatagccggagcaggttcggggaagacacgcgtactgacttataaaatagcttatttactggagcggggatatactccttggtctattctggcattgacttttaccaataaggctgctcgtgaaatgaaagagcgtatagcccgtcaggtgggcgatcaggcacgctatttatggatgggaacgttccattccattttttcgcgtatcctgcggtgtgaggcacaggctgtcggctttacctccaattttaccatctatgattcttcagattcgaagagtttgatcaagtctattgtaaaagaaatgcaattggatgataaaacctataaaccgggggtgatacaggcgcgtatcagcaatgcgaaaaaccatttggtttttcccgatgcatatgtttcgaacgcagagctttatcagtatgatctgaatgccaaagtacccgctacccgtgatatttaccgacgatattgggaacgttgtcgccaaagcgatgcgatggattttgatgatttgttggtttatacttatatgttattccgcgatcatcccgaaatctgccgtaagtatgcggagcagttccgttatgtgctggtggatgagtatcaggatactaattttgcgcaacacagcattgtgcttcagcttacccaagaacatcagcgtgtatgcgtagtgggggatgatgcacaaagtatttattccttccgaggggctaatattgacaatatattgaaatttactcagctgtataagggagccaagctttttaaattggagcagaactatcgttctacccagaccattgtatgcgcggcaaacagtttgatagagaaaaatagcgagcagataaggaaggaggtattttcggaaaaagcgaaaggggagcctatcggagttttcaatgcctacagtgatgtggaggaaggggagattgttgccaaccagattgtgaaactgcgttcgcgggaacattattcttataatgattttgctattttataccgtacaaatgctcagagccgtatttttgaggaggctttgcggaagcgtgctttaccttataagatttacggagggctttctttttatcaacgcaaggagattaaagatgttatatcttacttccgtctggcggtaaatccgaatgatgaggaggcttttaagcgggtgttgaattatccggcgcgaggaatcggggatactacgttgaacaaggtcattgatgcggctgcacagcatcatgtcagtctttggatggttttggaagagccgttggcatacggcttgaatattaacaagggtatgcatactaaattacaggggtttcgtgaactggtagaaagttttatagtggaggtcccgaagaagaatgcatacgaattgggagcaatgattgttcgtcagtccggcattatgaatgagatttatcagagcaatgatcctgaaaatctgagccgtcaggagaatattgaagaactgataaacggtatgcacgatttttgtgcaacccgtgaagaagaagggaatgaaaacatcctgttgacggattttctgtcggaggtttctctgttgacagaccaggataacgagaaagagggggatgccgagaagattaccttgatgaccattcactctgctaaaggcttggagtttaaaaacgtctttgtagttgggatggaagagaacttgtttcccagtgctttgtcactcaattcgtataaggagctggaagaggagcgccgcttgttttatgtggcgattacacgtgccgaagagcattgctatttgtcttttgccaagagtcggtttaaatatggaaagatggagttcagtagccctagccgtttcttgaaagatattgatgtacatttcctgaagttacctcaggaggaacagatggcccggagaatagacgagagagccagccgtttctgtcgtgagcaaaatgaacgtgcggctcgttccttgtttgacgaacctgcttctcagtcttcttacgggcgttcttcatcgaacatctctggtggtcagaaaacatttttagttggagaaagaccgaaagttgagattattcgtcccagtataccacgtaatttgaccaaggttggtccggaaacggtctcaaagccgtccgcagcgagaaacttgtcggtgaatgtacaggcagggcaggtgatagagcatgagcgttttggaataggcgatgtgataaaggtggaaggaattggtgagaacagcaaagcgactgtccgtttccggaatgccggagaaaaacaattattactgaaatttgcccgattcaaagttgtggaatagaataaatattttaatagaattctgatacaaaaatgatagatatccataaagtaccttctccatgctatgtaatggatgaagcattgctcagaaagaatctgagtttgataaagagtgtggcagaccgagccggagttgagatcatcttggctttcaagtcttttgccatgtggaaatcattccccattttcagggaatacattcgttatactacagccagttccgtatatgaagcccgtttggcgtatgaagaatttggcagtaaggcccatacttattctccggcgtatacggatactgattttccggttatcatgcgatgcagcagtcatataacctttaattctttcagtcagttccggcgtttttatcctatggttgaggcctttggagaaaagataacctgtggtatccgcatcaatcctgaatattcggaagtagaggtggaactttataatccttgtgctcccggtacgcgttttggggtgacggccgatttgcttcctgaaactttaccggagggcatcgagggcttccattgtcattgtcattgtgaatccagttcttatgaattagagcatactttgcagcacatagaagagaagtttgcttcttggttcccacaaataaaatggttgaatttgggagggggacacttgatgacacgtaaagattatgatacggagcatcttatttctttattaaaaaacttgaaagcccgttatcctcatttggagattattttagaaccgggttcggcttttacttggcagactggacctttggtagcttctgttgtcgatatagtggaaaaccgggggataaaaaccgcgattttggacgttagctttacttgtcacatgcccgattgtcttgaaatgccttatcagccggcagtgcgtggtgccaaaactttaccagtcgatgcgataaaaacagctttaacggaagagaatgtttaccgtttgggtggaaacagttgcttaagtggcgactatatgggtagctggtgttttgaccatccgttacagataggagaacgcattgttttggaagatatgattcattacactatggtaaaaacaaacatgtttaatggaatccatcacccttctattgctatttggcatacagataatacattggaagtatataaagacttccgatatgaggattatcgtgaccgtatgtcttgatagtaagtaaaaaaaacttttggtttatattgactatgaggagtttgatgaaataatgtaataaaagtactataaaaagtatagaaaatttttggaagtttagaaaaaagcactacctttgcatccgcaatcgggaaacagctgggaaatagttaaaaccgaaagcggaaattgcggaaatagctcagttggtagagcataaccttgccaaggttagggtcgcgagttcgagtctcgttttccgctcacataaataaaatcttgtgcgttgtgacaagagtgttacacagaatgcccaggtggcggaatggtagacgcgcacgtttcaggtgcgtgtgtcgagaggcatgcaggttcgagtcctgttctgggcaccatgttagaggtttgcggaaatagctcagttggtagagcataaccttgccaaggttagggtcgcgagttcgagtctcgttttccgctcaagagaaaagatcagtgtagaagtacattgatcttttttatttatcatggtgtaaatgttagaaaacggaagaaggtcaaatcaaaatattgatataccctcctcccgctgttttagtcaaattatccgcaatggaaatatttattgaccaatgccaacatcccttccggattatcttttaagtcgttacgtaaggtcagatcgttataactggttaatttgctgatgattccatcaatcatagtggggctgaacacattatgtttttggaatatttcgcgctgttgttgcaaacaggttgcggaagctgcacagctatcgggaagctgggctaatgccttcagtttgtctgcattttctttctgatggatattgacgtttacgtaagttttttctgcaatgtccagtgcattttctatttcaaatccatggcgacaggctacagctaatcctgctatcagttggtagagatcggccgaaccgtccggtgaccgcatttccactgtctgtttttgtgtggtatcataatggctttctgtttccagtggattggcagtcatgcacatgtctgttttagctgcccatcctagaggtacgcgtaccaatactgaacggttgcggtcaccccagcaaatattagttggcgcttcctgatggggaaccaggcggaaataagaagtaggattggtattaccgaatgcggtgatggatggagcaagttccatcatgccagcaatagctttgcgtgctgtttctgataaaacaccttctttcaacatctggttttgtccatctttcatgatacgcatgtggatgtgcaatccggaaccagcttttcctgtagttattttaggcgcgaaagtaatgttataaccatgtttataggccagattacgtataatccatttggcgatcatcaattggtctgccgcatcttcggcattgacaggcaggaattctatttcattctgttcatatatcatgccattcaaggtaaaattacctacttcggaatgtccatattttatttgtccgcctgcttgtgcaatgtaggccatgcactgggtacggaaatcattgaacttggcatatggtgctgattcatgatagcctttctgatctgtagcctcgaacatatttgtatccggagcaattacatagtactctaattcccccatagcctgaaattccatgccggttacttcattgaatgccttgcatgctttgtgtaaggtatgttcgggggaactttccaacggctctccatccttgttaaagaaagagcaaagcatggaaagtgtaggtatctcggcaaacgggtccaaaaaagccgtccggaatcggggaattacatacagatcactgctgcccgcctcaatgaatggaaacaggctggaaccgtccacacgttctccacaagtcaagatagcatctagatatgcttggttgttgataacgaaattcaatgtcttcagtcgtccgtctccggcgggatacataaagttgaccatacggatgccactctgttgaatgtatcgttttatgtcttctttggtaaactctgcacaaggtttttctagaaatgccaccaattggttggggttcattattaattctttattcatagcaaaattggttgttttttgtttgttatttggttaactttccaaagataacaaaaagttttctgaaaatcctatgaaaagttcatagatattttctttcatactgagtgatattctctttatctttttctgtttgggagaacatcgttttataatttgtcctacctttgcaccgctgttttaaaatataaataagagaatcattatggaaccgatgcataaaattaataaagtagaggtccggaatttacagatcgaagattacatccaattatcacaatcattcaagcgggtgtatgcggataaggatgtgttttggacacacgagcaaatagaaacgcttatccggatttttccggaagggcaagtagtaacggtggtagacgataagatagtgggatgtgctctttctattattgtagactatgatatggtaaagggagatcatacctatgccaaagtaactggtaatgaaactttctgtacgcataatccggaagggaatattttgtatggtatcgaggtgtttatccatccggattatcgcggtttgcgtctggcacgccgtatgtatgagtaccggaaagaattatgcgagaaactgaatctgaaagcgatcatgttcggtggtcgtattcctaattattataagtatgcggatacgatgcgtcctaaggaatatttggataaggtgcgttcccgtgagatttatgatccggtattgacatttcagctttccaatgattttcatgtgcgtcgtgtcatgaagaattatcttcccaatgacgaagaatccaagcattgtgccactttgttgcaatgggataatatttattatcaggagcctacgcaggattatgtggataagaaaaccactgtacgtgtagggttagtgcaatggcagatgcgcccttataaaacattggatgatgtatttgagcaggttgagtttttcgtagatgccgtttccgattataagagtgattttgttctttttccggaatatttcaatgcgccgttgatggccaagttcaatcatttgggagaagcccagagcattcgtggtttggcacaatataccgaagaggttcgcgaccgttttatcaatttggctatcagttataatattaatatcattacgggtagtatgccatacgtaaaagaggacggagggctttataatgttggttttttagtacggcgtgacggctcatacgaaatgtatgaaaaggtacatgtcactcccgatgagataaagagttggggcctctcgggcggtaagatggtgcagacttttgatacggattgtgctaaaattggtatcttgatttgttatgatgtggaatttcccgagctctctcgtatcatggccgatcagggaatgcagattctgtttgttccattcctcaccgatactcagaacggctattcccgtgtacgtgtttgtgctcaggcacgggcaatcgagaatgaatgttttgtcgttatagccggtagtgtgggaaatttgccgcgtgtgcacaatatggatattcagtatgcacagtctggagtgtttactccgtgtgatttcgctttcccaactgatggcaaacgggccgaggcgactccgaataccgaaatgattttagtttcggatgttgatctgaatctgttgaatgaattgcatacgtatggcagtgtgcgcaatttgcgtgaccgcaggcatgacctttatgaactgaagataaagaaataaaaaaatgtttcattacggattactcaggttaacgctggtttatagataagtggttattattttatatttccgccttacttttaagaataacctgtgttaatcagagtgatcctgtaatgaactttgttatttcaaaataaaagaagctacgggccattctataacaaacatagtttttccttgtctgctttcctgtaaatagaaattgcccccatgtctttttataatctgccggcacagactaagcccgataccagttccttctgtttttgtggtaaagaaaggaacgaatattttttcttgcaattccatagggattccccgtccattgtcaagtagtcttatataaagtttgtttgttacttccagtgttacttctatttgtccgtctgtttttccttccaatgattgcatactgtttttcagcagatttaaaaaaacttgagagagttgcttctcatcgccctcaatatatatatcagagggggtgctacgcagaatgaaatggatatgagcattttcaaaatcagattgtagtaacagacctagattgtgcaatgaattggtcagtgagaatcgcttctttttcggttccggcatatacgataagcgtcgatatgattctgtgaattccatcagtctttcgctttgttcacgaatcactccaagtcctcgtattactttctcgtccgtaccggggcgcaatgaaagtgtttgagacagagaaataataggagcaatggtattcataatttcatgagtaagcacccgggtaagtttgttccatgactcactttctttctcgttcagttcattactgatatctttgatagccaacagggtaatcgtttctgaatttagtttcatccggttcatggatagtgacagttgtttttttgagttagattgtaaaagaaaggaattttccacatttccatgggttatgaaatctttcaagatcggatattgctcttccaattggcggaggaatatgattgactcaactcccagcaaacgtaaggctgcaccattaacaaacagaactcttttttcggagttccacgctagcactccatttggtacttcttccagtaaagagtgataaaagttctcttgtacccggctttgcgatttcgttgtggcaagcaattcattgattcggtttagtgaatggctaagtgcattcatttctttatctgccgattgctcgttgaacagtatcatgctctctttatcttccatcgcatccaagaatattcttattttggcattgaatttattcaattgttttaccaaagctctgataaaaaaaagtgaaataatcaagaaaagacagcctagaataagggcggtatgtgtaataataagtgcgataccagctccggctacagcaattattaataagatgtagcttaggataaccatatatagatgtttgctgaataccatgatcatcagagcttaaagcgttttattttgttgtaaagtgtctggcggctgatgcctaactgttcggctgttgctgtcagatttccatcgttttgacggatggctgtttctatggcctggcgttctacttcttccagattaggaacggtagtggagaattgtggactccaggtttgttttacgaaaatgtctttggaacggattacatctccttcacataaaataactgctttctcgatggtatgttgcaattcccggatatttcccggccaatgataagaacataatttctctaaagcatgttcatgcaggaagatttcttttttttcgtatttagcagcatagcgctgcataaaataatcaatgaacaaatgtatatcttccctccgttcgcgtaaaggcgggatttccagatgaatagtattcagtctgtacaataaatcctcacggaaagtcccggaatccaccatatcctgaatattcttgttggtagctgaaagcagccggatatccactgggattactttattactgccgatgcgtgtaatttttcggttttgtaatacggtgagcaactttgcctgcatggctaaagggagatttcctatttcatccataaacagggaactgccggatgccgcttcaaactttcccggccggctctcgtaggcatcggtaaaagaaccgcgctcatgcccgaacagttcactttcgaataaagattcactgattgctcccatatctaccgttaccatagaatgttcctttcgtgtggaaagccggtgtatttcctgtgccagcatttcttttcctgttccgttttctccggtaatcaatatattggcatctgtgcgtgccactttcaccaccatcttcattaactgctgcatggcaggggatgttcccacaatcatcggtgatttgtttctatcggggattctgtttttccttttcttaccgcttccaaaagcattttttattttgcgcactaaggtccggttatcccaaggtttcaacaaaaaatcagttgcatcattctttaaagcctttactgccagttctacatccccgtatgctgtaagcatgactactggtagtgcaggagctatctcacggattcgtttcagccaatataacccttcgttgccgttattgattcctgccgagaaattcatatcaagaataatcacatctatcggagaggtatttatgatagatatgatttgattcggatgatgggctgtctttatttcgctgaactccgtttccagtaataattccagtgaggccaatactcctttattatcatctactattaaaatcgttcctttttccatctcatttttgctttcagaggctaaaggtatctgcttttgattgtttctgcaaatgaggcgtccaattattggacgttttttattattttctgtaatgcttttatttatcataacggtgacttgacattggaatgtgtcttcagtccgtgttgtcagcgttccaatatcttccttggttcgttctggttttatagtgtttataatttggacgttataccgtctaaaatttggacagctaatttatattttattttgtaactggttgattattaatgttctgatcttcttggcatatcgtttgcttcctattctgtgtttaaattaaaatgcaatgagaaataacttgataattgtgtgtttgttgtccggtctgtctttgcctgtatgtgggcaaagtacactggacgattgcatacgttatgcttggaaacataatcctggtttcaagaatgtccaaatagacgtaaaggaagcacgaacagactatgtggctgctatgggtaaatttcttccttatgtttcagtacaggcggaagtgggcaggcatatcggacgttctgtcgatccggatactaatggatatacagccgattcatataatcaaggaactataggaatggatataactctttctttattcgaaggatttgcccggatcaatcgtttgcgatatacgcattggactaaaaaagagaaggagtgggatcatctggcaaagaaaaatgatttggcttatcgggtagctgaggcttattataaagcggtattggataaaaagctttcagaactggcagctgaacagcttcgtttgggagaacgttatctgaaacagacggaagcttttgtagaactggggttgaaatcgctttcggacttgcaggaagtaaaagcgcgtcatcaaggagatgtgttcagagagcgtatgtatgaaaaaaatcgtcagatgtcctttctttatttaaaggaaatactgggtatgaaagagggcgatattttgtctgtttctttatcagtcagtgaggatacgctcttgttaatgcctcaagtagaggtagaagaagtctatttacggtccgtacacgtactgccggattataaacggatggaaatgtgggaacgcgctgcccgtaaggagtatgctgtgacccttggacagttcagcccgactatcttcgcccgtttctcatggggatctgatttttataattccttgttctcgttacatcaattgcgtgaccattggaataaatatataggagtaggtatttcattccctattcttagcggattagatcggaatgccggaataaggaagaagaaattaaacttgcaacgggtgcggaacagcatagaggaagagaagttacatttacgtaatgaaacggaacgaattgtactttcattacattcgggatgggaagagcatcgacaggcttccctgcaggtaaaagcagaaacgcaagtgctgaaagaaacggaacggaagtgggaggaagggcttgtttccgtgtttcagttgatggaagcacgaaatcgcctgcttgtcgctaaagcggaaaaaataagagtgcgtttgcagtacgaactgacatcgcgactaactatgtattatcggacaggaagttttattaaccattaaaaaatatggacacactaattgaacgtaaaaagcgtttcactcccaggcggatttatggaggtgcgggagtattattcatattggtattcgttttttattttatttttcgtgataccggttcctccatgaccattgacaagagccgtatcactatcgctacagttacagaaaatgagtttaatgattatgtccgtgtaattggacaagtacttcccagccgcatgatttacctcgatgctatagaaggcggaagagtggaggaacgccttcatgaagagggagcgatggtaaagaaaggggatgtgattctgcgcctgagtaatcctctgctgaatatcggtatcatgcaaagtgaagcagatctggcctatcaggaaaacgagttgcgtaatactcgtataagtatggagcaggaacggttgagtctgaagcaggatcgtatcggtatccagaaagaattcattataaagaaacgtcgttacggacaatacaagcggctgatggaggggcaattgatagcgagggaggactatctccaagctacggaggaatatgaagcggtaaaagaacaattgtcggtattggatgagcggatccgtcaagatagtttgtttcgtttgactcagataagcagtttggacgagaatataatgaatatgaaacgaagtttggcattggtacgagaacgtcttgaaaacctgaaagtgaaagctcctatagacgggcaagtgggtaatcttgaagcacaaatcgggcaatccatttctgccggggaacatatcggtcagattattactgctgatctgaaggtacaggcattaattgacgagcattatgtggagcgtgtcgtccaagagcttcccgctgactttacccgtgatggagaaaattataagttggaagtaaccaaagtgtatcctgaagtgaaagacgggcagtttcgtacagatttccgtttcacgacagggcgtcccgaaaacattcgggcgggacaaacttatcatatcaatcttcagttgggggatcctgtcaaagctgttctgattcctcggggagttttttttcaaattaccggaggacgatggatatatgttgtggatgaaagtggtaaatttgccgtcagacgtcctatcaagattggcaggcagaatcctcagttttatgaagtgactgacgggctggcttccggtgagaaagttattatttccggttacgagctgtttggagataatgagaaactgattttaaacgaatgaaaaacacgtaagaatgattaaagtagaaaacctctctatgttgttcagcaccgaggaagtgcagaccaaagcattgaatgaagtaactttcgaaattgaaaagggagaatttgtcgctatcatggggccgtccggttgtggaaaatctaccttgttgaatatacttggaacattagatacccctacttcgggctcctatctctttgaaggaaagcgagtggataaaatgaatgaaaaccaactgaccgctctccgaaaaggaaatatcggtttcatcttccaaagctttaatttgattgatgaactgactgtatatgagaatgttgaactcccattggtgtatcttaatataaagccgacagaacgtaacaggcgggtaaaagaagtgcttgaaaaagtgaatatgctacatcgcgccaatcatctgccacaacagttatcaggtggacagcagcaacgtgtggccatagcccgtgccgtagttaccaatgccaggcttttgctggcggatgagccgacaggtaatttggactctaccaatggagtggaggttatggaactgcttagtacactgaacaaacaggggaccaccatcatcattgttacccattcacagcgtgatgctgcttatgcacatcgtataatccgtttgctggatggtaaaattattgccgagaatcgtaaccgccctatggaatctgacagcaaaattgaaattttatgattatacaaaattattggaatagcgtttggcgtaatctgatgaagaggaaaggtttcagcttcatcaatatctttggcttggctgtaggcatggcatcagctttattgatatttacttacgttgcttttgaatttagttttgacaaaatgcatagtaagagtgaacggatttatcgtgtgcaaagtacttttcatgagggggaagttctgacggatgattgggcgaccagttcattcggatatggttcggccatgcaggaaaatctggcgggaattgaggattatactcgtgtaggatgtattatccaaccggagcaattggtaaaatatggcgaattatgtctgcgcgagaatgggatagcatacgctgatcctggctttttccgtttgtttgattttgaattgttgaaaggtgaccgcgcttcttgtctttccatgccatgtcaggtagtgattacggaacggattgcccgcaaatatttcagagatgaagaccctgtcgggaagatacttatttttaacagcaatatgggaaaggtgtcttgtgaggtaactggaatcatgaaagaaatgccttctaattcgcatatacattataattttcttttatcatatgccaccttacctaaatgggtacaggagtattggtacaaacatgaagcctatacatatgtattgctggattcgcccgagcgcaaagaagagatagaacgtgcttttcctcaattggccgagaagtataaaactgaagaggcattgaaaaacaagacttggggggtgcggttggagccattggagaagattcatctcaatcctcaattaggttatgaggccgagttgaaagggaaccattcggccatcatcgcattgattttcggagctattgctattttgattatcgcttggattaattatataaatctgacagttgcccgttctatggagcgtgccaaagaggtaggagtgcgcagggtagtgggagctttcccgaaacagcttgttggtcagtttctatttgaagcatttgtaatgaatttgatcgcttttatcattgcgttaggattgatcgaactattacttccttctttcaatcagttggtaggacgtactattactttctctgtatggtttacggaatattgggggggcggggttctattgctttttatagtcggtatttatatttccggttactatcctgcccgtgcattgttgcgtaagaagccgattgttttactgaaaggtaaattccaaaatagccgttccggagaaaatacacgtaaaatattggtcatagtacaatatacggcatccatgatattgctttgtagtacattaattgtgtttgcacaactcagctatatgcgtcggcagtctttgggagtaaagaccgaccagattctggtaatcaagtttcccggacctactgagggtatgaaaacaaagatggagtctatgcggagagctatcaagaaattgccattggcgtcgaaagtaacttgttccggggcggtaccgggtgaagaggtggccatgttcctgtccaatcatcgggcacatgatgcgttgaagcaaaaccggttgtacgagatgctgagttgtgaccctgattatatagatgcatacggactggaggtggtagccggacggggtttttccgaggaatatggggacgatgtgaataaattggttatcaacgaaacggctgcccgtatgttaggatatgtggataatgatgatgccattggtgaggaaatagctgttgaaacgctaggagagcccatgcaggtaatcggggtagtgaaggattatcatcagcaagcgttgaataaaggttatacaggggtaatgcttttccataaagataagattgaatggattcctcagcgttatatttcggttgtgatgaaaccgggtgatccttcggaattagtatcacagataggagaaatatggaataattactttgcggattccagttttgattatttcttcctcgaccagttctatgaccggcagtaccgtcaggatgaggctttcggcgtattgatgggaggttttaccggattggctatttttatctcctgcttaggtttatgggtgttggttatgttctcttgtgccgtccgtaccaaggagatgggtatccggaaagtattgggggcatctcgttggaatctgttttatcagttgggtaaaggtttctttattcctattattatcgctattctgattgcgttgcctgtggcatggggcagcatgaatgcatggttggctcattatccgttccgaacagaattgaaagtgtggttctttctgcttcctgtggtcttgatgttgttgatttcttttctgactgtagcaggacaaaccataaaggttgtttatagtaaacccgctcggtcattgaaatatgaataatggaatataagatatccgtggttagtaattcatttacaaggaatatcatttaaagccaatataaattatcgtaccagttcattatggcagatcaatactgataaactttgaaaaccttttgaatttttctacaaaactaattttgcgtctaaaattattttattaattttacagcgtttttaaggagagtctaactctctatagttacaaatgagcgatgagaaagggtgccctg

SEQ ID NO: 3875 - DNA, 7143 bp, Unknown
  gut microbiota DNA sequence
agattatgaataatggaaaattctttgccggactggcactaggagcgctggtcggcagtgcattaagttgttttgcgcacagcaacagaggtcgcaaattgagaagagacgtgtatgatgccattcaggacttacaagaagatgcaaaagacctggctcatcatgcaaaacataaagcagaacaagtaagcagtgaagtagccggaaaagcaggtgagaaagtggaagaagtgaaagggaaaatacacgaagctgcaaataaataaaaaaaaagtaagtttttctttggagtttaaaacaaaacgcttacatttgccccaaaataaaaacagattttatgaatagaatcatggtaaatacatattggtggcgtttcttacaactaaacaagtcgtaagggaaccagaccatgtatatatacctgacattctaaaaggatattcaaactgaaggcctgtcgtacttacgacaggccttttttcgttagtgcaattaacattaaaatatagaacgacaatgaaaacttatcaggtaaacaaagaaggttattatggcgaatttggaggggcgtatattcccgaaatccttcaccgctgtgtggaagaattgcagaatgcctattccaaagtattggaaagtgaaggattcaaacaagaattccaccagttactacgcgactatgtaggacgcccttcacctctttacctggcaaaccggctaagcaagaaatatggctgtaagatctacctgaaacgtgaagatttaaaccacaccggagcacataaaatcaataatgccatcggacaggtgttactggcaaaacgtatggggaaaaaacgtatcattgcagaaaccggagctggacagcatggggtggccaccgctacggtatgcgctttgatgaacatgcaatgcattgtttacatgggcaagaccgatgtagaacgccagcatatcaatgtagaaaagatgaaaatgctgggagccgaagtccgcccggtcacttccggcaacatgacactgaaagatgctacaaacgaagccatccgcgactggtgttgccaccctgccgatacttactatgtcatcggctctaccgtaggtcctcacccctaccctgatatggtggcacgtctgcaatccgttatcagcgaagaaatcaaaaagcagctgaaagaacaggaaggaagggaatatcccgattacttgatggcttgtgtaggaggaggaagcaatgcggcaggaaccatttatcactatatagatgatgaacgtgtgcagattgtcctggccgaggcaggaggcaaaggtatagacaccggtttctcggccgctaccatccaactggggaaaatgggaattatccacggagcaaagaccttggttatccaaaacgaggacggacaaatagaggaaccttactccatttctgccggtctggattatccgggcataggacccatgcatgccaatctggccaaacagcaacgcgctttggtactcgccataaacgatgatgaagccatccgtgccgcatttgaactgacccggctggaaggtatcattcctgcattggaatcggctcatgcattgggagcattggacaaaatgagattcaagccaacggatatagtggttctcaccgtatcaggacgcggagataaggatattgaaacctacttgaaagaatccggcacaaggacctccttgcaataacacatagaaacccatgagagcaaaaaccctatacggacaactataaacagaaaagaaacaatgaaaacttttacctataccacccgatgcaaaaccatactgggtgacctgcatacaccggtcagtacctatctgaaagtgcgcgacattttcccacagagtgcactgatggaaagttccgactatcatggaagtgagaacaaccgttctttcatcggactgaatcctgtagccagcatcggaatcaaccatggcatagccactgccacctaccctgacggcagcatggaagaacatcccatcagcgaacatttccgggcagaccatgcgatatccgattttctgaatcgtttcaaggtaagcggagaatacaacaactactgcggactgtatggttataccactttcaatgccgtacgctatttcgaacatatcaatgtaaaagacagccgtgatcctaagaacgatgctccggatatgttgtatatcttatataaatacttgattgtcttcaatgacttccgcaacgaaatgttattactggaaatgttgcaggacggtgaggacagccatctggattatgtggaaaaagcgatccacaaccgtaactatactacttacgacttccgtaccgtgggcgaaaccaccagtaccctgaccgatgaagaacataaggcgaacatccgcaaaggcattgcccactgtatgcgcggcgatgttttccaaatcgtcctttcacgccgttttatccaacgttacgaaggagatgatttcaaactttaccgtgctttacgcagcatcaacccgtccccctacttattttacttcgatttcggaggcttccgtattttcggttcctctcccgaaacccattgtaaaatagaaaacgggcgtgccaccatcgaccctatcgccggaaccacccgccgcaacggagacaagaatatagatgctgaactcaccgccaacctattggctgatcccaaagaaaatgcggaacatgtaatgctggtagatctggcacgcaatgacttgagccgcaactgtcacgatgtacaagtagaattttacaaagaagctcaatattacagccacgtcattcatctggtaagccgggtcagcggcgaactgaaccccaaagccaatcccatcaaagcatttattgatactttcccggccggaaccctgagtggcgctccgaaggtaaaagccatgcagctgatcagcgaatacgaacctcacagccgtggagcctatggaggttgcatcggatttatcgggctgaacggcacattgaaccaagctatcaccattcgtacattcgtcagccgcaacaacgaactatggtttcaagccggtggcggcatcgtagctaagagcaatgaagagtacgaattacaagaagtaaacaacaaactgggagcacttaaaaaagcaatcatcctggcagaacaaatgtaaaaacgaatcatcatgaaaacagtaattatagacaactatgactcatttacctacaatttgagtcatttggtaaaagaactgggagccgaagttaccgtattacgtaacgatgctttccaactggaagaattggaaaaattcgataaaatcattctttcacccggtcccggtattccatcagaagcaggcctgctgctcgaagtaattaaaagatatgccggcaagaaaccgattctgggtgtatgcttgggagaacaggccataggagaagcttttggcggcaaactgaccaatctgagcgaagtatttcatggcgtacagacccccatctcaattaaaaagaaccaatcaaaagacaaaggaaagaaaaccgattacattttcaacggactgccggatgaagtgccggtaggacgttatcactcatgggtggtagatacggacggtttccctgagtgccttgaaataaccgcagtaagccaggaaggtctcgtcatggcattgaaacataaagaatacgatatccacggcatccagtttcatcccgaatccgtactaacccccgatggtaaatccatgatagccaactttctaaacgcataaccccaaccgtacataataaatatgaaagctatattatcccgcctcttcaatcacgaggaactgacccgaaaagaagcaaagaatttgctgctcaacataacccggggaatgtataacgacgcacagatagccgccctgctgaccgttttccaaatgcgcggcatcaaagtagaagaattgataggtttccgtgaagcattgctcaccacccgcatacctatagacttttccgcttacacccctattgacattgtgggcacaggcggtgatggaaaaaataccttcaatatctctacttgcgcctgcttcattgtagcaggagccggatatcatgttgccaaacacggcaactatggcgcgacttccgtcagcggagccagcaatgtcatcgaacaacacggtgtaaaattcacgaacaatccggataagctgacccgttctatggaagaatgtggaatggtctatatgcatgcccagttgttcaatcctgccatgaaaagtgtaggccctgtccgcaaagcactgcaagtacgtaccatattcaacctgctaggtccgctggttaatccatgtcttccggcttaccaacttctaggagtcgccgatctgccgcaaatgcgcctttataccaacgtgttccaaaaactgggcattggctttgccgtagtaaacaacctggacggttacgacgaaatctcactgaccgatgaattcaaagtgatgaccaatcgctacgaaaccatctacaagccatccgaactaggcttctctctcgccagacaagaagagctttatggtgggaacactcccgaagaagcgtcgaaaatcttccataacgtactggagaacaaagccaccaaagcccagacagactgtgtactgattaacgcttcttttgccatacaagccatggaaccggccaaaccgatagaagaatgcgtggccatcgcccgtgaatcattggaaagcggaaaagcattgaatacattgaaaaaatttgtggaactgaacagttgactacacacccggtattccactaccaaacgcctcatacaatgacagatatattaacagaaatcatcgcctgcaagcaaatcgagatcgaactgcaaaaggctgccatcagcaaagaaatgctgataaacaattgtaacgaacccatgccacgtatcagtatgagtgccagtcttgcctcttctccttacggcatcatctccgagttcaagcgtcgctctccctccaaaggatggataaaagaagacgcacaggcagataccattcctcccgcttacgaagcggccggagcctccgcactttccatcctcaccgatgaaaaatacttcggcggcagcctgaaagatatccgttcggcacgcccccacgtgcaacttcccattctaaggaaagatttcattatagatgaataccaactttatcaggcacgcatcgtaggagcggacgctatccttctgatagccgccgctttgaagaaagagcaatgcaaagccctagccctcaaagcccatgaactggaactggaagtcctgctggaaatccacaacgagcaagaactggaatatatagacgagaacattgacatggtgggagtcaacaaccgtaatctgggaagcttccacacagaggtggaaaactctttccgtctggcggaaaaactacccgaagaaatgctccggatctctgaaagcggcatctccagccccgaaacagtcaaacaactccgggctgccggcttccgaggcttcctgataggggaaaacttcatgaaaacacccgcaccgggagaagccttaaaaaaatttataacccaactagagaaatgttaggatgaagcaacaatgattatcaaggtatgcggtatgcgcgagcccgaaaacatacgcgccatagagcaagccggagcagactggatgggcttcatcttcttcccccaatctgcccgctacgtatcacatcgtccggaatacctaccggaacaatgccaccggatcggggtcttcgtcaacgaaagcagcgaaaacatcctgctgaaagcacaggaattcggtctgcaccatatccagttgcatggcagggagacaccggaacaatgccgcaaattaaaagccgccggactgggagtcattaaagttttttccatagcacagaaaagtgacctgcaatccgccggttgttatgagggcatttgcgattactttcttttcgacactgcctgctccggatatggcggttccggcaaaaccttcaactggaatatcctgcaagcctatcagggaaagacgcctttcctgctgagtggcggtctccggcccggcagtctttcccttttgttgcaattcaagcatgaacaatgggcaggtatcgacctgaacagcggattcgagaccgctccggctctgaaagacgccgccgccgtccacacatttataaaccaattaaaacaaaaaatacaatgaacagaatcaaccagttattcagtaccaagcaaaaagacatcctctctatttatttttgcgcaggctttcctaccttagaaggtacggcaagcaccatcaaagtcctggaaaaaaaagggattaacatgattgaaatcggcattcctttcagtgacccgatggctgacggtcccgttatccagcacgccgccacccgcgccttgaaaaacggcatgacactgaagctccttttcgaccaactgaaagatatccgtaaagaagtacagattccgctggtgctgatgggatatctcaatcccatcatgcaatatggattcaaggatttctgccgcacttgccgggagacgggaatcgacggagtgattatccccgacttgcctttcaaagattatatggaggaatatcgttccatagccgaggaacagaatgtgagaatcatcatgctcatcactccggaaaccagtgaagaacgtatccgcctgattgatgaacacaccgacggttttatctatatggtatcttccgccgctatcaccggtgctcaaaaagatttcaacgcacagaaacaagcctatttccaacgcatcgccgacatgaatttacgcaatccccgcatgataggtttcggaatttccaataagcaaaccttcgaaaccgcatccgctcatgccgcaggagccatcatcggcagtaaattcgtgaccttgctggatgaagaagacggagatacggaaaaagcagcagacaagctgctggaagccttgaaaaactaacctttcacaactcgtaacatcctcttcttcaaaaatccacctgaaagatcatggcgatacaagtgaaaatataataccttacagggtaagcgtctccgcgattctatatagtatat

SEQ ID NO: 3876 - DNA, 1581 bp, Unknown
  gut microbiota DNA sequence
tttgacggccaaaacgggggaaatatccaaactaataagatatggcaaagatagtgaatatttcagaaattcaccctactttgggttttacagaatttgatattctggaaaaataccgcaagagttttaatgagagtgagcttggcaagcttcattctgtctttccgtttgaatgtatggcaaaagccgccggcctgtcggaccggcgcctgggacgcaggaacagattcagtccttccgcaaagatcgcccttatggtcctgaaggcatacaccggattctccgacaggcaactggtggaacatctgaacgggaacatacactaccagattttctgtggaattatgattcccccgtcccttcccataaccaacttcaagatagtcagtgccatccgtaatgagatagcatcccgccttgacattgattctttccaggagctcctggcttcacactggaaaccttatcttgataaccttcacgtctgcatgaccgatgccacatgctatgaaagccacatgcgttttcctacggacatgaaactcctttgggaaagcctcgaatggctctacaggcatatatgccggcattgcagggagctgggcataaggcgtccgcgcaacaaatacaggaatgtggcggaatcctatctgtcctactgcaagaaaagaaagaggagagcttcaagggcaagaatgcttaagcgccgtatgatcaagcttcttgaaaagctcctcagtcaaagggatgggatccatagcgagtacggtgctttactccgatatacccaggattatcataagcgtctttccatcatcagaaaggtgcttgtacaagaaaaggaaatgtttgaagggcggaaagtcagtgaccgcatcgtcagcattgaccgtcattatgtacgtcccatcgtcagaggcaaggaaaccaagtccgtcgagttcggtgcaaaggtcaataatatacagatagacggcatatcgttcatcgaacacctctcgttcaaggcattcaatgagggtatacgcttgaaggactgtatccgcatgcagcagaagcttatgaatgtaagggtaagatgtgtggctgccgattccatatatgccaataatgccaacagaaagttctgtacaaaatatgggatatccacatcctttgtgcgcaagggaagggcggccaaagatgagcctttgaggaaggtgcttagaagcgaactctcaaaagaaagggcaacacggcttgaaggaagcttcggcactcaaaagcaacattactcgctctcaaggataaaggccagaaacaggaagacggaaatactgtggattttctttggaatacatacggcaaatgccatactgataatagaaaaaatcagaaacaaaacagctaaagcagcatgatatgattttactcacagaatcagaagaggtcatcagacttcttccggaacgtcatgtcctgtcggatagaattatgtgagaaagcacggaaaaatgacaataagaatggcatatgaaatggtcatgccctatcatcttcatatgccatcttattttttagagacatttactgaatatccct

SEQ ID NO: 3877 - DNA, 29365 bp, Unknown
  gut microbiota DNA sequence
gagtatgtctgtaaacatctgaaacacctttttcctcgtcaggtttcttataaccgttttgtggaactggagaagaaggtattgcttcccatgaccatattcatcaaaagagtactgctgggaacttgtaccggcatcagtttcgttgattccactcccttatgtgtatgtcgtaaccaaagaatcttgattcataagacatttgaagggcttgccgagcgtggaagatgttctatgggatggttcttcggattcaagctgcatctgataatcaatgacaagggtgaaatcctcaatttcatgttcacgcctggaaacgtggatgaccgggaaccgttgaaacagggtaggtttctggaaaacatcaaaggaaaactatgtgcagacaagggatatataggtcaggctctgtttgaaaaccttttccttaatggcatacaacttgttactaaagttaaaaataatatgaggaactcactgatgagtattgccgacaagattttgctaagaaaaagagccttgattgaaacggtcaatgacgaactgaagaacatcgcacagattgaacactcaagacatcgttcattcagtaactttatagccaactccttgtcggctatcgcggcatactgcttttttgaaaagaagcccgccattgacgtaaagtttgtcaatgacggacaacttgctattttttgattttatttcgaactcacgttagttaatgtattgtaggattgtaagcgcactaatcctcccgataatttgggcaaacaatctgtctgtattgtatttctcatgtatatccttgtaggtgtaatagagtggatctgcattttctctttcacctttgaatgtatcaatatgtgcgcgtgaataatagaccttacgctttttttatgtaatatgagaaatatcatatctttggacgaaagaaagtacaacagcatgagtcatactgaacttatccatgatttaatctatgatatagtagtcatgtctacttcagccataagttcggcaaagtgaatacaacaagtggggtatcgtagaaggtatttcgtcctttatacacttttttacaccatacttttcacaacgattccatactgcacgtcgcatcgaatgaaacttgcttacaatctgataaactgtgtcatattcccttttctcatgtatcttacctatgcgcgcttgataatcttctgtacgatcgaataagcagtcaatatcttttcgtctgataagagtctttcttttcatctagacggatcttataagcccattagcgaatcctctgtatgccgacgacttgccgatgcaaaaaaattgcaatacgatttagacataagttaatcaaacaattacctacacaaaacatgatactaatcttcaatattctaccgatttcttcatccaccaacttatacaatattatcggaggaccaaagttactacccttctttatagataagaaaacgctggcaaaatatattttccacaataggcatcccattattccccatataacttttgtttactttattgtttctaaaatattgggcagatatgcctgacttacggattttccattgtctacagagtattccgatttgtatattcaataaaataaacttaatcatatattaatcttttcaatggtctgtaatccggagttgccaaaaggcaacagcagctgctgcagctacattgagcgaatccactccatgcgccatagggatacggactacataatcagcttcagcaattgtcttgtaaggaagcccatccccttctgttcccatcacaatggccaaccgaggttcagccgccaatatgggatgatctatagagatagaatcatcagtcaacgccatggcagcagtacggaaaccgaatttgttcaaatctccaatcgtaccattcaaccatgtccatggaaccaagaacaccgaacccatagacacccttaccgcacggcgattcaacggatcgcaagaattgcgtgtcaacaaaacagcatctatcccaagagcagctgccgaacgaaatatcgccccgatattggtagtgtccaccacaccgtcaatgactacaatccgccgggtatcccggcagatctcttccatagagggcaacactggacgacgcatagcacataatacaccacgtgtcagaacatagccagtcaacgtagtcaacaactctctatcacccgtataaacgggcacatcaccacaacgcttgataatgtgagcagcactgccagagatatgcttacgctcacacataagagcaagaggttcatatcctgcatccaaagccctactaatgacattggggctttcggctataaatacccctttcccaggttccatacgctgacgtaactgagcttccgtcaacatgcagaaaacatccactccgggatgtgtcaatgatgatatttcaataataggcatacactcttatattatactatttcattgcttttaatctacattccagcctccattgtcacagctacttttatcactccatcttgtcggttctcaaaaatctggtaagccgtttctatctgatctagcgggaaacaatgtgtaattagtggagtggtatctatttttcccatctctatcaagcgaagtatctcagcacaatcgcaaccatctacgccaccagttttgaaggttagattctttccatacatatccggcaaaggaagaatctgaggacggtcataaagagccaccaaaataacgacagcattagggcgcgcacattcccatgccaagcgaaatgtatcctcccctcctgccacttcaaaaactacatccgcaccaccgtgtggactactttgcaatacaaattccttacattcttctggagtgacaacttctacctgcggataatgttccctaacaaaccgaattctttcagaggattgttcgcaaacaacaatgcgctgcggctttctcagcatcacacaaagcaaagtacagattcccgtaggtcccgcaccaatgacaagcaccgtgtcttcttcggtaatctccgaaatgcgagcagcccaaaatcctgtagcaaggatatctcctacaaacaaagcttgctcatcactcacggaatcgggaatgagattcaagccttgatcagcataaggtacgcgaacatactccgtctgccccccatcaatccgacatcccaaggcccatcccccattagaatcagcacaattattcacatatccatgccggcaaaaaaaacattctccacaaaaggtttccacattgacggtaactcgatcgcctggtttgactaatttaacatcacgtcctgtctgctccacaatacccaccatttcatgccccactgttattccgggaacagcacgtggcacaccaccatgtttaatatgcaagtcactggtacaaatacttccgagagtgacgcgcacaatagcatcacgcgagtctctcaactcaggcttcggtttctctatcaattcaaattttccctgtttaatataagtatatgccaacatgatatttccttttcttctttaatggttatctttataaaacgacgcaaagataatatacaaacataaataacagccaccatttgctgacaaaatggctttctttatcactttaccttgcttctcaactgcaaacaaattttacaaaggtttaaacacatctcgatattcattaaaattatcttcacagatttaaattcatttcatttccggctgacattttgccatcaagcatatactttgcaagaacatcagtgtattgccaaaaacaacaagataaaaaaaatcaaaaagcaatctagtaacaatttaaaatataggagattataattatgatgccgactagaaagtataacaatcagaattggttaccaagtattttcaacgatttctttgataatgaatggttgacaagagccaacgctaccgcccctgcaattaatgtcattgaaagtgacaaagattataaagtagaggttgctgctccgggtatgactaaagaagatttcaatatccacatcagcgaaaacaacgaactagtgatctcaatggagaaaaagaatgaaacaaaagaggacgaccatcacaacagaagatatttacgtcgtgaattttcttactctaagttcgaacaagctttgattcttcctgagatgtggttaaggaaaaaatcagcgccaatgccagcaatggtgttctgaccattgatttgcctaaacgcactcctgaagaaaaagccaaagtgaacagaatcatcgaaattcattaatcacagattttgaatatttacaatcagacagtttataaggtacatctataacatgctattattttgcatgatataaaagtgtgccttatatattgtccgattgtcataaaatcaacatatttgcatcaacactttctgcggatttccaccatgcttttcagcgtttcttcccatctttcccctaaaaaagtccacctctattacaattgaacttcaaattcagggcaaaactgaaaaaagccagtttaaattttccttcaaaaaatgctgaacaacattaaaacagaaacaaagaggagtaggcttcttttttattatacaagcattaaaatcacatatttttagtatttttgtacccaaattcaccatataaaacaaaccaataaaaagaggatgaaagcatcagtacgtttagttcgttttgctacaataggaaccttaaattaccttattaccatgttaccatgttagtgatatggattgtgatgagttacttctcattcaaaggaaaatatatagtagcaaatattatggcatatctcatcgctcaaacccataattttatatggagcaaatattggatttttccttccagcaatccccaaaacagtctttggcaacaaataatgctcttttgtaccgcttttggtattgcctatggcatacaacttctttttgtgatactgatgatagaagcaataggaatcaaagaatttacagcacaatttattggaataataatatatggagctgttaattttatggtaaacaatagaataacattccgataaatatatttcaaaacttatggcagacaattatatagaaaggcaatacgaacaatatgaagcccgaaaggctgcatgggaaaaaaaacgtaaacaaggaaagaagaaaacgatttccgtcaagcctcaaccaaaggacctgacagacaatacaatcaaacttcctagaaaagcattcatcacaggaggtgccgatggcatagggagaaacattgtgaaagctttctgcaactcacaataccaagtcgccttttgtgacaaaaatgaggatttaggaatacagacagccaaagaaaccggagcaattttttatcatgccgatgtaagtaataaagaatcccttgagaactgtatgcacgagctttttgaaaagtggggggatatggacatcattattaacaatgccggaataagcgaattttctcccatcacggaaaccagcgtggaagattttgataaaattttgtccatcaatctgcgacctgtatttatcacctcacgcacattagctttgcatcgcaaatcccaagcagaaaatcacccgtatggcagaattatcaatatctgttccacccgttatttaatgagcgaaccgggaagcgaaagctatgcggcttccaaaggaggaatctattcactgacccatgcacttgctttatcccttgccgactttcatatcaccgtaaactgtatttcgccgggatggattcagaccaatgattacgaacggctacgcccagaagatcatgcccaacacccatcaaaacgagtaggcaaaccagaagacatagcacgtatgtgtttatttttatgtcaagaagagaacgacttcatcaatggacaaaatatcatcatcgatggtggaatgaccaaaaagatgatttatttagaataaaacgaactaaagaaaatatctataatgaataaataatcactcatgaaaatacatcatatcgccatttggacatttcatctggaaaagctaagggaattttatactcgttactttaacggaacaagtaatgaaaaatacattaattcccaaaaaggttttgaatcttacttcatttcatttaaaagtggtgctacattagagttgatgagtaggattgacgtgcaaaatatcccgatagaagaaaacagactgggattgacccatctagctttttcttttgaaagccaaaaagctgtcttatcactaacggaacagctacgtactaaaggataccatatcgtaggtgaacctcgcatttcaggagatggctattttgaaagtgtgatactagatccagacggaaaccggatagagtgtgtttacaaaaaagagcaggaatgccctcctgagggaaatcatgtaatagaaactgagcgacttattttacgtccttttacagagaatgatacggaagctgtttttaactgttgccagaatcccaacctaggaaataatgctggttggaaacctcatgacacactggaagaatctctgaaaattcttcaaacaatatttataccacaaaaagacacatgggccatcactagaaaggaagaccggcttctgataggagctataggaattctaccagacccaaagagagagaattcaaatgccggaatgataggttattggttagatgaagcccaatggggaaaaggatatatgtctgaagccgtctgtgctgtcttggactatggcttcaacaaactaggattaaccttgatcagtgcaaattgttatcctcaaaacaaacgttcacaacgtgttttggagaaaatggggtttacatacgaaggcattctccatcaagccgaagttagctatgatgacaaaatatatgatcatttgtgttattacttagagaaaaacaacctaaaataagtttttcatttttacacaatctcaaatgcctattctatttcatcattaattttgttaatccctaacttcccccaaaggatatatacgtgtctaaaaaaatcaaaacaaagcaatcgttcttgggtaaaatatttatccaagaacgataaaaatacaccttattcctcttcggagattatttctcataaaatcaattgaaataatacaagaagatagcgatgccttcaagtgccttcttcggttggtcttttatctcaattgtaaatttaatttcagccttggctacgccacgcaagttctgtaaagaatgaagacttgctaccatacggatactctgacctgctaggacagcctgtccaaatttcatcttgtccataccatagttgatcatcattttcagattattcacttctataatctggttccacatatgtggaagcaacgaaagggtcaggtaaccatgtacaatagtactatgataaggactttccactttagcacgttctgtatctacatgaatccactgatgatccaaggtagcatctgcaaaaagattaattcggtcttgcgacacttccacatagtcggaaattccaatctgccgtcctagcagcttctcaaaatcctcgtacgaattaacaacaactttatccattatctctttgttttaaaggttatacactaattgaatacaaaaataagaaaaaatagtcctatatttgcactttattcacacaaaaacttcattacagatgagaattattgaaagagaacagcgtaccgcagaacaaatgatccgaatttattgtcggtacaaggaaggcaataaagagctttgcccaacctgtcggcagttattgcaatatgcacataacaggttaaagcattgtacattcggtgaacaaaaaaagacttgccgcaactgtcccatacattgttataaaccagaaatgaagaaacgaatacaagaagtaatgcggtatgctggtccacgaatgtttttttttcatcccataacaactatcaagcatttcattcatcaataaacagaatggacagagcacagttttataaagaagtatatagcattacaaaagaaatcccctacggcaatgtttttacttacggaaaaatagcacaacttataggtaatccccaatattcacgaatggtaggacaggctttatctcatgcaccaaaagaagaagaccttccttgccaccgggtagtaaacagccaaggaagactagttcccagctggcagaaacaaaaagaattattggaaaaagaaggaatcaccttcaagcgcaatggatgcgtcaatatgtccaaacacttatgggacattactggttcactcacatcgacaataggtattagccccacaagtgcaacgtggcaataattgctcactcagttcgtcccgataaaactcatataattcacgatacatcgtttcataaagttcggaaatacgatgttccaattctgtttcatcctcataaatatgctgaaacgggtcatcaaaagaaaaatgcttccagtttttcacttccttattaaaatcaccctccacttcctttgcttcttcacaaagagtaatcacatagtcccatggttgatggcaatatatatccacatcactagctttcttacgagagcaatcgtatccattctgttccatcacccctaccactgaagatggtaccactcttcccggcagaactccagaagtaaatatctttgtcccatatccaaaagaagataatatcttctgtgccatacgactacgacatatgtcactattactcaccaataaaatattcatcgctattcctatatttaaattcaacaattattttcattcatccctactaacataaaacactctcaaagtataaactaatatccgatatccagccccattcaagtgcaaatcatcaatgggcaaactagggttcaatttatcattcaacaacaatttatcgaacacgtctaaaatcaccaataaatgagattttaagttttcctttcatacctacctcttcaccagtctttttggagagccactccatgaacaccccaaacaataaacaatagttaaatcaaacccttccatattctcttccaaatttctcggtaccacttccccttcatccgatacataaactaacaacatttctttcttctcatttttaacgtataaccctgcaattttgcattgcggacacaacaattttctcatatctattttctctttttatccaaaataacaaattaacatccaattttcttataaatttgcgacaaaaatacgaaaaaaaacagttgaatagcatctgtagtgaatttgcacaacataaaaagattattggaaagaaaatgcctatctttgctcaaaaatataaaatcgcaaaataaaagtgtagctatggaaataaaattagacagaaaaaaagatcatattgcggcatctgattacaaagaacaaataaccgtcataaaaacaactagcgatttcaaaataggaaacaatgtagacacgaacaaaataaaaggaaattatatggtaaaaagagagaaagaaacgcttataaaaataatagaacttcgcaaatctcaacgcgatattatcctaactttaaatcgtatctctatattcccgttacagactgaaaagcagtcaactgaaatattacaggaattaaacaaaaactttatcatccattccgagttgtccgcatagtgacctcacaagaaaaacaaatcattagcaactatattaaacgaactatgatacatttttttaagaattccattgccactataaagttacccgataagttcacttatccttttcactatacccctcatccactttgcataatagcgactaaagaagtacaagcctatctgacaagtcaatcccaatggcaaaaagaattgcaacaaggaaaaatgtttggtgtcctaattgtacaaacacccgagaataaaataggttatttggctgcattttcaggaacattggctggtaaaaactgtcatcctttcttcgtcccgccaatttatgatttgttacaaccacagggattcttcaaaatagaggaaaaacgtatatccgccatcaatgtatgcattaaaaagacacagaacgaccctcgttacatagatctactccgacaaattgaaaaagaaaaaatacaatcccagcaggaattgactgaagctaaagagtttttcaaatccgctaaaaaaaacagagaaatccggcgcaagacaggaattcccgacgcaaaggagttagctgcaatgatacgtgaaagccagtttcaaaaagctgaattaaaacgcatggaaaaaatatggaaagaaaaaatcgcttcactacaagcagaagccgatactttcatcacaaaaatagaaacgatgaagatagaaaggaaaaaacgttctgccactttacaaagaaagctgtttgagcagtttcagatactaaacgcccatggagaaacaaaagatttatgtcgtatttttgcacaaactatacaaaaatttcctcctgccggagccggtgaatgtgcagctcccaaattactccaatatgcctataagcatcaattaaaacctattgctatggcagaattctggtggggagattctccaaaagcagaaataagacatcatggatactactatcctgcatgtaaaggaaaatgcggacctatcctgggacatatgttacagggactggaagtggaagaaaatcccttgttaaaaaaacattatcatgaaatgccattagagatagtatatgaagataattacctagtcgtaatcaacaaaccagcaggaatgctctcggttccaggaaaaggagaaatagactctgtctatcaacatataaaaatactttatccagatgccacaggtcctctgatagtccaccgattggatatggctacttccggtgtgttattaatagccaaaaacaaagaagtacatcagcacctgcaagcacaattcaagaatagaatgataaagaaacgatatattgccttattggatggcaagatttcttctaaagaaggaaccataatactccccctccgtatggatcctcttgacagacccagacaagtagtagaccatgaacatggaaaaaccgctatcacacaatatcaggttttaaacgaacaagaaggaaacacacttattgccttttatccattgacaggacggacacaccaattaagagtacatgccgcccatccggaaggattacattgtcctatacgaggagatgaactctacggacaaaaagcagacagactttatttacatgctgaaagtctagagtttgttcaccctgtaacaaaagaaataatttttgtagaaaagaaaagtaatttctaatagtttttgctcagaaaatttatctgtgaggtgctgaaagtttttttcagcacctcacacaccaaattagtattttaccattcctgaagtagacatccgttttattcttccatacacatatataaatgcgggaatcagaaaaataactgcaaatatccatgccgtagggtcaccaaaacaaacagctaaatagcccaatattggtactgcataaagactgaccattatacgggcaatcatttcggatacccccgacaacatagccaaattggtaaagcccaccccctgaatggaataacgcaagatacaaagtaagcccaaaaccggaaagaaagaaacggaaatatgcaaaaacaattccgtatctttcaatatctcccattctgctgggtcaacaaataacaaggcaaaagtacgtgctcccaacatcaagactacaaacataaaaccacaataaataaccatcattaacacactcgccttgattcccagccagatacgcttcggttttcccgcaccgtaattctgtccactataagtagccatagctatacccagactctcaagcggacacatacaaaacatcttaatacgcatagcagccgtaaaagcagccacacaagcagtacccaatgcattattcgcactttgcaacataatactgccaatagcagtaatagagaactgtaatcccatcggcacaccgatatacagtaaagtctttgccaacgctcctcgaaatttatgctctgtcggagttcccttcagaatctcaaaatgacgcatcatatacaaataacacaatacagccgaaaccccttgtgaaaataccgtagccacagctgctcccgccactccccaattaagtatcaaaatacaaaagagatcaagcaaaatattcaatatcgtagaaaaaagcaaaaaccaaaacggagttttgctatcacccaatgcacgaataatacttgaaagcaaattatagaaaaaggtacagggcaccccgataaaagtaatcagcaaataaagataagcatcctcaagaatattctccggagtctgcatcatctgaagaatatccgaacaaaacatactagttacaatagcaattactacagacatcaccgctgccaattgtaaactaactgccacaaaacgccgcatcataccataatcccttgctccaaacttctgtgcgacaggaataccgaagccaccacaacagccattgcaaaagcctaatatcaaaaacaccaccgaagtgctagctcctacagaagccaaagcattaattccaagaaacttacccacaatagcagcatccatcaaggaataagtctgctgaagtaaattacccagcaataaaggaaaagcaaaattcaatatcaaagggaacggacgtcccgaagtcatctctctcgaagttgccataacatgaatgtattgtaaatccgagcacaaatatatatcatcctttgtaaaaatacatatttctagaacttcatttcaatgaatacccattaattaaatgatacatatcaatttttcccggagaactatcgtctttcccaaaatcctgaataaaaaagcaacaacacagcaaacaactccaaacgtcctatcaacatcaggaacgacaatatccatttagcagcatcaggcaacgccgcccatgaaaaagcaggaccgaatgctcctagccccggtcccacattgcctaagctagaaattactgtactcatcgcttcaattatccccaccccgaaaaacatcagcagtatccatccggccaaaatacagaacaaataaaatacaaagaatgtattcactgaagcaatgatggaaggcgatataacctgacggttcacacgaacaggcaatacagccctaggatgcagcatccgtttgaattcatttttgatattacgcgccagaatcataaggcgcatatttttgattcccccactagtagaccccgtacatccacctgacaacatagcaaaaataagaagcatccatgtaaaagatggccacaagttataatcatccgttgcaaagccgcatgacgtatgcgccgtagccacttgaaacagagccctgcggaatgccttttcccaatcataatgattctgaaaaactaaggcaaacgtaataacaagtgtcagaatactcactgatttcataaaccaacggaattcatcatcctgaaacaaacgcttgcctttccctttcagacacataaaatagagagagaaattaatacccgaaaggatcataaatatcgctattacatattctataaacggagagttccaataagctacactagcttgtttggtagaataaccacctgtagccgttgtagagaatgaatgacataccgcatcaaaaaaactcattcctcctatcatcagcagcacagtttctgcaattgtaagaatagcatatatcatccacagccacttagccatcacatcaatccgaggatgtgttttgtcgtgcgtcactccgatagcctcagctgaaaaaagttgtatagttcctcccccgaaaataggaagcacagcaatagtaaaaaagacaatacccaagccacctatccattgtgtcaagctacgccaaaataacagaccatgtgaaagagattctatatcatccaatatagtagctcctgtagtagtaaaacccgacatggtttcaaaaaaggcatccgtcaccgaagggattcctccactaaaataaaaaggcaacattccaaacaacgtaaacaaaaaccaagtaaaagttacaatacagtacccatctcgtcgtgtcagccgattctcagcacctctactacaaattagcaaaactccaccgaccaatgtattcaaaagaatggtatatagaaaatattgataatcttgctcaccgtaacataaggaaacagccgcacaaagcaggaacatagcagattcaataaaaagtaatacccccaatacacggaatatcatttttttatttatcaagctattattccggcttccacctttatataatttatctggattataaaattctcccatctttttataccttttatattcgacaagtatatagcgaatactatgccaaaatgaaaaacaacattataaactattgataaacaaacagatattatatgcagtcataaaaaaaaggaaacactacccttttcaaaatgaaagggagcgtatttcaaaacaacaaggttgcagatatgacgatctcaagcaaaatttaaattacatacatatctgctaacactacaacatcgtcctcatcataatgaataatgaataaatattttaaaattacccactattttactatttttgcatccaaatcgataatcctctactaaatttaattcgcctactgtggaattattctacagctgttgcctgttttccacactttccctatcaacaaaaggcagtaataaaacactgattatgaaaaggaaaggctatttacagtagtttggcacgctgcttgtattcctactgacggcatcttaaacaataacaaaactaaagtatgaaactattttttacacacaaagaaattgcgctaaaaaagaaaagaacagcgcttgtagtaataggtattggactagttatcgggatttacctgattgtttcccatcgaccggcaaagatgccggaacttccagtagttgccatagcaccggcaacgcaagacgatgtggaaatatatggtgaatatgtaggacgcgtacgtgcacagcaattcgttgaagtacgtgcccgagtagagggatatttagaacaaatgcttttcgcagaaggtacatatgtcactaagaatcaagtgctgtttgttatcaatcaagatcaatatcgagccaaagctgacaaagcgcgtgcccaattgaaaaaagatgaagcacaggcacaaaaagcaaaacgcgatttagaacgtatccgtccgctatatgaacaaaatgctgccagccagttggacttggacaatgctactgctgcatatgaaacagcagaagcctcggtagctatgagtagtgccgaccttgatcaagcagaattggaactaggttatacgatagttcgttctccgttagcaggacatatcagtgaacgtcacgtggatttagggacattggtaggtccaagtggcaaatcactgcttgccaccgtagtaaaaagtgatactgtattagtggatttcagcatgacagctctagactatctgaaaagcaaagaacgtaatgtgaacttaggtcaaaaagactctacccgctcttggcaacccaatgtttccattactctagcagacaatactatttatccatacaaaggactggtagactttgccgaaccgcaagttgatccacgcacaggtacattctccgtacgtgccgaaatgccgaatccagaacggatattacttcctggacagttcaccaaagtaaaactattattggatgtcagagaaaaagctacggtagttccgttaaagtccgttatcatagaaaaaggcggtgcctatatttatgtaatgcgcaaagattctacagtagagagacgtttcattgaattaggacctgaattccagaatcaagtagtggtggaaagaggcttggctcccggagaagacattgttatagaaggataccacaagctgaatccaggcatgaaagtaaaagtaagtcctgctgtagaagacaaaaaaacggaggaaaaagatacgatcggataatttcactcccgaatacgaattcccctatggaggaaaatttacgcattcaaaaaaacaatagacattatgaaagttagtttctttatagacagaccggtattttcagctgtcatctccatattaatagtcattgtcggtatcatcggtctcacgatgctacccattgaccaatatccgcagattaccccgccggtagtgaaaatcagcgcatcctatccgggtgccagtgccctgacagtatcacaagcggtagccactcctatagaacaggaattgaacggtactccaggaatgctttacatggaatcaaacagttccaattcgggaggtttttcagccaccgtcacttttgatatctcggcagatcccgatctggcggcagtagaaatacagaaccgtatcaagttagcagaatcgcgtcttccagcagaagttatacaaaatggcatttcggtagagaaacaggctgccagtcaattgctgaccctatgccttacctctaccgacccgaagttcgatgaaatataccttagcaactttgctactctgaatgtactggacctaatccgccgtatccctggcgtaggacgtgtttcaaacatcggaagccgatattacgccatgcaaatttgggtacagcccgacaaactggccaatttcggtctgaccgtagccgatctgcagaatgcactgaaagaccaaaatcgggaatcagcagccggtgtactgggacaacaacccgtacaaggattagacgtaaccattcccatcactactcagggacgtctatctactgtaagccagtttgaggaaatcgtagtccgtgccaatgccgatggttccatcatccgtttacgtgatgtggcccgcatctcactcgaagcacaatcatacaataccgagagtgccattaacaaagaaaatgcagcggtattggccatctatatgttaccgggagccaacgctatggaagtagcaaaaagcgtgaaagaagctatggaggaaatcagcaagaatttccccgaaggaatgagttacgagatacctttcgatatgaccacatatatttcggaatctattcatgaagtgtacaaaacactgtttgaagccctgatactggttattatcgtagtatacctttcactccaaagctggcgtgcaacagttatcccactagttgccgtacctatctcactgattggaactttcggattcatgttgattttcggattctcgcttaatatcctgaccctgttggggttggtacttgccatcggtattgtggtggacgatgctatcgtggtagtagagaatgtggagcgtatcatggaagaggagaaactatctccctaccaagcaaccaagaaagctatggaaggacttacaggagccattatcgccacttctttggtactggcagcagtatttgttcccgtaagttttctaggtggaattaccggacaactttatcgccagtttacggtaaccatcgtagtatccgtattgctgtctacggtagtagctttgacattgagtccagtcatgtgttcgcttatcctgaaaccggaagatccgaacaagaaaaagaatatcgtattccgccgtatcaatgagtggctggctatcggcaatcataaatatgtagggcttatcaaacacattgtgaaacacccgcgtcgggtactgagcacattcggcatggtattgatcgccatcctgttaatccatcgcattattcccaccagcttcctccccatcgaagaccaagggtattttaaaatagagttggagctgcccgaaggtgcaacgttggaacgtacacgtatcgtaacggaacgtgctgtggaatacctgatgaaaaatccggcagtggaatatgtgcaaagcgtggcgggaagcagtccgcgtgtaggaaccagtcaggcacgaagtgaactgactgtcatcttaaaaccttgggaggaacgtgactcgcaaactattgacaatattatggcacaggtaaaaaaagacatgtcacaataccccgaatgcaaggtatatctttccacccctcccgttattccgggattgggcagttcgggcgggttcgaaatgcaattggaagcacgtggagatgccactttcgaaaatttggtacaagctacggatacattgatgtattatgcatcaaaacgtaaggaattatcaggtttatcttcggctttacaagcggatatcccccaactttattttgatgtagaccgtgacaaagtaaaattctcaggagtacctttagccgatgtattctcgactatgaaagcttatacaggttcggtatatgtaaacgatttcaatatgtttaaccgcatctaccgtgtatatattcaagcagaagcaccctaccgggaacataaggagaatatcaacctgttttttgtacggggtacagacaatgccatgataccgctcacctcgctgggtaccacttcgtataccactggtccgggcagcatcaaacgttttaatatgttcaacagttctgtgattctcggtgaggccgcagacggttacagttcaggacaggctatggaaattatcgaacaaatagcccgcgaacacctaccggaaaatatcggtgtagaatggagcggactatccttccaggaaaaacaggcaggtggacagaccggcatggtgatggcattagtgttcatgttcgtatttttgttcctcgctgccttatacgaaagctggatggtaccggttgcagtattactctctttgcctgtagccgcattaggtgcttatctaggtgtatggggctgtggactggagaatgatgtctatttccagatcggattggtgatgctggtaggactagccgccaaaaatgcaattcttattgtagagtttgccaaagaacaagtagacaaaggagtagatgtagtacaagctgcacttcatgcttcacagctccgtttccgacctattttgatgacttcattggcattcatcttaggtatgttacctatggtcattgccagcgggccaggttcagccagccgtcaggctattggtacaggtgtattcttcggaatgatctttgctgtaactgtgggaattttgttagtacctttcttctttgtactgatatacaagatgaaagcgaagatgaaacaaaaataaggatataaaaagatgaaagaaatgatgaaacatacattattatatatagccgtatcaggaatgactttgctgacttcttgccaattaggtaagcactacacacgtcccgacttacatcttccccaacaattagatacattacgacaacaggatacattatctatagccgatatgcaatggtgggaaatctatacggacacaaccttgcaaagcctgatagaaaagacgttggataacaacaaagacatgaaaatagctgcggcacgtgtaaaagaacttgccgcaatgaagcgcatagactttgccaaccttttcccccaactgaacggaagcgcttatgcccaaaaagaaggaagtaattatggtggtgacaactataaaaatgaccccgaactgggtggtaaacttaccgtgacttgggaattagacttatggggtaacctgcgttgggcaaaagacaaaagcatagcacaatttctgggaagcatcgaggcgcaacgtgccttgaaaatgagtattgtgtccgaagtggcacaagcctattttgaattggtcgcattagacaatgagctgaacatcgttcgtcaaacactctatgcccgtaaagaaggagtacgcctggcaaagcttcgttttgaaggaggactgacttcagaaacttcttatcaacaggcacaagtggagtatgcacgtaccgcaaccttagttcctgaactggaaaggaaaatttcattgaaagaaaatgatatcgcattcctggcaggcgaatacccgcaccgcatacagcgttccattctgcccgaagaggtaaaactacctgaaacattaccagtaggtctaccctccactctgttggaacgtcgtcccgatgtacgcgaagcagaacagaaattaatagcagccaatgccagtgtaggtattgcctataccaatatgttcccacgactcagcctcacagcacaatatggcgtagaaagtgaagaattctctgatttctttaaatcacccattcattatatcagtggcaatcttctcactcctctcttcgccatgggaaaatacagagcaaccctaaaggccaagaaagccgcatacgaacaggaatgctacagctatgaaaaatcagtgctgactgcattcaaagaggcccgcaatgccattgtggacttcaataagataaaagatatctacgaatcgcgtctgcaactggaacgttcctctaaagcaacaatggaactggcccaattgcaatacatcaatggagtaataggctatttggatgtattggatgcacaacgtagctatttcgatgcacaaataggattaagtaatgcaataagagacaaacagattacattagtaaaattgtataaagcattagggggtggatggtaaccatcccctcttaatttgattttcctttatccggaaaatcaaattaagatatatgcctgataggacgtattgttctctaccggtgtaagtgacaaataacccgacttcacttttccattttccagatataaaggatgcttttcttgaagcgcaagatgagaatgccatgcctcaccgggctttgcataatattctataacataccgtccctgcccgccatcacacacatagttatcatatatcaaacgtgctaccactcccatattcatacgaagatttatttccacacacggatgaatggcatacccgccgttttgggtacggcatatcatcatatccacccccagatatccttcgtaactcccttttatcacttccgccaattccacctgtaacgccctcccaacctgatgtaagatttccgcagaaacatatgtggatatcctcgcttcaataacctgatccgcagccaacaagttttctttataaacacctctcttgtctgtttcgaataaagaataccctataaaatgtacctgtccccactcgtctgcaaaaaactccatggcaaaatccaaaagcttatcataaaaaggctctcctatcacctcatgctgagtggtaagtatgtgtcgaatccacccttccagagggatggtaaaactacctgaaacatattgtatccctctcccactaccagaccatggagcttttaacaaagcacgaggatgagacaacacaaaagccttcacttcctctgttgatgacaatacaaaagcctcccccaatgtgggaatattcccacctatatgcctacaaaggcgtcgtaacacttttacagccgtctgacgtccggatatttgacggatacgcttcatacgctctactgaaggatatgctgtatcaggaaatccagcttcctgcaaacgacgcaccaaagacggattccatccccaaggaatcaccttattataaatggggaggaattctgaagtccaattgaccgaaggcggcaaaaaagattgtctttccattgttttcatacgcagagcagaatccagccacacagttcctccctgttctgcataccatgcaggcaacacggacagctcggccgccattcgccgggcactggcaggtgccatataataaggatcaccacaagccaatgccatatcattttccggattgaataaataaagcgcttccatttccggacacaaagataaatgttttagagtacaaaccatttctcttgttcgtcttttagttgaaaaaaaataatattttgctatctccagtttgcaatttgaattagtattgctatatttgcaaccgataaaaaagcaaccatggaaaccttttacagaacacacagttatctggtggaacatacaaatgctcctgttcgccgggacttgatggacgaaatagactggaacgacagactgatcggcatcaagggtactcgtggcgtagggaaaacgactttcctcctgcaatatgcaaaagaaaagttcggaacggatcactcatgtctgttcatcaacatgaataacttctacttctctaaatatacgttagtggagtttgccgcagaattcgtaaaacgaggaggaaaagttttgttgatagaccaagtgttcaagtatcccgaatggagccacgacctgcgtgcttgctatgaaatgtttcctactctgaagattatattcaccggatcatccgtgatgcgactgaaagaagaaaatccagaactgagcggcattgtcaaggtatactacctgagaggtttctcattccgcgaatacctgaatctgcaaagcggtaattgtttccgtgcctataccttacaagaaattttggagaatcacgaacagatagcgaaaaccatcctgcgcaacgtgaagccgttggattattttcaagactatctgcatcacggtttctacccattctttctggaaaaacgtaacttttcggagaatctgctaaaaaccatgaatatgatgatagaagtagatatacttcttatcaaacaaattgagctgaaatatctttcaaagataaaaaaattactatatttgctagctgtggacggacccgttgctccgaacgtcagccagctggccacggagattcaaacttcacgtgccacggtgatgaattacattaagtatctggcagatgcgcgtcttatcaatatggtttatcccaagggagaagaatttcccaagaaaccttccaaactgatgatgcacaacaccaacctgatgtactccatttatccggtaaaggtcgaagaacaggatgttctggatacatttttcatgaataccctgtataaggaccataaactatataaaggcgataaaggcacttcatttatggtagacaacggactgcatttccgtatttgcgcagaagggtgcaagttcaaaaataatccaaacgtgtattatgccctacacaaattggaattaggacacggaaatatgatcccattatggcttttcggctttttatattaagagatagagaataaattttattacctaataattagtaattgtatgactaaacaaaaaaaattcatcacttgtgatggtaaccaggcagcagcacatatctcgtatatgttctctgaagtagctgctatctatcccatcactccgtcgtctactatggctgaatacgtagacgaatgggctgccgcaggtcgtaaaaacatcttcggcgaaacagttttggtacaagaaatgcagtcagaaggcggtgcagcaggtgctgttcatggttctcttcaggcaggtgcgttgactaccacttacactgcatctcagggtctgttgctaatgatccctaacatgtacaaaattgccggtgaattcctgccttgcgtattccacgtatcggctcgtacattggcttcacacgcattgtgtatctttggtgaccatcaggacgtcatgtcttgccgccaaacaggtttcgccatgttgtgcgaaggttctgtacaagaagttatggatatggctgctgtagcccatcttgctactatcaaatctcgcgtgccattcgtcaacttcttcgatggtttccgtacttctcacgaaatccaaaaaattgaaatgctggagaatgaagatctggcaggtctgattgatcaacaggctttggcagaattccgtcaacgcgcgttgaatcctaacaaccctgttgcacgcggtatggctgaaaaccccgatcacttcttccagcacagagaatcttgcaataacttctatgaagctgttccggctatcgtagaagaatacatgaacgaaatcagcaaaatcacaggccgtcctcatggtttgttcgattactatggtgctgaagacgctgaacgcgtaattatcgcaatgggttctgttacagaagctgcccgcgaagctatcgactacttgatgagcaaaggtgaaaaagtaggtttggtttctgtacacttataccgtccgttctctgctaaacatttcttggctgctgtacctaagactgccaagactatcgcagttcttgaccgtactaaagaaccgggagcaaacggtgaacctttgtatctggatgttaaagactgcttctatggaacagaaaacgccccagttatcgtaggtggacgttacggtttaggttctaaagacactactcctgctcaaatcatcgctgtattcaagaatttggctctgccaatgccgaaaaaccacttcactgtgggtatcatagacgatgtaactttcacttctcttccccaggaagaagaaatcgcattgggcggtgaaggcatgttcgaagctaaattctacggattaggtgctgacggtactgtaggtgccaacaagaactctgtgaagattattggtgacaacaccgacaagcactgccaggcttatttctcatacgactctaagaaatcaggtggtttcacttgctctcacctccgtttcggtgatactcctatccgttctacttacttggtaaatactccgaacttcgtagcttgccacgtacaggcttatctgcacatgtacgatgtaacccgtggtttgcgtaagaacggttctttcttgctgaacactatctgggaaggtgaagaactggcaaagaacctgcctaacaaagtgaagaaatacttcgctcagaacaatatcactgtttactacatcaatgcaactcagattgctcaggaaatcggtttgggcaaccgtaccaataccatcctgcaatcagcattcttccgtatcacaggcgttattcctgttgacttggctgtagaacagatgaagaaattcatcgttaagtcttatggcaagaagggtgaagacgtggtgaacaagaactatgctgccgtagaccgtggtggtgaatacaaacaattggctgttgatccggcttgggctaatctggaagttgaagctcctgctgctaacaatgaccctgcattcatcaacgaagtagttcgtcctatcaacgctcaggatggtgacttgttgccggtatctgcattcaaaggcatcgaagacggtacttgggaacaaggtactgctcaatacgaaaaacgtggtgtagctgcattcgtacctgaatggaatgctgaaaactgtatccagtgtaacaagtgtgcatatgtttgtcctcatgcttccatccgtccgttcgtacttgacgctgaagaacagaagggtgcagacttcgagacattgaaagctgtaggtaaacaatttgacggaatgacattccgcatccaggttgacgtgcttgactgtctgggttgtggtaactgtgccgatgtttgtccgggcaatccgaagaagggaggcaaggctcttacaatgaaacatttggaaagccagttgtctcaagcagccaattgggaatactgcgctaagaacgtgaagagcaaacaacatttggtagatatcaaagccaatgtgaagaactctcagttcgctactccgttgtttgaattctctggagcttgttcaggttgtggtgaaactccgtatgtgaaactgatttcccagttattcggtgaccgtgaaatggttgctaacgctaccggatgttcttctatctactccggttctgttccttcaactccttatactaagaacgaaaagggtcaaggtcctgcttgggctaactcattgttcgaagatttctgcgaattcggtttaggtatgactttggccgacaagaaacttcgtgcacgtatcgaagctgctatgaaggatgctatcgccagtgatacttgtccggcagaatacaaagaagcattccaggaatggattgacggtaaggacgatgcagacaagagcaaagctgctgccgaaaagatcattccaatggtggaagctgctaaagataaatgtaagaactgcgctaccattgcagaattcaagaactatttggttaagaagagccaatggattatcggtggtgacggtgcttcttacgatatcggttacggtggtttggaccacgtgattgcttccggtgaagatgtaaatattttggtattggatactgaagtttactctaataccggtggtcagtcatctaaggctactccgctgggtgctatcgctaagtttgccgcttcaggtaagcgtgtacgtaagaaagaccttggtatgatcgctactacttacggttatgtatatgttgcccagattgctatgggtgctgaccaagctcagactttgaaagctattcgtgaagcagaagcttaccccggtccgtcattggttatcgcttacgctccgtgtatcaaccacggtttgaaggcaggtatgggtaagagccaggctgaagaggctaaggctgtagaatgcggttactggcacttgtggcgttttaaccccgctttggaagaagaaggcaagaatccattcatgcttgactctaaagaaccgaaatgggaaggtttccaggatttcttgaagaacgaagttcgttttgcttctgtaatgaaacagtatcctgctgaagcagcagatctatttgctgcttgcgaagaaatggccaagaaacgttatgcttcttacaaacgtatggaagcaatgaattggggtgaataatctctgatacatgcatataaaaaaaggcttgttctgtatggaacaagcctttttttatagccttttctaccattagtatatatgaggtcacccatacgtatgtacaaaacaagacttcaatttcaagtatttctactgtaaccatcaccatttatggcttaaggttaccaaaaatttcctacctttgcacataacattatgaaaaacctataaacatgaatattctaatcaacctgaaatacacattggctgtcacagccggagtgtgctcctcttttgcatacgcacaaaaacatcctcatatcatactgataatgaccgaccaacagcgagctgatgccataggctgtatggggaacgatgtggttatctcccctaacctggacgcactagctgccgagggaacattatttatgaatggttattcttcttgtccaagcagcactccggcacgtgcaggtctgctgaccggactttctccttggcatcatggcttgttgggatatggaaaagtatctcccgaatataaatacgaaatgccacagatgctaaaagacgctggttattatacttttggaatcgggaaaatgcactggcatccccaacggataaaacatggtttcgaaggcactctgctagatgaaagcggacgcgtggaggacgagaatttcaccagtgattaccgccaatggttccaaacaaaagcccccggaaagaatcctgacgccaccggcataggctggaacgaccatacggcaagtatctataaattgcccgaaaacctccatcctacctattggacaggagaaatggcctgtgaacttatcagcaactacgatccgaccaacaaaccgttatttctgaaagtttcttttgcccgtccgcacagtccgtatgatccaccacaaagatatctggacatgtataaggatgccctaatacccgatcctgccatcggagactggtgtggcaaatacgccaagaaactaaatcctgaagaaacggcacaagacgctccatacggtaattttggcaatgaatatgcacgcaattccagacgtcattattatgccaacatcactttcattgacgaacagataggcagaattatccaaacattgaaagaaaaggatatgtataatgacgcattaatcgttttcgtttccgatcatggcgatatgatgggcgaccattatcactggagaaagacctatccatacgagggctccactcatgtgccatacatcgtgaaatggccttctgccaaccacgttacaccgggaaaaacagacgctcccgtagagttgcgtgatattcttcccactttcctcgatgcagccgatgtgaccatccccactgacatggacggccgttccttgttaccgcttgccaaaggcatggaaacaaactggcgcaagtatctggatctggagcatgccacctgttacagtgatgataactattggtgtgcactgactgacggcaaaataaaatatatatggcgtatccataccggtaccgaagaattattcgacttgacccaagaccctcaggaattgcacaatgccgtcaatgacaaaaaatacaggaagcagctgacggaaatgcgtaatgaaatgattcgccacttaagtgaacgcggcgaagagttcgtgaaggacggccgattggtggtcaaggagaagaccatgctttatggacctcattatccggaaaaagaaaataaaagataacgtgtgttgtacagaggagtcgtttccaattgccccactttcctacaacagagttttataattctgttgccactgctgtcaccttttccctgtactccctatgaatagggagtacagggaaaaggtgatggcaatacattattttatgcaagaaaaatgcctgcagccaccactttatccaccgtgtttattgcacaagcctgccctgtccggtggacaaagcaggcttgtgcaataaacacggtaagcttgtgcagcctcgaaactgcgactttccttgctaaagtattcagaatcttgatacaagttctgtcggatcttgcagcaagttccacgaaatcctgtaccaagttttgccgtcacatccagcatccttccctttcggaggagaaggataaaccggtagagccggaaagacttaaactaaagattgaaagatatagatctttggaatgaaacgtcttgttctttttatcagacgtcttcatcttttttataaacgtccttgtcttttccaaaaagaataaagactttcggaacgatacggaacagtgaccggaaacgggtttctacacatacgtttccaaatgaacctctatttacacccgacagattcttcatttcggcaagaaagggtgcacaagtttcatcaaatttctgatgcctctctattcttctattttccagcagttcctcagcctgttcacaacttaaaataacgtgagttcgaaataagaataaatatatttcacttataattagaaacatagcgataaaagtattaaatttatagtgctgaatt

SEQ ID NO: 3878 - DNA, 89202 bp, Unknown
  gut microbiota DNA sequence
caaaaaacagttcttcaatatttgtccacacccacgaactcggcacttcaaacggcacattctcataatggggcgtatcggaaggaaaaaaggagaggaaaaatcctctccttaatctaaaccatgtattagacatttaagtttttcatcggcaatccataattgttttggttgaaaatttatatgcagcatattcacattcatactaatcagccttcttcattctaatggtacaagtaacatttgataaatagaataagaaacaaagcacttattcttcatttatccgataaataaccatcggaaacaatgctgtcattgcagcaggtttgatcgtgacaagagaggtcccggcaaatacggttgtgggcggtgttcctgtcagacatattcgtaatatcaaggaataaagaaggagataaccaatagaaagttataagcaaatatgccctcatgctctcattgtgtatataatccattgataatgagtgataaatgaatgatggtagcatatttttgaagaaacaatttgccctcatgctctcactgtttaattatactgattattatctaatattcttatattcaatgtgatatagctgaattcgtttcaaaatcactcagatgagaaaagagtctattttgccgttttaggtgaagaaaaatggcataatgcctacaagatcccttttatatacacgaatcttatcatattttgctaggagaaacaacggtaactactgcattttagggagttcttgatagtttatatagagatcattatatgataatcggtcattcatattgcagttctttactatgggaaattgcttaatcacgttcgtggttagacttaatcacacttgtgattaactttagtcacatttgtgattagagttagtcacattagtgagtaagcaattgcgaataatagaaagagcaaataggaaagtacgatgagtagaacttgtcagcatgaaaatgtaatcggatgtttgtaaaatagagtatactgtgatgaaaaagctcaaaatgcgatggttgacaaacttttgaataaagactttgtatgtgtttatattgctggttatcatatagatatactctttttatttgttctgtagaatgagggcatgagggcaaagataatttttgaaatatgctaccatcattcattcaatactcattatcaatggattatatgcataatgagagcatgagggcataattgcttataactttctattaatattggtgttatgttgagtcgatttattgtgaaatacagaagtgtttttaatgcttgttgtagcaattattaaaaataatcgctaagaaacgtttttcctatttaagaaattattatatttgtaccgactattatactatggtgtagtagaaagttacatattttaagaagcgttattgaaattatcttctatcgtcaaacttcgcaactttgataaaggtctgaagatgataacaacaacgctcacgtctgtgttatatacctgccattactgtggcatctatatacctaatggcgtgggtggctgttgtttatctagaccaaggcaatgcgaaggcccgacgataggataaacaagatacagccctcacgcttttttattgttaaccgccgaacagaggagggggagttaggcaaagtcttttgacaagatagactgatctaacatttacagacgtatgaaaacaacactgcaagcgggaatgcgaatccttatttcccgttatctgtcaagtcgaggttgcggagacacagtatatgtcaccggaccgccaggagtcttctgcccacagacggcaattatggcatctttctataaaaaatattctatggtataattggggcgtataatgtctgaacagaatcattgaaaaattataatctaaatttattgtatggaaattatggaaacaaacaatatggaaatgtatgaggctcctaaagtggaggttatcgaagtagaagtggaaaaaggatttgcagtaagtggtggaacagaagactatgacccgcagccttggtaattgaaataaataatttaaaaacatacacgtatgaaaaagatattgttcacatctttagctgttcttggattaggaataaccggttgttccaatgaagatttgggcgtggcgaaaagtggcgttgatgaagtatgtgccactatgggagatgctgaatcgcgtactgctatgaatggcaattctgtcgtttggagtataggtgacgagattggcatttttgtaacgaatggaagctcttctacttacactaacattaactattcattatccagtggagccggaaccaagaacgcagggttctcagggttactggaaggtgagaatcctgtaaagaaagctgctttttatccttatggcagcgatgcttcttatgatggaagtaaaatatcattaacgttgaaggatacctataattataaggaaggagaaaacagcagtgctcttatggcttgccaaataaatgagagcgcacagaatgtcctggcatttaaaaatgcaggtgccctgatgagcgtaactgtcaataatatcccgaaggactatacttgggcgaaattgacttctatgaccgctcaaggaaaaactactgttccagccattgctggaaatgcacaaataacattctccaaaggtatacctacattgacaaccacagaaacgtcaaattcctcttccataactataaactttgctgccagcagtgacgtcgtgaccagtaaaacattctatttcccgttgcctgtagccgagtatcctaccttggaactttccattggtaatggcgctacaagccaggtcttaaagacaaaagctttagatgctaaacgtaacgaacgttataccacaactataacgttggacgaagtatccggaagtgtaccgacaacagttgaaagtgtatcagaggtagccgatgctttaaaagaaaccaattctgtttctgtggctgatgtggcttcaactgaaaccagtcctacagtttcaataccgaaaaaaagtacaccggcagaaaatgtcagcatatcctttgaaaatatttctacaacaaatgctgttgccattaaagaagagagcactggtactggtggtacagctgcacctgaaaacgtgttggtatctgtaccgcaattagatactgcgcctaaatttgagatagatctgccttcttctaccgtaactttggctgccaatggcgaaactgctacttatgatgaagtaacggcaactactgctgcaaacacattggttctaggtaaaggaattactgttaatacattgaaggtaaaagccggtaatgtaagagtgaagagtggtgccaaagtaacagccatcagtcgtgaaagcggtaacacttcaactgtcattatttataaagaagagggtgctgaattacccaatctgtccggtaatgatgcatttgaagtagttgatgctgccgtagccgacttgcaaaatgtcgcaaaaaatggtggaacttatactcttgccacagacttgacgggagattttactatttccgcaacgaatgaagttatcatcaatttgaacggtcataaaatcaccaacaaatctggtgatacatttactgtaaacaaggatagtaaactgaccattaacggaaatggtacagtggataatgtaagtcacgggaaagcttgtatctataataacggtacagtaattcttaatggcggaacctatattagaagtaaggaaaacggtcagaactcagaaagctctggtggtaacagttattataatattctgaatcatggcgagatgacgattaatccaaatgtggagatatcgcaaaacgggcattattcttcgatgatagccaatgggtattatgattataccaatacgaatccgcgaaatggatatgtaagtggtaccaatcatcagaatccttcacttatcataaacggtggtacatttgccggaggtcttaatactattaaaaatgatgatggagcccggcttgtcatcaacgacggtacgttcaccaatatgtctcaggcaaccgtacagaatcatcatgtgactgaaatcaaaggaggtacattcaatacgactggttccgctcagtatgtggtggataatgaaggtcataatggtgcagccaatgacttgggacagatgactatcagtggtggaacactgaatggcaagatctatgtggttggtgcaggtgcatcgctggctgttaccggtggtactttttccgatccgtccgcacttttatacttaagcggtaatgctaacgtgaagatacgtttgaatggagacgctacttgtaatggctttaaaacgcaaagtggacaatctgtagaattggacttgaacaaccatgtgcttacacttgctaaaccgaccgttggctcggctggcacagaaacgaacagttgtcaattgttgaaaggttctaccgttactatgaaaaacggaacactggcaagtgataatgataaaattatgattcagaactactgtaatttgacgttggatgctatgacagtgagggggctaaatgccttatatgtattgagtaacaattgtggtaatattttgattaacaatactacgattaatgccggaactggtgcatatgcatttgatgtttgcggctattcaacctacactgacggagttaaagtaactgttaaaggtactagtattattaatggtaacgtggaattatcaaaaagtaccggaaacaccgaacctatggaattgaatattgagggtggtacttttaacggcaatttggttgttgattcatcgataacagatgcttcctctatcattaacgtgactggtactccttcttttaaaggaaccggttgggatagttatataaaataagagaattatttgctatcatgttattagtcatggcagaaagtgatttgtaataaaagaaggtcgtcctgtctcgaaaggtcgggcggctttctttttttaagattagaagattatgaaacttaatccccattttaaactccgctccatagccggagaaacaataattgtgaaccaaggtgttcccgatactgatttgacccgtattatttcctttaatttttccgcttgcttactttggaaacgactttcgggaaaggatttcactttacaagaggcagccttggtgttggtggaatcttatcatatttctcaagagcaggccgaaagagatgtggtgatttgggcagatgcactaaaaaaatgttcagccttacttgattgatataacaatggatataatactcgataaaccggagcaaatgctatttgccttgctccgatccgcgttgaacagcacaaagccggttagtgaaatcctttttaccgatatatctcctgccctttggcaggcgtgttacaaactagcttgcactcagggagtgatggctttggcatgggacggaatacaaaccctgccggcctgtttgcaacctccgaaggctttgaagttaaactgggcgatggcggtagagaactatgaaaaacgctacctgcggtactgccataccatagccgaactttcagctttttataaaacgcatggcattaccacggtccagttgaaaggagtgggtctctccacctattatcctattccttcgcacagggaagggggagatatagacatcttcacttattcggcagaccattcccggaaaagtgatgccgaggccaaccggctggcagaccggttaatggaagaaaaaggaatagaggtagactttgaacactccgaaaagcatagtgtgttttactataaaggtattccgatagagaatcataaaaccttcattaattcggaaacataccgtatagcagtgaagatggataagctccttcaaaaactgctacaacccgtatcggcggaattggacggaaaatgctccattttaatcccatcttccacctttaataccgtatttctcgcttttcatgccgcccagcattatgcacgcggcctggcacttcatcatctttgcgactgggcttgcctgctgaatagatacggcctgcatattcctgaggaagtgacggatattcgttttagaaatatgatattggcaatgacccgcctctgtaatgattatttaggaacttccgttcctgtatatggaggagaaggattggcggaggaaatcttgcgggaaatcatccggccaccctatacgatgtcagttccggcgaagaataaatggggcattctggtttataaaaccaaacgtatgctgcatactcatcgtgcgtgcaacagcgtgttgcgcatttcactgtgcaaatgggttggaaattctattctgttgcatctgcgctctccccataccatcttccagacggaacgaaaataagcggtttatgttgaaaagaatctgccgtttgttgttgcctgatgaaaggaaaatggggataagggtggtttgtgccgtatttctttgcgcattacttgactttgccggactcgctgccctgttgcctgtcttgttttttctgttggatgacgggagggataaagatgccgccctgttattttgtctggtggcaatagtctttattttggtgaaaaacgctttggcagcggggctttcacgttttcaaaaccattttctgatgtctctttaccgtcggctcagcttttctctctttacttcttactatcaacggggattattgtttatacgcagcagggggagtatccggctgggatatgaggtgaactatatctgtaatgctttttctttaaaccttctttcccccttgcttcgcatgacaggagaactgctgcttgttttttgggtgacggcagctttgttggtttatgctccgttgacggtactgatgttgtatattgcctttctgcctttcatgctgatttacggatgggggatcaggaaaccgatgcgccgttatggtgagcaggagcagcaggctcgtcgtgagcaatcccggctggtcacggaaacgatgaaagggtatgccgaattggaactgaatgcggcgtttccttttcttcagcaggcattcgcccagagggtaaggaaaatcagtgagagccgtttgaaactggaaacgatacagcatcttcctctttgcctttccgaaatggcggtcatatcggggctgaccttgctcaccgttttcggaacaggggatatcaaagcgctggtaggtgtctttgctgtggcggctttccggctgttacccgctttgcgcggcatcttaggtggttggacacaagtacagaatgcggtctattctctgcggattatagaggaagggttgggggataaggggatggaagcagtttctccatcatgggggcaggaagcgttttcttttcaaaaagagatacggatagaacacctcacctatgcttatcctgaaagtaaagaggttctaaaggacttttgttgtactattcgtaagggggaatatgtaggtatctgtggtgagagtggcgtgggtaaatctaccttgtttaatctgcttttgggatttatcactccggataaaggcgctattcggatagatggcaggccgcttgccgatgtgccgaggcaggaatggcatcgcaaggtgggatatgtgcaacaggaagtgtttgtgctggatgggaccttggcggaaaacattgctttgggatgccggtctatagataaggaacgggtagcggagatagtgaggctggtgagattggatgcttggatggatgaattgccgcaaggaatggatactcctttgggtgaagggggaggaaggctttcgggaggtcagaaacaacgggtaggcatcgcccgtgctttgtataagaaagcggaggtgcttctactggatgaggctacttctgcattggataatgagactgaacgggctgtcaatgaaatgcttctcggtctgatgaaggagtgtagggggctgactgttcttacgatagcccatcgggaaagctcgttggcatattgtcatcgtgtaatcagattaaatggaaaagacaatggatcgaatttataaaataggtggccactgcttcgcattgccggacgaaaggttgatggaggcggtggatggtatcagcggtttcaagccttttgtttggcaaccggatctggtttcggcaaaagatgtatatgagggtgcttggttgccggattttactgtttgggagggaaacggttggggttttccggcttttcagagaaagtcctatgggttcggatatgaagatgtaaccggtacttttggtgtgagtggggatagctttttgttggaactggctccgcagggagaaccgtcgctttatctccggacgatgggtggaaccgggagaggtatctgtttatatggtcattattctccccgtcttttaaggtttgccttatggatggggtatggcctgatgacggtacggaaagatacggttgccttgcatggcagttgtattgtttataaggggaaagcggttctttttttaggtgaaagcggaaccggaaaaagtacccatacccgtttgtggagggaaaatatagcaggaagtaagttgctgaatgatgacagtcccattgtgcgttatgaagaggggggcgtgtgggtatatggcagcccgtggagtgggaagactccttgttataaggcggagcgttatccgttggccggatgtgtacgtttgtcacaagcaccgtataacaagatacggagattgaacactttgcaggcttatgcagctttgcatccgtctgctcctcctgcatttgcatacgaggaggaattatactgtggggtttgtagtctgttggaaaagatggtttcatccattcctgtttatcatctggagtgtttgcccgatgcggaggcggtgaaattagtatgtcgtactttatatggagatgggtatgaagcggatagcgaatgaatgtttctttgcgtgggtggagtcggaaatcaaaagtggcaggagtgtgaagttccgggtgaaaggcaattccatgatgcctttactgagaaatgggaaggatgaagtggtggtggggccgtatgataaggaggagttgaaactttttgatgtcattctgttccggcagacagaccggtatgtattgcatcggattattcaaaaaagaggcagtcgttatctgatgcagggggatggcgtctgccgtttttatgaggaatgtgaggacacggatatcatcggggtggtgagaaaggtatgcaggccttccggaaagaagattgaaacggattccatgtgttggcggttgggaagccgtttgtggttggggcttggtggatgcagaggaatggtgctgcgtgtcctgaatagattgggttgttgtctccttttttgacgaaagctgtcagcttggaaggaaatattattcataaagcaggtatttctctctcatctttttgtaggcttccagttcattctgccatcctgcacggatttcttcttcactggctcctttcatgatttgttcccttacggtacggttccctatcagcaggtcgaaccattgcgggcgggtaaagaacttgtccgctttcccaagatcttgataagcttgataataggtgatgatgtattttaaagagaatcctttcggggcggtgatatggcggagattattgccatagcagtattggtttttatacatcggattcttgtcaaagccttccaaggcttccggtctgaaagaaaaggaggagatgcggatatccggtgaaccgattacttgaaaaggataaagagtacctctgcccacactgatggctgtaccttcaaacggacagagtgaaggatataaggcaattgcctggtcgttgggcaggttgggagagggctttaccggaagcgaatagggttgtccgtgtttccagccttccacggggatgacggtcaacgcgcattttttgccattgggcagccagccttcgccattgatcatttgagccagctcgcctacagtgcaaccgtgtaaaatggggatggcgtgcatacccacaaaacttttctggtttttctgtcgcacagggccgtccacataatcacaaggattgggccggtctgtgatgaccagttgcttccggttctcggcacaagcttccattacatactgcatggtgctgatataggtatagaaacgggcgcctacatcctgaatgtcgaacacaatcaggtctatgtcctgtagctgtgtggctgtaggtttcttatttttaccgtaaagggacaggatgggtattcccgtgcgggtatcttttccgttcctgatggtttctccggcatcggcgtcaccccggaagccgtgttcgggagcgaataccttttttatttgtatatgcgctgcaagcagggtgtccaacagatgggtttctcctactttggaggtttggtttacaaccaatgccacacgcttcccttttaatataggtaagagacggtccatctgttcggctccggtgataaccttttgcgcggtcacggcgttgcagataaacaagaggcagtataggaaaatgtattttgttttcatgatatgtggcgattattttgtaatattgcacaaaaataagaatttaattgagaatggacgcacttgctatcattaataaatattatcctgaagataatgaactgaaacatatcctgctggcgcatagccgttcggtggccgataaggcgttatggattgccggcaagcatccggaattgaatctggacaagcagtttctggaagaggcggcgatgctgcacgatattggtatttttatgacggatgctgagggcatttgttgtttcggatcttatccttatatttgtcatggatatttgggggctgatctgatgcggaaagaaggatttccgcgtcatgcattggtctgtgagagacatacgggagcgggtatgtctttgcaaagtattattgaccagcagttgcctgttcctcatcggaatatggttccggtttcgctggaagaacaggttatttgctttgccgacaagtttttctcaaagacgcatctggacagggaaaagagcgtggagaaggcgttaaagagtatttcacgttatggggaagatgggataatccgttttaaccattggtgcgaatgtttcttgtaagccttaaaaataaattaaatatccgctaaatagttcattattggcggataatgcttaattttgcccctcaaaagcgtaaatgatttgtgaatgacgccactaaaacgacatagatttataacattcctactactatttgcatgcctgtcactttctttaagtacaggtgctcaacgcagaaagcggaattctgcatccggtaatgattccctgaaagtagatagtgctttggtagatacgttgtctatcgatacggttgcacctaaaaagaaacagccgttggatgcgcctgttatttatgaagcaaatgactctatcgtattcactgagggcggatatgcccatctgtatggtgacggtaaggtgaactatgagaaaatagagttgacctctgccgtgattacaatgaacatggatagcagtacggtgtatgcccgtggtgttcccgactcggttggcgtggaaaaaggtactcctgtctttaaggatggcgagactccgtatgagtcaaaaatcatgcgttataacttcaagtcgaagaaggggttcattaataatatcgttactcagcagggggaaggatacgttaccagtgaggagtcgaagaaaggtgctaatgatgaactttatttgcgtcacggacgatatactacgtgtgataatcacgaacatcctcacttctatctgaaactttccatggcgaaagtgcgtcctaagaaaaatgtggttttcggtcctgcccagctggtggtggaggatgtgccgttgcctatcgctattcctttcggattttttccgtttaacagcagttattcgtcaggattcattatgcctacatacggtgatgaaatgaatcgtggtttttatttgcgtgatgggggatattatttcgccatcagtgaccgtatggatttgaaagtgttgggtgagatctttacgaaaggttcatggggactgtccgtgcagtctaattataacaagagatataaatatagcggtaatttcaatgccagttatctggtaacgaaaaccggtgagaagaatatgccggactatatggttacaaaagatttcagaattgcatggagtcacagacaggatgccaaggctaaccctaacagctctttttcggcgaatgtgaactttgcgaccagtagttatgaccagcgtaacctgagtagtttgtacaacccgcagcagtattcaaataacaccaagacgtctagtgtgagttattcgcgcaatttccccgaaataggattgaatctgtccagtacattcaatatctctcagaatacgcatgactcttctatcagtgtgacgttgccggatttgaatatttcattgaaccgtatttatccgttcaagcgtaagaaagcggtaggtgatgaacgttggtatgagaaaatctcactccaatataccggccagatgacgaactcgattaataccaaggataatctgattctgaagcagggtttgaataaatggactaatggtatgcagcataagattcctatcagcgctacattcactttgtttaaatatatcaacgttgtgccttctttcaactataccgagcgctggtatatgcgcaaggtggagcagagttatgatccgtcggcccctaataatgtgcggagagatacaatcaacggtttcaaccgtgtgtataactatgatttgagcttgcaggtgaataccaagatgtatggtttctacaaaccgtggaagaaattgtttggcgacaagattgaaatgatccgtcacgtctttactccttcggtgagcatgagttatgcgccggacttcagtacgtctaggtatggatatgtgggaacgtatacttatactgatacggatggagaagtacgtactcagacttataatccatatgaaggtttgccttactctttctcgcccagtggtaaatccgagaatttcactttctctatagataataatgtggaaatgaaagtgaaatccgatgcggatactaccggagtgaagaaaatcagcttgattgatcagttgggagccagtatttcctataatgcggcggctaaagagaaaccttggggaaatttgagtatgaatctgcgcttgaaactgaccaagagttatacttttaatatgaacgcccagtttgctacgtatgcttatgagtttgataaagacggcaaggtagtggaaggtaaccgtacagaatggtcatacggacgttttggtcgttttcaggggtatagcggttctttctcgtatacattgaataatgattcgtggaaaaagtggtttggtccgaaagatgaaaaggacagtaagggggataaagacaagaagaatgaaaatctggatgagtacagtgatgatggcaatgaagaaaacatggaggaagaagataactccggtttgagaaagacagagaaggcggctatagatccggatggctatatggctttcaagatgccatggtcattgagcttgagttatagttatagtattcgtgaggacagaagcaagcagattaatatcaagacgatgcgatatccttattcggtgactcattcattgaatgtttccggtaatgtgaagttgggtagccgctggaatgtgaattattcttcggggtatgattttaatacgaaagagatgtcaatgacaacggtcaatatcagccgtgacctgcactgtttcaatatgagctgtggcttggtattcggtccctttacttcctataacttcagtattcgtgctaactccagtatgctgaccgatgctttgaaatgggatcagcgaagcaatacgggtagtgcggtgaattggtactaggaagaagttgggaataaaaaatgagaaatggttgcgtgttgttatcagaaaccatttctcatttttttatttatgtctaccactcaatcggtgtttgcccgtgcgcttgcaaatattcgttggtacggctgaagtgcttgttgccaaagaaaccgttataggctgacaggggggacggatgtgcggaagccagtaccaggtgcttgttgcggtctatgaaggcgccttttttctgtgcataagatccccataagatgaatacaatattttcacgttgttctgccagtacacggatggcggcatctgtaaattcctcccagccccgtcgttgatgagagcctgcctggtgggcacggaccgtcagtgtggcattgagtaataaaactccttgattcgcccagcgggtcaggttgcctgaagtagggatgggagcacccaaatcgctttgtatttctttgaaaatattttgtagggaaggaggaaaaggtactccgtcattaacagagaagcagagtccgtgcgcctggccgggaccatggtagggatcttggccgataatgacgactttcactttgtcaaacgggcacagattgaaggcgttgaatataaatctgcccggtgggtaaatagtggcagtctggtattcgcttcttacaaactcagtgagtctgataaagtaatctttttcaaattcgggtgccagatgttgtttccagctttcttctatttgtacgttcatggcatttcttttattataaaatgtgcgttaaagataggggtaatttgtaaaaatgacaaataaaaagaggatgactttttataatcatcctcttctttcattgctgatggattataatcaaataagttgcatacccagttgggcgcattcttttctcatctcttcgggccatatactggcttggatttcacctatgtgggctttctgtaaataaagcatacagagtcgtgactgtcctataccaccgccgatacacaaaggaagagtttcatttagcaggcgtttgtggaaatacagttctttacgtttttcctgtccgctgagtgtcagttggcggagcagcgcttctttgtctacacggatacccatagaggaaagttcgacggaacggtccagtactttgtcccaaactaacaggtcgccattcagaccgggaagtccggtttccgggttgattgtggtatagtcgtcatagtcaggtgcgcgcaagtcatgttctttaccgtcactcagtttgcagcctatacctataataaataccgcaccgtatttttgtgagatggcatgttcacgttctttcggactcttgtcgggatacatctggcaaagctcttccgagtggatgaaatgaatgtcatgtggcaggaagggtttgatctgcgggtacatttcacataccatatattctgtgcggcgcatggctgcataaatacgggttactatttgtttcaggaaatcaaccgtgcgttgttctttggtaattacacgctcccagtcccactggtctacatatagcgagtggagattacctaattcctcgtcagcccggatggcgttcatgtctgtatagatgccataacccggctctatattgtaatcggccaaagtcagccttttccattttgccagtgaatggacaacttcggcctgtgcgtctcccaagtctttaatagggaaagataccgcccgttcggttccgctcaagtcatcattgatacccattcccttcaatacaaatagcggggcggtgacacggcgcagacgtaattctgaagacaggttctgttgaaagaactcttttatttgcttaatgcctaactctgtttgttttaaatcaagcaaggctttatagttagctggtttaattaggtaactcattgtaaaatagatctagttgttttaattgcttgcaaatatagaaattatttgtgatattgttatatatttagccgaaaatataatcaaattgattgttttatacttaaattaatgagcaaaatattattttgatagataaatatcccaaattattaggataaagacaatatattttgtacttttgcacgtccaagtttcagacgcacccgtagttcaatggatagaataccggattccggttccgacgatatgagttcgattctcatcgggtgtacaattcagtaacctctttgcaaagaattgcagggaggttttttcttgttatatcttctccgtatgaaccttttttccttttttgagttattcccttatgtaactttttaaaatatgccttaatatttagtttattctaaaaaacaaagactaataaagaatatagttccttttgtttcttgtatatactaaatatacgtgcatatattcgctgttgattttaaaattattttctttttgaggggttttaaaactaacacttaattaaacttttttatttaaacattaatttatcaaccaaatctgagattcatgaagaaagctctcttttttatcgtatgcctctgttttgcaataaacatgatggcgcaaacaaaaacgataacaggggtagtggtagatgccaccggtgaacctgttatcggagcgagtgtcctggaggtggggacaacaaatggtacaataactgatgtagacggtaactttactatccaagtgcctgtgggggcaaaactggatgtgagttatataggttacaaaacacaacaaattgtagtgggagtgccaaacacctacaaggttattttaaaagaagatgcagaaatgctggatgaggtcgtggtgaccggttatggaatgagtcagaaacgttcgttgatgacgaactctatttcaaagttggatgataaagtattacaaaatgcagctatgagtaatgcggcccaatccttgcagggaactgtcagcggattgcgtgtgacaaatacttcgggtaaaccgggtagttcgcccaatatcgttttgcgtggtggtgcttccataaacaagaatctggaagggccgttggtcgtggtggatggccttgtgcgttctatggatgatatcaatccttcagatattgaatccatacaggtgctgaaagatgcggcttccacagctatttatggtgcccgtgccaataacggcgtaattctggtgacaaccaagaagggggtggaaggcaggacacaaattacttataagttcaaagggggtgtgaactttgcacgtgaagggtataagtatttggatgccggtgactatttgtattatcaacgtttaggttggcagcgtaccaatggcggtacaagtatggagaaccagaaaggttttggggttaactccggagtggatctggcctttatgacagatgcaaacaaacatttgctgaatgaaggatggcggtctatggcggatcctgtggaccctgataaaactttgatttttagaaaccatgccggtgagctgcatgatctgactttccgcaatgccgcgtttacacaagatcattatctgaatttgtcgggaggtaatgacaaaggaacattttcctcatctttagggtattattcggaagacggtcagataatttctaccaattatcagcgtgtgaacgggactatcaacggttcatacaagttgttgcccgttttgacagtgaatgccggcggtagtttttcatggtccaagatgcccgatttatggacttacgacttgaaaagcccttggaacggagaaacgggagagtatgagttgttctatcgtaccatgagtatgtttcccacttggaatccgtggaatgaggatggaagtcctgctgccggatggagtaatcaggatggtaatccttattattggaaagataaactgactcgttctacaacgaaccgtaagacttcgtttaatatcggctttgctttggaaatccttccgcagcaattgttcctgaatggaaacagttctatgtattatacagacagtcagtttgaactgtttgaaaagaaatatcaacagataggacaagctcccaataccaatcgtaatgcttctcaaacaaatacaaaagtttttcaacaacagcatgcattgactctggaatataaaaaaggttttagcggacataatatcaatgccatggcaggtggtgagtattttgattatcagtatcagaacctggaagcgcgtgtttccggtgctcctacagatgatatacctactttaaatgcgggcactaaccgtacttatactacttctgtcaaaaccggatatcgcattctttccggtttcgcccgtgttaactatgattataattatcgttatatggtgtccttggtagcacgttatgacggtatttccaaattgtccgacaatcgttggggattttttccgggtatatctgccggttggaatgtgcatgaggaagctttctttaaagattcaaagtttgcggaagtagtatccttgattaaaccgcgtatcagttatgggttgaacggtaatgtaaacggtatcggtaattttgatgtatatggtaaatatggttcggtaggtgcttataatggtaacctgggttatttgaatacaggggtggtcaatagtaaattgcgttgggaaaagagccatacgtttgaactggggcttgacttgggctttttcaataatcgtattcatatgattatggactattatgaccgcacgacttccgatttgctgactgatgtgaatttgccggaatatacaggatttccctcgttcaaaacgaatctaggtactatcagcaaccgtggtttcgaactggaagccaaggtgaatctgctgacaaggaaggactggtcatgggatgtcaccgctaatacttcgtttgtgaaaaatatggtgaagaagctgccttttaacgggaatgtgaacaaccgtcaggggggtgagcaggtatgggatccaaaatccaactcgttggtttgggtaggcggcattcaagaaggaaaaagcttgggtgatatcattgcttataaacaagtgcgtatcttgcgtgactgggatgatgtgagaaatcatgccggtgattttgtggatgaggttgccaacctgtatgggccgaataaggctgccgaatatgcgggtaaaccgggatggaaacccattgagccgggagatgtactgtgggatgacaagaatggggataatgttataaattcatacgaccgtcaggtggtgggtaatatttatccgaaatggaccggtggtttttctaccacgctgaactataaaaactggtctttgtatggtcgttttgactatgcggtgggtcataccatttacaatgatttgaaagcaagaatcttggggcagtataacgggtcgttcaatttgattacggatgtcagaaattcgtggtctgaaaacaatacggaaactagtattcctaaattctattgggccgaccagaatgcgaaaaagaacattacccgttccaataatggtacaacgaatctgaacaataataactctactttctatgaaaagggggattatttgtgtctgcgtgaggtaaccttgagttataaattcccgaagaatcttataaataaggtgttcttgaccgatgcgtccgtgtatgttacgggacagaatttattctatattaccggatatgatggaacttctccggaaccggttatggatattcaggcaaatggtcgtggcggtatagacaatggacgctatcctacaccaagaaccgtcctgtttggtttacaattgtcattttaatgtgtaaaaaagaaaaggtatgaacataaaaaagataatattggcttttgccgtatcggctatgttggccggtggatgtacttcgttggatatggacccggtgagcgatatcactgacttgaattactggaaaactccggaacagtttgattcatttgtttttggactgcatagtcgcttcagaagccattcgtggaatatgtttttgttgggtgaggcaagaagtgatgtctttgggggaattcctttcggtggagaagctacccaagggatggaacgttttccttataatacattgaatgcggagaatcccggaatcagcgggtttggtgatttgtatcagaatatcaaccagatgaacttgtttatcagcagaactcttcatacggatgtgctgactgaaagtgccaggaattattatttgggacaggtgtatggattgcgtgcttactatatgtatcagctatatcgttcatggggggatgtcgtgtttacggaagagcctagcctgggttttgaagtgggtaaactggcaaaggcggcgactccggctgccgaaatctttgagcaggtaaaaaaagatatagaatcttcattaagttattttggatccgattataccataaaggaaaaaaaatcgctgtggtcaaaggctgccacattgatgctgaaagcggatgtatatctgtggagtgcccatcgtgacgggggagaaggagatgcccggacagcaaagaatgcgttggttgacatacagaataatatcagccgtagcaatctggacttgatggatacttatcagggagtgtttgcttatgataataaaggtaataaagagattatctttaccattcataatgaattgtttgaatacaatctgtggaatggaaataatgatttgtttccacaggctgattatttagggaaattctataatgcggatggtactttgataaatacgtctgtcgagaataatttcggtatcatgcgcctgatggtgaaattggaaaacttcaagaagtttctgccgggagacacccgtcgtgacgttacattgaaagatgtatataataaggtggaaaatggcaagttggaattggtaggggtgtatccgcataagtattggggagttatgaatgggagtacacgggtgagatgtgatgattatcctatttatagatattcggatttgctattgatgctggctgaggcgaaagtgcttttgggtgaggatccggctacagagataaaccgggtgcgccggcgtgcgtttggtgatgcgtatgatgcttcaacagtggggtttcccaatcaggaagtcgataagcgtccggcggatgctgtcttgcaggaacgtttgtttgaatttatgctggaaggtaaacgatggtatgacttgaggcgttttggcgattcgtacgtgcttgactatactccggcggagcctgcccgtctgctttggcctatcaaccaaggagctcttactaataatccattgttgaaacaaacggttggttattaaatttttgtcagataagaatctttaattgcataaaaagacggtgttctttatgaaattaataaagaaaccgtctttttattttctaatttcaataaaaacttttatttttacacccgtaaaattataaatattatgagaaaccctagcttattactgctaattgttgtttttatattagcacccttcaagttgagtgcggcggcagatacggttgttgtccgcgaaacccggattcctgtgttgattgaaaggcaggataatgagttgtttcatttacgtatagaggctactcaaagtcagatgctgaatgaagtgaagttggacttcggcaaagacgtgaatttgaatgaaattgaatctgtgaaactgtattatggtggaactgaaagcgtggagaggaggggaaagacttattttgctccggtagattatatatctaataatactccgggaaaaacattggctgccaatacttcttattccgttttgaagtcggaagtgaaggccccgaagcgtgaggttgtattgaaagctgaccaaaaattgtttccgggagtgaattatttttggattagcctgcaaatgaagcctgttgcttctatcttgtccaaagtgtcggcagaagtggtggaagctaagattgacggacaggttgctcctttgaagatagcccgtaaggcggatacccattatatggggatcggcgtgcgtcatgccggtgacgacggggctgctgcctatcgtattcccggattggccacttcaaataaaggaaccttgttgggggtatatgatgtacgctataataatagtgcggatttacaggagtatgtggaaataggtctgagcagaagtacggacggaggtcagacttgggagaaaatgcgcattccgatggcatttggtgaatatgatgggttgcctaaagcacagaatggagtaggcgatccggccattttggttgataagaagacaggaactatctggattgtcgctgcctggacacatggtatgggaaatgggcgtgcgtggtggaattcacaaacaggcatggaccgtaatcatacagcacaattaatgatggtgaaaagtgatgatgatggtaagacctggtcggagcctatgaatataacagaacaggtgaaagatccgtcatggtatttcttgctgcaaggtcccggtagaggtatctctatggaagatggaacattggtctttgccagccagtatattggcaatgaccgtattcctaatgccggtattatatacagtaaggatcatggaaaaacctggaatatcagtacattggcacgcactaatacaactgaatctcaggtagcggaagtggaaccgggagtgctgatgctgaatatgcgtgataatcgtggtggcagtcgtgccgtttctacaactacagatttaggtaaaacatggaaagaacatgagtcttcacgtacagccttacaggaaccggtttgtatggccagtttgattagtgttaaagctaaagagaatgtattgggtaaagacatccttttgttctctaatccgaatgatgccaagaaccgtcatagcattaccatcaaagcaagtctggatggtggggtgacttggttgcccgagaatcaattgctgctggatgccggttggggttggggatacagctgcttgactatgattgacaaggaaacagtaggaattttatatgaaagcagtgtggcccacatgactttccaagcgataaagctgaaagatattattaagaccaaataaataatgaaacgcagattttctagttttattggtatgatactggtttgtgctgtaactatagcacaaaccagtatctcgttacttcctaaacctcagttgtataaggatacggggaagaactttactatgggaaaggtgaaactttctactccggtgttgaggccggagtgggaagtttttatcatgaatgcaggtggtgagattgttgaacattcgtcatcggtgattgaagtggaactggttccgtctattgaggaagccaggctaaacggggctgaagcctatcgtctttctgtttcaaacaagcggataaagatagaggctgtaacagaacagggagtgtattgggctatgcagacacttcggcaattggaacggaaaaaagggaagagaagttctgttgccggatgtgagattgtagactggccggcattccggatacgcggatttatgcaggatgtgggacgcagttatatttcaatggaagaattgaaaagagagatcgagattttatcccggtttaagattaatgtatttcattggcatcttactgaaaaccaggcatggagattggaaagtaaaatctttcctatgctgaatgatagtgtgaacaccatccgtatgccgggtaaatattatacgctggaagaggcacgcgatttggtggatttttgtaagaaacatcaggtgttgttgattcctgagatagatatgccggggcatagtgctgcctttgtgcgtgctttccgccatgatatgcaaagtccggaagggatgaaaatattgaaactgttgctggatgaggtgtgtgagacatttgatgtgccttatttacatataggtacggatgaggtggagtttaccaatccgcattttgtacccgaaatggtggcgtatgtacgctcaaaagggaaaaaagtaatatcttggaatccgggctggcactataaaccgggggaaatagacatgacacatttgtggagttaccgtggaaaggcgcaaccgggtattcctgctatcgattccaaatttcattatctgaatcattttgatgttttcggtgatattgtagctttgtacaacagccgtatttatgatcaggcagaaggcagtgaggacattgcgggaactatattggctttgtggcacgatcgtttgattgacaatgagtggaatctggttattgaaaatggcttgtatcccaatatgcttgctattgccgagcgtgcctggagagggggaggtacggaatattttgacggactgggtacgatacttccacccgaagacacggaagcattcaaagaattcgctgattttgaaaagcgtatgttgtggcataaggagcatacgtttaaaggatatcctttcgcctatgtaaaacagactaatgtaaaatggaatattacggatgcttttcctaatgggggagatatggataaggtgttcccgcctgaacaggagttaaaggatacctatcattataacgggaatacgtatggtgtacgtcaggcaataggggcaggtatttatttacgccatgtctgggggacgtttgttcccggattttatgccgatcctaaagaggatcataccgcgtatgcatatacttgggtatattctcctaaagatcaggaagtggggttatgggcagaatttcagaattatagccgttcggagatggatctggctccgctgcaaggtaaatgggattataaaggtagccgtatttggattaatgatagggagataatgcctcctgtatggacagcaacccatcaggtgaagagtaatgaaattccattaggaaatgaaaattgtgtggcacgttctccgctggctgtgcatttaaataagggttggaataaagtgttcctgaaattacctgtcggtaagttccggatggaccagacgcgtcttgtgaagtggatgtttactgctgtctttgtgactcctgacggagaaagggcggcagagggattgatttattcaccagataaacaaaaataaaatgaaacgtattgtcttattgttattgggattattattagcgttaccccagtttgctcaggaacgcaagtattctactttttatgagcagagagcgactttgtttgaagaacttccggttacttcaaaagatattatttttttagggaacagtatcaccaacggttgcgagtgggctgagttgttccaaaataagaatgtgaagaacaggggtatcagtggagatatctgtatgggggtatatgaccgtttggatccgattgtaaagggaaaaccggcaaagatttttttattgatcggtatcaatgatgtttctcggggaacgtctgcggataaaattatttcagaaataagtatgattgttcggaaaataaagcaagaatctccaaaaacaaaattatatttgcaaagtgtattgccggtgaatgattgttacggtatgtttaacgggcatacatcacgctggcaggtggtaaaacaaattaatgatttgttggaaccattggcggtaaaggaaggagctgcctatattgatttgtatagtcattttgtggagaaagagacaggcaagatgaatccagtatacactaatgacggattacatttattaggaaagggatacttgctgtggcgtgatattgtaaaaccttatgttgaccagaaatgaagaagacattaatactgattttatgtttgtttctttgtaccgtttcatttgcacggaagcgggtgaaggttgcttgtgtaggtaatagcattacctatggcataggtgtatccgatcctgataaggagtcctatcctgcccggttacagcaaatgctgggtgaagggtatacggtggagcgttttggaaagccgggagctacgttgctgaacaagggacaccggccttttatgcaacagaaagagtttaaggatgcattggcttttgctggtgatgtagtggttattcatttaggagtgaatgatacagatccgcgtgattggcccaattaccgtgatttttttatagcggattatcgtgcactgattgattcgttcagagtggcgaatcctgaatgtcgtattttgattgcccgtctgactccgattgccgaccgccatccgcggtttgagtccggcacacgcgactggcatgatgagattcagctggctatagaaacgatagcgaaatacgcacaagtacagttgatagattttcatgcacctttatatccatatccttttatgttgcccgatgctgtccatccagataaggaaggtgcggctgtcctggcaaaaacggtgtatgaaggcataaccggtgattttggcggtttgcaaatgccggaaatttatacggacaatatggtattgcagcatgggcgtctgctgactattcagggaaaagcggatgccggtgagaaagtgactgtttccatagacaggcagaaacttcaggctgtgacgggagcagatggaaagtgggcggtggatgtccggccattgaaggcgggcggtccatatacgctgactgtttctacagaaaaacggaaactggtctatgaaaatgtgttggcgggagaagtgtggctctgttccggacaatcgaatatggagttttatctgaattggagtgcgactgccgcacaagatgttcctcaagctgcaaatagcaatatccgtttatatgatatgaaagcccgttggcgtacggatgcggtggagtgggatgcttcggtactcgattcattgaatcatctgcaatattataaggatacacggtggacagtttgttcgcctgaaacagccggtaatttctcggcggtggcttactatttcggaaagaaattgcaggatagtttgcaagttcctgtaggactgatttgcaatgccattggcggatctcctactgaagcatggatagaccgtagtacattggaatatcgttttccggctatcttacgtaattggatgcagaatgattttatccaagactgggtgcgtgggcgtgctgccttgaatgtaaagcagtcttccaataaattgcaacgccatccttatgagccttgttatttgtatgaatcgggtatccgtcctttggaacagtttccggtcaaaggctttatttggtatcagggtgagtccaatgcccataatcgggaggctcatgaaaagttgttcggattgttggtggaaagttggcgcaagaattggggggatgcggaacttccattctattttgtccaattgtccagtatagaccgtccgtcatggacttggttccgtgatagccagcgtcgtttgatggcggagattcctcataccggtatggctgtcagttcagataggggagactcattggacgtacaccccaaacagaaaagagaagtcggtgaacggttggctgcatgggctttgaataaaacatacggatataaaaatgtcattccttcgggaccgctttataaatcggtcgtatttagtggaggtgcggcttatatttcttttgattatgcggaggggttgtccacttcggatgggaaaccgcttcgtacattcgaagtggcaggtgatgatggattattttatccggcacaggctgttgttgaaaacggtaaaataaaagtatggagtgacaaggtgaaagagccggaaacggttcgttacggatggcagccatttacccgtgccaatctggtaaatggcgccggtttgcctgcatccacattccgggctgaatagtatataaattaataaagataggtaagatgaagaaaacattaaaagttttgatgatgttaggatgctttccgatgatgctcagtgcaaaggagtataagaagtcagagagtctgagtcttgataagggatgggagttcgcccaggtcggccggaatgaatggttgccggctacggtgcctggaacggtacatcaggatttgatttctcataataagctgcccaatccattttatgggatgaatgagcaaaaagtgcagtgggtagagaatgaggactgggtttataaaacaacttttaatgtgacggatgagcaactctcgcgggatgctgccttgttgattttggaagggttggatacgtatgcggatatttatctgaacggctctttgttggaacgtacggacaatatgtttgtcggctatactcttccggtaaaagaggtgttgcggaagggagaaaaccatttgcagattctgtttcattcacctgtcaagcaaactttaccccaatgggaaaccaatggttttgattatcctgctgataatgatcatagtgataagcgggttagtatctatagccgtaaagcgccttacagttatggctgggattggggaatccgcttggtaaccagtggtatttggcggcctgtgacactgactttctatgatgtggcacgcattgatgattactatgtacgtcaggcttcggtaacaaaagatctggcgaaagttgaaaaccgcctgactgtaaacagtgtttctgcaactcctcagaaagcggaagtaaccgttgcttattcttataaggagggtgaaaaggtaaccgaacagaaagaggtgacattgcagccgggaacaaaccatattcttcttcccatagagatacggcagcctcatttatggatgcctaatggttggggggaacctgcattgtatgactttgaagccgtaataaaggtggatggtaaagtgatagcttctcaaaaagagcgtatcggactccgtacaataaaggtggtgaaagaaaaagacgatcagggagaatccttctattttgtagtcaatggtgaacctatgtttgccaaaggcgcgaattttatcccggatgatgctttgctgcctaacattactgaagaacgttaccgccagttgttcaaggatgtgaaagatgccaatatgaatatgattcgtgtatggggtggaggaatttatgaggatgatgctttttatcaggcggcggacgagaatggaattttagtttggcaggattttatttttgcctgcactacttatccgtccgatcctgcttttatgaaacgggtagaggccgaggcggaatataatatcaagcgtttacggaaccatgccagtctggctatgtggtgtggaaacaatgaaatttatgaaggtatgcgctactggggatgggataagaaatacactgatcccggtattatggaaggaatgaagcagggctatgacaaacttttccgtgagttgttgcctcgtaaagtagctgaacttgatccggaccgtttctatatgcatggttctccgtacgaggccaattggggacgtcccgaaagttggaagattgcagacagccataattggggtatctggtatggtcagaaaccgtttgaaagtctggatacggaaattccgcgttttatgagtgagtttggttttcaggcatttcctgaaatgaagacgattgctacttttgcctcaccggaagattatgcattggaatcggaggtgatgaatgctcatcaaaaagccactatcggtaatttcctcatcaagaagactatgggactgtattataaagtgcctgaagatttcgatcagttggtttatatgggtttggttttgcagggggtaggagtgcgccagggtttggaagcccatcgtcgtaaccgtccctattgtatggggactttatattggcagctgaatgacagctggccggtcgtttcctggtcgagcattgattattatggcaattggaaagcgttgcattatcaggcaaaaagagcttttgctccggtattggtagatgctgtcaaggaaggggaggatttgaatatttatgttatgtcggacaagctggaagcggataaagaggtgactttattgttgcgtgtgatggattttaatggaaaagttctgactaaaaagagtatcaagggtgaggttccggccaatgcttccaccttatattataaggaaccttatgcgggtataacaacaagtcctcaaaatacttttcttctaatgacattaaaaaataagaaaggtgaggttttatccgaagaaatttattactttaaccacgcaaaagatcaggagcttccgaagaccgagatccgctataaagtgaagccgatggatggaaaatatgaagtgactctgtctgccagacagctggccagggatgtgttcatagagattcctgttcaaggtgcgagatttactgacaacttctttgacttgttgccgggacagacaaagaaagtgattattacttcagataaactgaagaagaatgaaaaggttgatataactattaagcaattaagtgatactaactaatcaattaatatctattatgaaaactttaatgggccttgcagggctgacaatggcaggttttatgcttttatcctgtaacacagaagtgaaagaagcaaattatcagataattccgttaccgcaggaaatttcggtaatggatcaggctgctccgtttattttgtcaaatggaactaagataatgtatccggaaggcaatgaaaaaatgcaaaagaacgctgaatttttggcaagttatatcaaagatcttaccggaaagtcattggctgtacaagccggtacagacggcaaaggaataatcctgcaattaggtggaaatgctgaaaatcctgaaggataccagttaaaggtaaccagcgaccaagtggttatttcaggacctacggaagccggagtattttatggcatccagacgttgcgtaaatctattccggtagcacaaggagtggatatcgctttaccggcggttgaaatcaatgactatcctcgtttctcttatcgtggtgcaatgttggatgtgtcacgtcattttttcccggtagattcagtaaagcgttttattgatatgctggctttgcacaacatcaaccgtttccactggcatttgtctgaagaccagggatggagaatcgaaatcaagagtcgtcctgaactgactgaaataggttctaaaagagcggaaacggttatcggacataactcgggaaaatatgatggcaagccttatggtggattcttcacacaggaagaagcaaaagaaattgtagcttatgctgccgaacgtcatattacggttataccggaaattgatatgccgggacacatgcaggctgctttggctgcatatcctaacttgggctgtactggtggtccgtacgaagtatggaaaatctggggggtatcagaagatgtgctttgcgcaggaaatgatgaaaccttgaaattcattgaagatgtattaggggaaattattcagattttcccgtcagaatatattcatgtaggtggtgacgaatgtcctaaggtacgttgggcaaaatgtccaaagtgccaggctcgtatcaaggctttaggtcttaagtctgacaagaatcatactgccgaggaaagattgcagagtttcattatcaatcatgcagagaagttcctgaacggacacggacgtcagattatcggttgggatgaaattctggaaggcggattggctcccaatgccactgtaatgtcatggcgtggtgttgccggaggtattgaagccgcaaaacagaaacatgatgtaattatgactcctaatacttatttgtatttcgactattaccaaaccaaggatattgctaatgaacctgaggctattggtggatatgtacccgttgaaacagtatataactatgagccgatgccggctgatctgactccggaagagcagaaatacatcattggcgtacaggccaacttatggactgaatacattcctacctacagtcaggtagaatatatggaattaccccgtatggctgctttgtctgaaattcagtggaccatgccggaaaagaaaaactatgaaggtttcttgaagcgtttgcctcagttggtagatatttatgatgtttataaatataattatgccaagcatgtctttgatgtaaatgctgtatttactcctaatccgaaagatggtacgctggatgttactttgtctactattgataatagtcctatctattacactttggatggaacggaaccttccgctgcttcccagttgtatacggaaacattgaaattgaaacagaattgtacttttaaagcgattactgtacgtcctgcaggaaatagccgtgtggttacagaggaaattgcttttaacaaggctagtatgaaacctgtcactatgttgcaaccggtaaacaagcaatatgaattcaaaggcgctcccactttggtggacggattgaaaggtaacggtaactataagacgggccgttggattgctttctataaaaatgatatggaagcagttattgatatgcagcagccgacagaaatcagtagcgcttctatttctacttgtgtggaaaaaggtgactgggtgtttgatgcccgtgctttttctgtagctgtatccgaagacggaaagaactttaaggaaattgcttcagaaaaatatccggcaatgaagcaggatgacaagaatggagtgttcaaccatacgttgactttcgatccggtgactgcccgttatgtgaaagtgaccgctttagcggaacatagcattcctgcttggcacggtggcaaaggaaatccggctttcttgtttgttgatgaaatttcattaaattgatagttatattcaaataatgactgtgtgccaaaagtgtgatagagtaccgttgggcgtgaggtggaatgcctccgtccatatgcgtaaggaatgttgtgtttgcgttggtgcaatccgtttctggggcaagcgggatggctgatttgcttttggcacactttttattatttgcttcaccatgaaaacatgatcagaaaaataatatatggcgtttatgcgatactgggcatgatgacaatggctgcttgtagcggtcaatcggatgcttctgaaatatctcttgagaaaatgcatgggttccctacagagaataccggttttcttaagggagtttctgcattatatgcgggagtgattgaaggaaatttgctgatagccggaggttgtaatttccctgatataccggtagctgatggaggaaaaaaagcttattatcgggatatatatatcgcccctttgtcaaatgatacggcttttgagtggaagaaaataggccaactgcctcaggcagcagcttatggagtcactatttctactgaaaaagggttaatttgtgttggagggactacggcaacacacagcttgtctgatgtttttcttttatctttgcaaaaagacaccttgaaaagagatactttgccctctttgcctgtaactatggataatatggcaggtgcattagtaggacattcactatatattgtcggtggaaatgtaaatggcattccatcctcggccatgtacatgcttgatctgtcggatttgtctggaggatggaaaagagaaacagatattccgggtgaacccagagtacaacctgtttgcgtggcacaagatggaaaactttatgtgtgggggggatttgccccggctgttgaagggcatcaggcttctttgtcggtagatggatatatgtattctccggaaacgaaagaatggtcatcggttgccaccccgtatgatgcggaaggtaatgagatctctttaggtggtggaatgggaacctcttttggcgagggtatgatattgtgtgccggaggagttgataaggatatattcttaaaagctctgcaaggtatttatgcgggaaaagaatatttgtcacatcctgtagagtggtatcggtttaatagaaacctgctgctctatcatccgcagacggataaatggactacattaggcgaatatgagcaaggtgcgcgtgccggagctgtaatagtttcgcaggacggatttcattacattattaatggagaattgaaaccgggcattcgtactaatgaaattaatagaattaaagaaaagagaagatgagaagattgattatattggcggaagttgcattgggcttgctgtttgcaagttgcacgaaagaagagcaacgcacactttctgttattcccgcaccattaaaggtggaattacagcaggaagtgttttcattgaattcggaaacagggttatatatagatgcgtctgagggggacaagaagattttggaagattatctggtggcttcttccatgaatttgaaaccggtaatagcagaagagggacataatgtcgtcttgaaacaagtggcggaactgccggaggtaaactcttccgagggatatgttctgacggtaactcctgatcaggtacttattcgtgcaacttccggggcaggattgttctatggagttcagactatgctgcaaatggttgatgaaaaaggattgccggcaggagtcattacggatgaaccccgttttgcttatcgtggctttatgatggatgtttcccgtcatttcttcgataaggaatttataaaaaagcagatggatgctttggcatattataaattgaaccgtctgcatctgcatcttactgacgctgcgggctggcgtcttgaaataaaaaaatatccccgtctgacagaatttgcggcatggcgtgagtttcctacttggaaagaatggtggaataacggacgacggtatgaagaagaaggcagtaaagatgctcacggaggttattatactcaagatgatatccgcgaactggtggcatacgctcaggagcgttttattactgttattcctgagatagagatgcctgcgcattcggaagaagtactgactgcttatcctgagttgtcttgtacacacgaaccttacaaacaagccgatttctgtgtcggtaatgaaaagactttcgagtttctggaaaatgtgctgacagaggtaatggaacttttcccgtccgaatatattcatataggaggggatgaggcaggtaaagcctcatggcccacttgcaaactgtgccaggcacgtatgaaaaaagaaggcttgaaagatgtgaacgagttacagagttatctgattcatcgtattgaggtctttttgaatgcccacggacgtaaattattgggttgggatgaaatattggaaggtggtttggcacctaatgccactgtcatgtcatggcgtggcacggaagggggaatgaaagcggttgattccggccacatggctattatgagtccgggtgagttctgctattttgattcttatcaggatgctcctgattcccagccggaagcaataggaggctatctgcctttgtccaaagtttattcatttaatcctgtacccgatactttgagtgcggataaagtccagttggtgtatggagtacaagctaatttattcacagaatatattccgactccggaacatgcggaaatgatgatttatcctcgtattcttgccttggcggaagttgcttggagtgccccttctgtgaagaactatgatgattttcatgttcgtgcattgaaagaggtagaggcattgaaagctgaaggataccatccttttgatttgaaaaatgagataggaaatcgtccgggagcggatcagcccgtacaacatttggcagtaggtaagaaagtggcttacggaccggatgccgcttattatcccggctattcggccggtggtgacagtgccttggtagatggtgtgatcggaggctggacttatggtgacaggcgttggcaaggttttatagacaagaaaagaatggatgtgaccattgatatggaaaaagaaacagaaattcattctgttggagcagactttatgcaggtgtgtggacctgaagtctttatgccttcagaagtgatcatttccgtttccaatgatggtaaggagtttacggaactgaagcgcatggagcacaaagtagtgaaggatgacaaagtgactttcatcaactttggttgggaaggaaatgccaaagcacgttacatacgttatcaggcatcttcgggcgaattcggaggtttcttgtttacagatgaaattgtagtgaaataatagaacttatataaacaacaaatagcatgaagaaacaaattttgttatcggctgttctggcttgtatctcagttttttctgcggcagcacagaaagagccggtagattatgtaaacccttttgtgggtactactaattacggtacgacaaaccccggagcattaaccccccatggaatgatgtcggtgactcctttcaatgtgatgggggttcccgaaggggataaggataaagacaagcaatggtggtccactccatacgaattcaataataaatatcttaccggctttgcgcacgttaatcttagcggggtaggttgtccggaattgggatcattgttattaatgcctaccaccggcaaactggatgtggattatcataattatggaagtttctatcaaggtgaaactgcaaatccgggttattataccaatatactggataaatacaatgtgaaatgtgaactgactgccactccacgtaccagtatggcacgctttacttttcctgccggacaaagcaatatcttgttgaatctgggagagggattgaccaatgagagtggtgctaccgttcgttttgtaaacgaccgtgagattgaaggtaccaaattgttgggaactttctgttataatcctcaggcggtatttccgatctattttgtaatgcgtatcaacaaagtaccggcaaaacgcggttattggaaaatgatgcgtccgatgggtgtggaggcgcaatgggatgatacggccggtaaatacaaactctatactgcttatacaaaagaaataagcggagatgatataggagtgtggtttacttacgataccacggcggaagaagtgattgaagtcagtatgggcgtgtcttttgtcagcatagagaatgcccgtttgaatctggaaaaagaacagcctttcggtacaacattcgacaaactgcgtgcggaagcccgtaagaaatggaacgatgatctttcccgtatcaaagtggaaggtggaacggaagagcaaaaaggagtattctataccgctatgtatcacacgatggttcatccgaatattttgcaggatgtaagcggacaatatccacaaatggagggagataagattttgaccaccaaccgtaaccgttacacggtattctcattgtgggatacttatcgtaactatcaccagttgatgactttggtatatccggagcgtcagatggatatgattcacaccatgatgggcatgtacaaggaacacggatggttcccgaaatgggaattgtatggtcgtgaaacattgacgatggaaggtgacccttctattcctgttctggtagacagttggatgaagggattgcaagactttgacattgacgaagcttataagggaatgtataagtcggccactactccgggcaaggataatctgatgcgtccggataatgacgattatatgtccaaagggtatgtgccgatggaaagtcagtatgataattcggtttctcatgctttggaatactatgttgccgactatgcactttctaccttggcggaggttttaggtaagaaagaagatgcgaaattgttccgcaaacgttctatgggctataaaaattattatagcaaggatttcggaaccttgcgtccgataactaaagaaggcaaattctatgaaccgtttgatccgaaagaaggagctaattttgcacctagtcccggtttccatgaaggtaatgcatggaattacactttctttgtgcctcatgatatcaatggcttggtaaagttgatggggggcgacaagaaatttgttgataaattgcaaagcgtgtttgatgaaggaaattatgatccggccaatgaacccgatatagcctatccttacctgttcagtcgtttcaaaggtgaagaatggcgtacacagaaattggtgaaggaattgttggctaagtatttcacaactaagccggatggaattcccggcaatgatgatacgggtacgatgtctgcatgggctatattcagtatgatgggattctatccggattgtccgggtgtgcccgaatatacattgaccactcctacttttgataaagtgaccgttcagcttgatcctaaatattggggcaagaaagaattggttatcaagaaagaaggacaaggggattatataaaggaaatcagactgggcaataagaaaattaataaatatttgatttcgcatgatgatttgatcaaggcaggtgaaattacttttatagtaacagaaaatcctaataagaaataactatgaatacgaaacgatttttgtgtgctgcgttaggagctgtttgttattttgcttttttgcaagcgcaggtacgtacagagcagactttcgaaaaagggtggaaatttacgcgtgaagataatgcggaatttgccaatcccggttataatgacagtaaatggcagaacgtcaccgttcctcatgattgggcgatttatggtccgttcagtatcaataacgacaagcaggaaatggctattactcaagatggacagaccgaggcgatggaacatgccggacgtaccggaggtcttccgtttgtaggaaccggatggtatcgcctgaactttgatgctcctggttttgagaaaggcaagaaagcgactttgatatttgatggagcaatgagccatgcccgtgtttatgtgaacgggcaggaggccggttattggccctacggttataattctttttatgtggatgcgaccccttatctgaaaccgggtgagaggaacgaactggcagtccgtttggaaaacgagcctgaatcatcacgttggtatccgggggccggattgtaccgcaatgttcatctggtaatcaatgaagatacgcatattcctgcttgggggatgtatgttaccactcctgtggtgacagacaaatatgcaaaagtgtctttgaaaacttctttggttagccctgaaggagctaataaggataattaccgtattgtgacgcagatcaaggataaaaacggcaaagtggttgctaccggggaaaacaagttgagtgtttttgataatgctttgtttgaacaggagtttgcagtggctaatcctgagttgtggagtcctgataatccggttctttatacagctgaatccaaagtatatgaagggaataccttgaaagacgaatataccacccgctttggtatccgtactttggagattgtccccggcaagggctttttcctgaatggaaagctgaccaaattcaaaggggtatgtaaccatcatgacttgggtccgttaggcggtgctgtaaatgatgccgctatacgtcgtcagattcgtattctgaaagatatgggttgtaatgccatccgtacttctcataatatgccggcacccgaattggtggaggcttgtgatgaaatgggtatgatgctgatggtggagtcttttgacgagtggaaatcggcaaagatggccaacggttatcataaaatatttgatgaatgggtggagaaggatctgactaatctgatccgtcattaccgtaacaatccgagtattgttatgtggtgcatcggtaacgaagtacccgaccagtggaatggcaataacggaccaaagctttcgcgtatgttacaggatatctgtcatcgtgaagatcctacccgtcctgtaacacaaggtatggatgcgcctgatgctgtagtaaataataatatggctgctgtgatggatgtggccggtttcaattaccgccctcataaatatccagaaaactataagaaattgcctcagcagattattctaggtagtgaaacagcttctacagtaagttcgcgtggcgtctataaattccctgttgtccgtcaggctatgaagaaatatgacgatcatcagtcttcttcttacgatgtggaacattgtggttggtccaatttgccggaggatgactggatttggcatgaggataacgcatggggtatcggagaatttgtatggacgggcttcgattatttgggcgaaccgactccttattatactgattggcccagccattcttctttgttcggtatcatcgacctggccggattgcccaaagaccgttactatctgtatcgcagtcattggaacaaagatgaagaaacgctgcatatccttcctcattggacatggccgggacgtgaaggagaagtgactcctatctttgtttatacaaattatccgtcggcagaagtgtttatcaatggcaagagtcagggtaagcgtaccaaagatttgactgtaacggctgaaaatagtgcggattctgcttccatagcagatttcaaacgccagaaacgctaccgtttgatgtggatggatacaaagtatgagccgggaaccgtaaaagtggttgcctataatgataagggggaagctgtggccgaaaaggaaatccatacggcaggcaagcccgaccatatagaactggttgcagatcgcaatgaaataaaggctgatggcaaggatttgtcatttgtcacagtaagagtggtggataaagagggtaatctttgtcccgatgcgcagcatctcatcaagtattctgtaaaaggtgcgggaacctatcgtgccggtgcaaacggagatcccacttcattggaacttttccatgttccgcagatgaaagtgtttaacggaatgatgactgctgttgtgcaaagtactgataaaccgggagaaatcatattgaccgcaacaggtaaaggacttaaatcaggtaggctagttttaatgagtaagtaaaaagatttgtttcaatttccactatctgtgccccgcttgattttattaagcggggcttatttattaaaaaagttggaaaataattggggaaatctgttttagaaagtgaaaaagttgctatttttgttggcaaatttaatatgccaattaaaaattctaacttatcatagtatcatgttgacccaaatcattaacgcaaagattcttaccccacagggctggttgaaggacggatctgtccttatgcgcgacaataagattttagaagttaccaattgtgatttagctgttatcggagccgagctgattgacgctaaaggtatgtatgttgttcccggtggtgtggaaatccattgtcatggtggtggtggcggtgattttatggaaggtacggaagaggctttccgtacagccattaatgctcacatgaaacatggtactaccagtatttttccaacgttgtcttcttctaccgtaccgatgattgaggcagctgccgaaacttgtaccaggttgatggcggaaccggacagtccggtacttggtcttcatcttgaagggcattaccttaatatgaagatggcaggcggtcagatgcctgaaaacataaaagacccggatccaaaggaatatatccctattgtagagaagtggggctgtatcaagcgttgggatgctgcacccgaattgccgggtgctatgcagtttggtaagtatatcacaggaaaaggcatcttggcttctgtggcacatacacaggccgaatatgaagatatccgtgcagcctgggagtccggttattctcatgctacacatttctataatgcgatgccgggcttccataagcgtcgggagtataaatatgaaggtacagtagaaagtatctatctgatagacgatatgacagtggaagtggtagccgatggtattcatgttcctcctactatcttgcgcctgatatataagattaagggtgtggaacgtgcttgtgttattaccgatgctttggcatgtgccgccagtgaaagcaatgtagctttcgatcctcgtgtcattatcgaggatggtgtgtgcaaactggccgaccgttctgctttggcaggcagtgtggctaccatggaccgtttgatccgtaccttggtgcaaaaggcagaaatcccattggaagatgctgtccgtatggcttcggaaactccgtccaggattatgggagtatatgaccgcaagggctcacttcagaaaggcaaagatgccgatatcttgattcttgaccaggacttgaatatccgtgccgtatgggcaatgggcaagctggtcgaaggaacttgtactttgtaagaaccggctgaataagaacggaaacaggactttataaaatctcctttcacaccaaacggattataattctattgatttacaatttgttatggtgaaaggagattttctttaattataaaaacaatgcattatgaacaaatatttctttaggttttcattctattttttcatggtagttcagtggtaaaaccactgttatatttgtttcatcatgatagatgaatcagcttttagtattgcataatatatcctcttctatctcttctgttgtttcttcatggtattctttgtaaatacccccttcgttcagatagtggataatatcacatatttcccttagcgaggcaatgagatgtgaggaaattatcaccgtcttttcttttgctttcagttgccggatgagtcttttcatcaggatacatcccttcaagtccaccccattgaacggctcgtcaagaataaatacgtcattgtcttgcaacaataatgccataaatcccagtttctttttcattccggtagaatattcggcagcatacctgtcaaggggcagttggaaaatttcatttaaatgttgaatggtgggtgtattgaccggcagacctttggccttcatacagaattccaagtgttcaagacccgtgatttgggaataaaagaagttggatgcagacagataacctgtttttaaagttttgcttttggttatgcttccggtataatcatagattcccattatacaattgaataaagtagtctttccggctccattctcgcccaccaagccatatatttttccagggtgatactccaaatgaatgccgtttaatactttgaccttaccgaaacttttatgtaaatcattcacttctatcataataatctttttaagcgtttgtgcgcatggcaggtcagcaatgctgtaagtgctatgccgggtattaaaataattggaacaaaaagagagcctaaataaaaaggcattaatatacttaattgcacaataaacagcaataggggggatgggatgatatggcgcaacataccgataccaatggcataaattaaggtggcagtataataagataagaaaaagaggatttcatcttggtcataggtagacgctataagcgttaagctgaaaggaatggaggtgatgaaaacattccatgctatgctttttagttggaaaaggcataaagtcttgaaatttttgaaatgaagaagatatctgttgtccattgtttgcagatagcctgatgcctgtaccaatccccatagtatgagacatactttgtttatttttatatttccgtgtacggttcctgcggttgcaaaaagaaagagtaggatatagacccagaaagattggcggaacattcgtatatattcataacttcctttgtaaagaaaaggaagacggacaggtttgtgttccagttttatttttttcaggcaaggtaataaggcggcgaacagccataagccgatagcgtcggtaaattgtccttttattatttctattccggcaaaaggtaatgcgatcaaggtgtattcttttatcaggaacacagaaagatgaggtgttaaagtgcgtaaaaactctttgtctttccggacattatgataaccggctaataagagaacgcataccacaggaatagcgaaacggttttctgccaagaacaatatcatgatggcagccaccgttaagatggtaaggaagactattctgaagatacccaattctataactattcttccaaaatttttcagacgaagcagcagatacagttgaaacataaagtgctttttattctgattgagggtacaaaggaataaaatatccggataagtaccctcactgtagagtgaaaatttattctttatgcttctttttcagttccatcaattctttattgacgtgtgtcaattctttaattctgtccgatacatgatggaagaggaagtagtctgtcagtacacctgctaagattaaaccaaacattgttatcatgagccaccacaggtggcggtaggtgtaaaggaatatgcatataaaaggagttaccagcaaatatccgatgatataactccaattgataagcattttatatcggagtatattctttatttgcatttcaaggtttgtttctttttttattttagtcaataaaataactcctgcaaagttgactgtaagagcatatagcagaagtccgaatattgccggccaaaacactaatttaccgttcaaatgaataaaatcaacgaacattagaatcgttactcctaacataaatatagaagctattttgtccatcctcagcattctttgcaggcaactttctttttgccgtgacaacatctctataatctgttgctgatgaaccagttcattctggctgacccgttcattcaactctttccatgctttttgcaattcttcaagttccatataattgtatgattacaagttcgacatattttttaatttctcttttatacggtgcagttttatcgcgacattattgcggttcgttccggtgatttcggctatttcatcgtatgatttctcgtccagccagagcaggataaacatacggtccaccttgttcagtcgtttgatgagtgaatacatttctttcagcagttcgttgtgttcacaatcttccagaatatctacctgctgttccaaaggtacatagtcatacttctttttctttcggaagtccgagatacacgtgttcagggatatgcggtaaacccatgtgacaaacgaactttccccccggaagtttttgtatgacttccatatattgaatacagactcttgaaaaaggtcgttcacatcgtccttgttgtctgcatacatgaagcataccttgtaaatgatgtgcttgtattgcactagcttgtcggcaaattcctgttctatactcatcagctttcaaaggtgtttttattaggttagtcggtgaaaagaagagaaagttacacctttgtgctaaaaagtctttgtattgaaagtaggtattacaggtctgttctttcaaatgcaatgatttgtaattttcttgatgtagcaggctggattactttttgcggacgttaaagcatttgtcgaaaaagtcttttttatttttcccgtaaaaactactgtccggtcctttccatgtcttgggaaatatctttttagtgagttccacctcttcttcaagaatcgcaatattatcagtcatcaatgccatgttcagtgcgcggttgatgcgggaaccggcatacctgaggctgtctgtagcatattcttttatgaggatggcataggcggaatcggcagaccgataatttttttgggcggtaaggctgtctccgaaataatcttcaaacatcgctttcattgaccataagtcggcattgagggtggattgtttttcagcttgccggagtacagacagaatctcatggtactttttgcaggctgataaataactgattcttcccacatatacttttatattggtagggtcaatggctaatgcgctgtcaagtttagcccatatttccttgtcgtttatagatatatgttcactgtcattaaagaagaaagtgctgtctaaaggaggcaaccataggttcctcgcttctgctaccagacggttggcttcttgggtgtggaagttttcttcggtagttacggggttggaatggtgtttgcatgaaaccgtaagggtcaataataagccaagtaaaatagtggttttcatcagtctgtgtattatggtattagtttgttgccaacacaaaaataggataaaaaaatgatattctttcttttgcatcaaatatatttcctttgatgtttggttataaaccgttctgtctgtccgcagaatacaatgaaaccgttgttctccgcagatacccaatctttttatcagggtatctccctgtatatcgcgtatccttttgtttattcatttagttttttaagaatgggtcgactacctgattatttttctccttaatccatcttttcctttatattaagcctttttcccctaaagattaagtatctttgtccagatgtgttctatctccataggttgcggagttgactccataacctttggagataactccatagcctttggagataactccatagcctttggagtcaagtccaaagcttatggagatagaatacaaaaggaagagaacccttaaccatagagcagaaagggcttgcggatacagatcaaatcttttaatgatggatataaaatatgatttcaaggccaaccctttcaaggaaaaggacggcaaaccggtgctttatccggcggtagtggtgaaggaaacgattactaccgatcacatagtgaaggagttgtccaagcatagcgcatattcggcgggctgtgtggtgggagtgctacaggaggtggccgatatggttgtatcccatttgcggcaaggaaaaaatgtgcggttggacggcctgggtacgttttctcttgccttgtcctcgcgtgaggtgacagaccggaaggagatacgtgcggcatctgtgaggataaagaaggtgaacttccgtccggtgccggaactggtgaagcgggtgcggcaggaaacagacatcctccgtgccgagttcggcttcttgcctacggtgaaaaagcgtagcaaggaggagcgttggacgttgctggaggcttatctgaaagaacacggttccattacacgtctggcctattcggaatggctggggggggcgcgcactacggcggcctacgagctgaaggcttggtatgaggagaagagattggacaaagaaggaaagcattctcatgcggtgtatgtgctgcgcaagcaggaaagtatagccgaagtatagccccttttttatccgtttgggaataaaaagagagggaaagtggtggtggcagcactttttacccataaaaaaatgtgctgccaccacccgttgaaacgccttgttcatggtggttccagtagagtgggtggtagcagtggcagcatatttataaaactccggagaaggagggattgcttgtatttgtactcaatctgaatccggaacaagagacttacagcttgtcatgcaaggtccctgctgctttcagataggccacgtagttcagataaagttggaaacgggcgtcaactttcgtttcgtaagcctgttgccataacgcttgggcttccaaatggtcggagagtgtttccagacctacttcgtactggcttttgctgacacgcctgttctcttccgcctgttgcagggaacggtcggcaagttcgctttccagctttgcttcgtccagattgttggcggcttgggtcagttccagtaacatttgttcgttcaggttttgctgttgaaggcgggtttgttccagtttggctttggctgcacgtactttgttgctgcgttctccgaaatggaacaaggggatgcttacattcagaaggacagagaaactggcatcgtccaggaaattcttgttgttcagttccaaaccatgtacatagtcgtatgagcctttgatccctactttgggaagcagttcactgcggttcagtttcacctgctggcgggctatcgccacttgtttgtccagtattccgtattccggacggcgggtgatatccagtacctgtacttccaggtctttctctatctccgggaaatctccggaaacatgaacttgtgtggtcaatggtttccctatcaggtggcagaggttcatggtagccaggcggagagcattctcggcttttcggatacctagctcgctttcattcagctttacttgtactttcaatacatcattctgaggtttaagtccatgtttgtaagcactctctacgttattttttaattccgtcaatacagcgtggtatgcatcggctactgttttcatctcctttgcttttactaccagagcgtatgcctgatctgttttctgaatgacttctgttgcggtcagattttcattcatttgtgccatttctttgcccagcaaggacattttgtaggcggcacggattttaccgcccatgtagaggggctgttccatttgcacaccgcccatatagacccatcctattttatagtccaggttaatgccggggaagtaggcaaagcctgcgggttgtcccggattgaactgtcctgttccatcgggcagaaagacgggcaggttgcctccggctatgccgtaactaccgtcggcattactgtaaagtcctgttccgctgacggtgaagttggggaagaagttccctttgtaactcttggcagtataacgggcactttccgtctgtttcacggaagccgccatttccttgttgtattttaatgccatttcgcggcactctttcagactcagtgtttcctgtgcccatgcgggggtggcaagatgccacagcagacagcagagggggagtatcattgtctttttcatttattctcggttttgtatgtcagtgaaatgaatcaattgttttttatcttgaagaacaaggcatataatatagggataaagagcagcgtgatcagtgtgctgcacagcaatccacccatgatagctgccgccaaggaaccgaacatggcatcggacagcaagggaatcatacccagaatcgttgtcagcgaggccatcatgaccgggcggagacggctttgggaactgtctatcagtgcggtgatcggttctactccttcattgatctgaagggtgatttcatccatcagcacaataccgtttttaatcagcatgccgatcaatcccaatgtgcctacaatagccacgaaattgaagacttttcctgtgagcagcatgaccgctaccacccctacaaatatcatcggaatacagcagaagatgatgatgggtttgcgataatctttgaacagcatgatgaggatggcaatcatcagaatgatggctaacgggaaattttggaacagatacttcatggactggtcgctggctattttttctccttgccataccagtgaataaccttcgggtaatggtatgttttctatctgttccgcgatggcaagacgtgctttttccgtttcaatgccgggtgcgggcgaacattgtgcccgctggcttctctgcccgttgtaacggggaactaccggatcttcccaccggatatcaatctctttgctgatttgtttcagcggtgtgcttcccatgatgctttccaccaaatcttctttcgaaagtgtgccggctttcagcttcaccatggtttcctcgttcaacagtccgttcagggaaggcagagacgagaagacttgtgcgttgcccaggtcctctatcggttctcctttctcgtcgaggcatttcaggtagatgttgtttttgtggataccttcgtagaaagagccgataggaatgcctccggtggctgtgagcagggaaaggctgacatcattacggctcaggccgagggcacgggcggacggctggtcgtattcgatggtcagtacgggtacttgaggttcccagtcggtggtgatgaggcagacttccggagtcctttccatgatggcgcgggcgctgtcggccagttggtgcaggatggcaggatcgggacccagaaattgcgcctctatgggatatttcttgaacatcagattatatcttttcaatttgatgtatgcgtccggataggcttgggagaggtaagcttggatttcgtctatatgttctaccaaggtttccggtgaggtgaagtcgataatcagttcgccgtacgaaagtgaggggttggcaatgctccgtaccagattatagcgtccgggcgtaccgcctatggaggtagtgacgtgggttatttcctcccgtcctttcagataggtttctatttcttccaaatctcgaaccacacgtgtatagttattcccttccggaagtttgtattccatataaagctggtcgtaaaccatgtcggggaaaaagccctgacgcatatattggtagccgaaaacggaaagcagcaacagaccggtcatggcaaatacaaaactccaccggtgggccagaccgaaccgcagtgccgaacggagggtggcatagattttacctttgtatactcgctttccggtactgtcagtatctatggcaggatgcagccggcggtcggccatcagtggtacatggatcagtgccaatatccagctcagtaacagggaaacggcaagtacgatgaaaaggtcgcgcgtgtagacgcctgcggtgtcgggggacatgtagatgggtagaaaggcgatgatggctatcagtgtcgcgcccagaagaggcatggctgtctgtcttccgatggcggtcatggcttccatccggtttttgccggccttcaagtctaccagtatgccgtctatgatgacgatggcgttgtctaccaacattcccattgccagtacaaaagcagccaatgatacgcgctgcatggttccgcctgccgaataaaggaacagaaaagaaccgaatacggtgatgaccaggctgatacctatgataaggccgctcttgaaccccattgctatcatcagtatcagtactacgatgatgacggattctatcaggttgatgacaaaggttcccaaagagctgcctacccgttcgggctgatagaagattttgtggcattccactcctgcgggcagacgttcggctttgagttcttccaacttgctttctacggcatggcctacttttataatgtccgaaccactggaggcagcgatgagtataccgagagcgcgttcatggtcatagaacatttcattgcgtgtggggttctcgtaggctttctctatacgggcgatgtcactcaggcgaagctggtcgtcatcgtgtccttgaatcagcatttttccgatatcttctacggttttgaatttgtcgtttactgtgacgcggatacggttttcaccattttcataatatcctgtataggtggttttgttctggccgttcaaggttgccagtacttctgcaggtttaacaccgaggtttgccatacggtcttgcaacagggagatattgatgcattcggaacgtttgccgtagagttccacacggtctaccccttccagttcgttcacttcccgttttaccagttcggcatagtcggacagttcacggtcggacagtccgtcacctgtcagggcatagaacatgccatatacatttccgaagtcatctttgactatcggggtggtggctccttcgggcaacagggcgcgggcgtcgcttactttgcggcgcagcatgtcccagcattgttccacgtcatcgtccggcacggtgctcagcagttctatctgtatcagggacaggtcgttgtatgaataactttctatattgtcaatgttgcccatggtgcggatgttcttttcaagcacatccgttacttccagttctacctggtgcgcggaagcacccggataggtggtgactaccatggcaagcttcacttttatttcggggtcttccaatttgctcatctgatagcaggaataggctccgccgagcagcagaaccgctatcaggaaataaatcagattcctgttccggaatgcccatttactgatgtccattataataatcctcctatatttgtgttagtgaccggtgacaaaggttttacaatttctccatcctcaatgtggtgtacgcccgaggatacaatctgctctcccggttgcagttgtctggaagtgatgagactgtgtccgttgttcaacaaacgcagtatggatacttcctgtctgtgtacggtattgctggatggatgaaagacgaacacatacgctttgccttctttttgcaggatggcgccggtagggacagaaagagtattctcctgctctgtacggcaaaggatggttaccatggtgttcatgccgggagaagggatagcccgtgtgccgggtactacttgcaggcgcatggtgtatagttggtttgcgttggctttcggggtgacactgattagtttcagcgggtaggtttcgcccggatagatatcaaatgtgcagtgataattgtcgaactgctcccggcggatatattcggccgcaggcagatttatttccacttcgggggttccgccgctgatcatggcaatgacgggcattccggctccgatggtttcgtgagcttcgaacaggcgtttctggacatacccgttgaaaggagcatagagccgggtgtaagccaactgatctttatggtgtttgtacttggcggtgatttgcttgagcccgtatacggctttgtcattggcgttgggggtggttccgttgtctttgtaaagagccatgaccctttctgcttccgcttttatttgctggtattctgcttcagtagcatccagttgtacttgatagtcggtggggtccagttcggccagtaattgtccctcttgtacacgggcgccgtcttttacatgtattttgctgatggttccgcttacccggaaggcaaggctgatatcttgtgcggcttttacctttcccggaaattgcaggaacgtttgtttgtcggcagaaacaactgtgtctatttttactgtctgatgacctttggcttcccgggcacgttgtgcgcaggaacttagtaagatcaaggaaatacctgttagaataagataaattcgtttcatactactatgattttcgtgcaattagttttctgatacaaagttattccgaagcaagaggatagaaaaggttgatatgaatgataaattgtccgatttgtatatttttgggttgttatgtagctggaaagtttacgatttgtatttattttgcagtaaattaaagaatgtatagattgatggacagacaacagatgccttttctctttagatttctttcggatagtgaactgtatgcctttaaagacggacagattatttcgacatttaataaatgtggccttttcttttgccggaaaggaaatgtggaggtttcactggaagataagcattttcagataaatcccggtgatgtgtatatttacatggcttctaccttggtgcatctgcttcataagagtgaggatgcggaaggggttatggttgaagtggatttagattatatcattcctatcgtcaatagggtgatcaatgtggaaaaccagctttttatgcggaagcatccttgtatatcactttcggataagcaacgtgctcatttggagtatctgttggataatttgcgggagaggatagaggcggaggatgtgcaagaggtgaatttgcagcaacaacgcctgactttggaactgatcaagtcaatggggcagactttctgctatgagatattgaatatgtattttgccaaccaacccatgcagcctttgccgcagaacaagaaggatgtgatttttcagaatttcatgctggctcttttccgtttgtatagaaaggagcgtgatgttgcttattatgcgaggatgcagcatattactccacgttatttttccaccatcattaaagagaagtcgggaaatagtgctttgcaatggattgtgcaaatggtgattaccgaggcaaaacagttgcttgaaggatcggatctgagtatcaaggagattgcagaccaattgaatttccctacgcagtctttctttggaaagtattttaagcaatatgtggggatttcacctaaagaatatagaaaaggcaagttgaggattaaggatggaatttgatttcagaaaatgcaatctattttattttaatatacctttgtgtacaaatcataaacgttttatttatgacccgaaagaacgaacaagagcgattcatgtcttatattacagaacggcaaactcatgagagccggatggcggtagctgattttttgcggaaatatgctgaccggtatcataactctgattttatttcttctgatccggtacagttcccgcatcgctatcatttcaaagcggatattgaaatcagtgcttttctgactgcttttcttagtttcggagcccgccctcaaatactgaaggcggcagaacggctggattccataatgaaccggcagcctttgcagtatgtgttgtccgggaactggaaaattgatttctgtggtgaggagtcgttctatcggacggtttcaaaaaatagaatggcacaattgtttcattggctgtatactatatatgataggtatgagagtatggagaatgctcttctttgcgaaacggatggaactccgatgcaacgtctttgtcgtttgtttggagtgtcggataaggcgccgcaaaagaaattgaatatgtttctgcgctggatgatccgtcgcgattcggaagtggattttggaatctggaggaatttctctccatgtgagttgattatccctttggatacacatgtcagtgagatggctttcagattggagctgacccgaagtaaatcttatacgctgaataatgcaagaactattactgcggctttggctgaggtttttcccgaagatccttgtctgggggattttgctttgtttggctatgggattaatgaattatgagatgtagtttggggtgtgttgctcgaagcaggtagctgtggtgaggatgactatgggatatcatttgcaataaatggaaatctaaaaataatccccgagggatatcacatccatcggggattttcggttttttggttaaaggttagtataaaattaggttaggttgtttcttaaattataggggtacgtattccacgaaggcctccattgcttcataacatgccaaaccaagttggtcatacaaagcagcggtaccccggttgcggtcttcacttctttgccagaacagacgttcgtcgttgcccaggaacggtgcgctttccatctgagactgatgctttaagatggagttacgtttagcacgcaattcttccggactgaacggtacggccatttcaatgttttcaatttcccattccgcccatgcgccacgatacatccagatgcggcaatctttcaaccattcggcaccggcttctttttcgatgtcgatagcggcaagcactgcgtctgtgcagacacgatgggttccgtgcgggtcggcaaggtcaccggccacataaatttggtggggttttacgtcacgtagtaactgtaaaacgatttccacatcggcttcactgatagggttcttctcgatttttcctgtttcatagaacggcaagtcgaggaagtggacacggttcaatggaatttgattgtaagtacttgcagtacgggcttcgccacgacggatcagtcctttaatggtcaggatatcgcggctgtccatatcgccttctttcttggcggcaaggaatttcttgatttcagcgtatttgtttttgatggtttcgttggagttttcatcaaaaagttggttgaaaccgttgatgaagtgcatgaaacgtactacttcttcatcgcctacggcaatgtttccggaagtttcgtatgctacgtgtacttcgtgaccttgctgaaccaaacgccgtaaagttccacccattgagattacgtcatcatccgggtgcggagagaagactaccacgcgtttcgggaatggttttgcccgttcggggcgataggtgtcatctgcattgggcttgccgccgggccatccggtgatggtgtgctgcaagtcattgaatattttgatatttacgttgtaagcagaaccgtagagtgccagcagttcgctcagtccgttttcattgtaatctttgttggtcagtttcagaatcggttttttgacacgcatacacaaccatacaatagcgctgcgaatcaatttgtcgttccattcgcaattggttaccagccacggacgttggatacgggtaaggtgagaagccgctgccagatctatgcagacatttgcattgttatgcatttgcagataagaagcgggcagagtgtcgctcactttgtcttccaccgctttcttgatgatatcggctttgtcatctccccatgccagcaaatagattttgcgggcagccataatagttgccacacccatcgtgatggaacagggagggagattgtccactcccaagttgtgtgcagcttcagcacgcgaggttgagtcaatcaaaatcagtcgggtaggggagctcaagcttgatcccggctcgttcatggcaatattgccttcacgaccaatgcccattaatacgatgtctataccgccaaaagtctggatacgttgttcgtacaggcggcagtattcgatgacagcttcctgcggaatcgttccgtcgatggtgaatacattttgtttatcgatgtcgatttggcttaggaataagtcgttcagctgtgagaaactgcttccagccccttcggaagccaaagggtaatattcatataaattgaaaattactacgttacggaaacttagtccttcatctttatgtttacggactagttcggcataaagcggccgtaatgaagcaccggttccagccccaatcacgcagaactttccttcgcgctgacgttcctggatttttgccgtaatttcgttggcaatgtgctgcacgccttcctccatcgtttcatagatgtcggtaggcactttttcgcagcgggtcaagacagaacgttccaccgcattttcgggtttataatatttcggagatactctgttcagagaaatctgcgaacttaagtttgttctcataaattacaaattagctttttcgatgtctttgaaatatttgtaggtaccgactttcagttcgtctgtagcggcttcgtcacaaacaataatgccatgctggtgcatttgtaatgcactgatagtccacatttgtgtaataccaccttcaacggcatgttgcaaagcacgtgctttgttgtgcccgttgcagataatcagaacttctttggctgaaaggacagtccctacacctactgttaacgcagttttaggtactttgttcacgtcattgtcaaagaaacgtgagtttgcaatgattgtgtctgtagtcagtgttttgatacgtgtgcgtgaagacaaagatgagcccggctcgttgaatgcgatatgtccgtcgggaccgatacctcccataaacaggtcgatgcctccgatttcggctatttgtttttcgtagttggcgcattctgcttccaggtcttcggcatttccattcaggatatgtacattttctttctttatatcaatatggttaaaaaagtttttccacataaatgtatggtagctttctggatgatcttcaggcaagcctacatattcgtccatattgaaagtaacgacattctggaaagatacttttccctgcttgttcagttctatcagcgctttgtacatgcctagcggtgaagatcctgtgggacaacctaaaacaaaaggtttttcaggagtcggatttgccgcattgattttactagctacatagtttgccgcccattgtgacagcgcttggtaatcagattcaataattactctcatggttctttcttttttaagttttaagtgttaagttaactatacgggttattccatattatccgttttgggacggaggaatgtcaattgtactaccagtgcgataagcacaataatagccaacatggcaaatcccagtcccaacttacctccgtctgtccactttcccaagacttcggtaatggctgctcccgcaaacacgcctgtcatattcatgataccataggcggtagcacggtgtttggatgatacgaactggcatagaatcggcatattgttggcatcgaagataccataaccgattccgaataataatccagctcccacaacagctacgaaactgtgtccgaaccctagtaaaagcagggatggaatagtaagtcccaagccgatagcacccgtgtacacacgtccttttatatttctttgcacccacttatcggataaggttccaccaataattacgccaatgaacgaggatagcgcgatggtgatagtcgacatggggccggcttgtgacatcggtatattcaggttctcggcgaacaaggtaggtaaccagtttttggttgcccatcccggtaaactgggggctgcgaaatatagcagaatcacccagaatgcaatattactgaaaagtaatgataatcccttcaataaattgcttttttctttaccggaaggtgaatttatttgttcaatttgtattctatccttcttttcatgtagaaaaagcatcaaaattacggcgtatgcgatgccggcgatgccgaaccaatgaaaggttgtatgccaggaaaaagcagcggctactgtagcgccgaaacctccgatggcctgcccggtgtagagcccggtcatgtgaataccgatggctaatgaacgtgacttatcggagtgatagtcggcgatcagtgacaatccggcaggaatatagagcgcttcgctgattcccatcaaggcgcgaaggaaaaaaacttcattataggtgtcggcgattcccatcagataagtgacggccgaccatacaaacaaactgccaacaataagccatttgcggttcatgcggtcgcccaccattccggctatagggctcatacagccatatatccaaagaaagactcccatcagtcgcccaaaattggcagctgactgaagctcggtgatatccaccgccatggcatctctcattgtggacaacatttgccggtccatgtaattcaacagggcaacaccccataataatcctactacaacccaaggataaattttactgtttttcatgctaatagataaagggctttataaatgtgattttttgttgtcgagtatttccttgcacaatgtatagcccttgatcatcattcttggaatgtggaacgggcctttgaacaggttacccttggccatttgtgcaggcgtgccgtcacgatggagatatccaaaccattctccacactctttatcagggaaatgggtgtatgtccaatcgctgatttgcttgtgcatgtcaaggtatttttcatttccggttgctaaatatgcatacaaagtagcgatgatagcctctgtctgaggccaccagaatttcatgtcttgggaataatcctgtggcggaaggttcttgcagtctttgaagttgatgatacctccgaattctttgtcccatccccactcccaagaccaatcaaggatagtgagggccaattccgtaatatctttgtcccaattacggtatttggcttcttccagcagaaaccaggcggtctcgatacaatgtcccggattgatggtgcggcccatgttgctgtcgatgaattctccatgggggcctaccgtttcaagcaacgccttgaattcgggatgcatgaaatctttgcgcagttgggcgatggaagcgtcaatctgtccgttgaagctttcatcttgaatggcctgacggatacgtgatgctacattaatcaggatcattgtgatggaatgtcctttcataggaagagtatccagatattttggagggagtatgcctggtgtttccataaaatactgcatccgtttgaacaagtctaatgcttttacggcatacgtctggtcaccggatgcgatggcatattccgacatggcgatggctgcgaatgactccgagaaaatataacggcgtttgcgcaagggagtgccttcggcagtcacttcgaaatacatacgtccgtcagagtcaaaacaatgcgcttctataaagtctattgtacttttagctgccgccagccatgcttcgttcttttctatattattatatgcataggaacagataaaagcaaatcttccttggaaccacactgatttggtggtgtccatcaagctgccgtttcggtcaacgcaggtataaatacctccattgaccttgtccagcccgtatttcagccaaaacggcatgatattggtggtcagatctgttttgtatgattccgaccattcttttatatagtctattgaaaacatcgtggttcaggtttatttgttacatctttcgaagaaattgattgcttccagttcggctttcatggcagcttcttcctcatctgtcatgttctggaacggagtccggttctttcctaaatccagcccgatcagtttcatgatgcgtttaccgccaacgatgtttccacgatagtgacagatgacattgataacttcctgtgcgaaattctggcgttcgcgtgccagttccagatcaccggctttccatgcttcgataatacctgtgagttctttgccgttatagttggttgttccaccgataccgccctgtgcaccgcccatagccagacaaggaaggatcgtttcatcctggccgtgcaacatgtcgaatttgccatttttatataaacggcattggttgtattcatacaggctttcgaaagtatatttgataccggcgaaattaggaatgcgaccgtctacggcttccaagaatgctaccattgagaggtatgctccgttgaaagctgggatatgataaaaatagaaaggaagtgcaggagcgccgcatgctatttcttcgcagtatttcaccaattcttcaatgcgtcctaccttcgggaaaggaggtgccattgctccgataccccatgctccgattttctgagcgtgttctgccagacgtttgcttgattttacacaagtgcttcctacatggacaatgactttgaatccttcgggtgctacttccatccaacgttcagccagtttcatgcgttcgtcttctgtcagcatatagccctctccggaagaaccattgataaatacgccttgaagtccgtttctaaccaatagttggcaataggcttcaatcggttcataatttacttctccgttctcataaaagggagtaaaaggtgcgtcaattaatccgtgaatcttttccatagcctttaatttatttgaaatgaatattttatattacttaatcatgttgcgtgcaaatatataaatgatttatgaaaacaacaagtgaaaactaaatttatttattaataatcactcttttaataaatagaaagataaataagcgacttagaaacgttctttaaatgtatatggaaaatggaattgttacaaaaaatgataattagcttacatcttctaaaataatttttgaaaattctctttaaatgtgatttgatttcataaaaaaataactatatttgtggacattaacggaatattttattatgggtgagaatttgttgaaagaaattgaaaagggctcaaagatggctgtgatgaagaagaaaatcattacccattatatttatagtggaagctctacgattactgatttagcaagagagatggatttaagtgtgcctacagttacaaaattcattgatgaaatgtgtgaggaaggttacattaacgactatggaaagctggaaaccagtgggggaagacatcccagtttgtatggtttgaatgcagattccggatattttgtaggtgttgaagtgcgtcagttttccattaacttagggttgataaattttaaaggagatgtagttcagctaaaaatgaatgttccttttaaagcgaagaatacccctgagagtttagacgaattgtgtaagttgattaaacattttcttcaaaaagtcagtgttgagaaagataagatattaaatattaatgtaaatctttccgggcgtgtgaatccggatttgggatatagttacagtatattcaattttgatgagcgcccgttgacggatgtcatatcagaaaaggtgggtggttatcgtgtttctattgataacgacactcgtgctatgatttacggtgagtatatgcaaggtgttgtgaaaggtgagaagaatatcatctttatcaatgtcagttggggattgggtatgggaattatcattgatggaaagatttataaaggaaaatccggtttctctggcgaattcgggcataattttggatatgagaatgagattatctgccattgtgggaaaaaaggatgcatagaaacggaagtttcgggggctgctttgcatcgtattctgttggaacatattaataatggtgaaaactctattatctccaataccaagaaaaatttggaagatttgaccttggatgatatcattgatgcggtaaataaggaagatttgctgtgtattgaactggtggaagaaatcggagtgaaattaggtcgccatgtagcgggacttattaatatatttaatccggagctagtcattattggtggtgcattgtcacgtacaggtgattatttgacacaacccatcactacagctattcgaaaatatacactgaacttgatgaaccgtgattctgttattgtagaatctaaattgaaagaaagagccgggatcatcggtgcttgtatgttgtcgcgcagtaaactgtttgaataatatgtaggtattataaagtaagagatgaattcattacatgattcatctcttatattgccttcttgttaagtttaactctgagcaagctcaataagtttttaaggagttagtattatggttgatagaacacatggtgaaactaaactttgggaatcttttattaaaggagaaacggcggcatttgaagaagtttatcgacgctattattcgttattgtattcctatggaattcgtatggtaggtgacagagagctggttgccgataccatacagaatctgttcgtcaagttgattttaaattgtaggaatttgcattatactgataatgtaaaagcgtatttgctttgttcttttagaaataaactgctggatgcgtttcagtctttacgtcctatggaagtgattgaagaatgccatgaattttttccgatgggcgaagaaataataaattctttatttaagaaagatgatgtggatgtgaagaatgaaagaaggctggctaaggcaatttcacgtctttccggtcgtcagcgtgaaattctgtatttatattatgtaaaagaattgagccatcaggaaatatccgctatcttaggtatgaatcctcaatcaagcaagaatcttttgtcgcgtacattggcacgtttgcgtgaattctttttctctgtttcaaccatatggattttcagtatcttggtgcattgtgttcatgtgcctgtgcgtagtgtttgggcttttcacttctcttgatttagcgagtagtcaatcattgttgttttatcatttgggcatgttttcatggaatgaagtgatatttgtgtgatgaataagttcttttatttgtcatataaggtttgtctattggttttgcgaaggctcatgcaaagaaaagtgtgatttcttttcttttttatgagtaccttttttatcgggcaccgttttcttaataaaaaggtttttcgatgaaaaataaaaaaacaatatataattcagatgaatttcgtaaaacagttcaatgcctgactgagaagattcgggaagcagatgaactggaatctgttgatgtagacaaatcttttcaggacgtgatgaaacgagtaggaagggaaaaaaaggttccccacagacgtcatatttataggtggtctttgtcgatagcggcagcgattgctttggctttagttatgaactggtggagtaccaatgttgatgagggtacggagcttgatatagcattgctgaatgacacgacttccatttgcggtgatgaggtgattctgataacagataaccaagctatgaatctgaaaaatgatgcttctttaaaatatgatactttaggaagttcgaatattcagcagtatgcattaaatactaaaatatcccaggcttcatctgtaaagaatgaaatgcatcaaataatggttcctaatgggaaaagagctgatattactttttctgatggtactagaatttatataaattcaggtagtaaagtgatatatccggatatttttgaagaacggaaacgtgaaatcttggtagagggggaggtttatctggatgtagccaaaaggaaggattgcccatttgttgtcaaaacaagagagtttgatatacgcgtgctgggtacttcgtttaatgtctgtgcctatagggaggatgaggctgcatctgttgttttagtacgtggaagcgtggaagtaactactgagaataagagcaaagtaagattagcacctaatcaattggtggatattaaaggcaataaaacgcaggtacgtaaggttgatgtgtccgaatacatcagttggaaggataatttattgctgcttcatcaaagacccgtaggagatgttttaaagaagcttgagcggtattatgggtgtaaaatacggtatgatgcagagattacgaccttgtcattgtcaggaaaactggatcttcaaacagatattaccaatgttatggataacttatgtctttcattatcattgcattatacaataaatgataaagatgaaatctatgtgagccttaaatgagaattgttgaaccttaaaatactttagcctatggaataaaagaaggatgtaaaaaaagaaaaccagacagtatttgccgtactatctggtcactgaatcgttgtttaattatttaccttgaaataaatagaaaaaacaatcaaatatatgaaaaaatacacgaatagaataaaactcatgcctaaattcacaaaatgtatgagtttagccatgattttaacatttacaggttatgaagaggcttttgcggaaatgagttatgcggaacaaaccagctttaccgtttccatggagaaccagactttgaagagtgtgattaattgggtagaaaaaaatagtcaatttatttttatatatcgtacagatattgatttgtctcgtcgtgtcaatgtggatgtacgaaataaaacaatagaggaggtactgaaacaaatgtttgccggtactgatttggaatatcatatccgtgacagacaagtaataattcgcaaggccatttctagagaagaaacgcgtcccattgttatgcaacaagataaagtgactgtcaaaggtatagtgaccgatgccaaaggagaagcaattattggggctaatataatagagaaaggtactaccaatggtactataactgatatagacggccggtttacgttagtggtaagtgaaaaagcgtctttggtcttttcttatatcggttatctgacccaagaaatgttggtagggaaaaaaacgtttctgaatgttcagctgcaggaagacaataagactttggatgaagtggtgataacaggttatgggggcacacaacttcgttccaagatgactaattccattgctaaagttgacaattctactttaagtacgggggcccatactaatccggcgcaagcactctctggtgcagtggcaggattaagggtacagcaaactagcggtaatccgaattccactcctactttggtgcttcgtggtggtaccaatctggatggtagcggttcacctttggttattatcgatggtgctgtacgcgagtcgttgagtgatgtgaatccggaggatatcgagtctttggaggtcatgaaagatgctggtgctacggctatttatggtgcgcgtgcttccaatggtgtaattcttgttactactaaaagaggttcggaaggacatacggaaataaatttgagtgcgaaagtcggtttcaatttttttcatagccagtatgaatttttgaatgctcatgattatttgtattatatgcgttcggcattttatcggtcttcgcatatatggcaggataaatcgggtgcttggcatggatttgccagtgatgcgactttatccggaacacagccttacggaacgggaaacagatattttgatgaaaaagggaatgtacttaatggtaataaggataatacagctgtatggggtgttatgaattatacaaatgacctggctttcctgttaaaacaaggttggcagacaatggatgacccagtgaatccgggacaaaaattgatttattgtgataatcaactgaaagattataatatcaaatctccggctattactcaggattataacttgagtgtatccggtggcaatgataaaggacattattatgcaagcctaggctataatcgcagcgaaggaaatgcgatgaacaactggtatcaccgtttgaacttcacgatcaatgcagattataaaattaagccttggcttacttctaattcttctttgacatttaccgatgccaaatgggacgatggtggtgcaggatatgccggtgaaggtaattttttcagtactaccttgtccgttcctcctacattccgtgtgaaaagtccggacggtgattggttggcaggccctgccgtggcttcttatgctcgtggctggactacagtgaaagtgtatgaggatgcattgaattatgataataatacggacaagtttaatctgagccagtcttttacctttaatataatgaaaggattgacattcaagaccacaggaacttggttctattttgatgatagcagagagttcttcaaaggggactatattgtagctacaggaccggtgtatgatactaatcatagtacttccaacaaacatgaacggcttttagaccagacttacaatggaatcttgaattatcagactacattccggcaagatcattctatggatgcgatggtaggtgtagaatattatgactcatacaagaaaggtttttcggcatctggttatggatctccattatctgattttcaggatttgaattatacttcgactgctgccggagtgcggcaaatagattcttggcattacagacagcgtattctttcattctttggcagagtgaattatgattataagtccaaatatttgctgagccttgttttacgtcgcgacggatactccaaactgccaaaagataaccgttggggaacctttcccggtatatcagccggttgggtattgagtagagagaattttatggagtcttgtagcaatgtactttcttatgctaaaattcgtgctagttacggagccaatggaaatgtgtctggtgtactggatgctaatggtaatgtagtgacaggacttgattattatacggttcaaggttcttatggtattatgaaagataaagatggtaaaatagtacccaactataatggcaaagttcctttgatgataaacgatttgcctaatcccaccatgagatgggaaaaatcgtacacattcgagacaggtttcgatattggttttctgaataacaaatatatcttgaacttcacctattataatagacatacacaggataaatttgcagaaatcaccctgccttctcatagcggagtttcttctttcctttctaacaatggagaagtacaaaaccaaggtatggagttggaattgactgccaatgttttgcgtaccaaagattggaaatttacagttagtatgaataccgcttataataagaataagattatctcattaccgtacaatggattgccgaataatatgcaggatgcctatcaggtttatacgggacgcaagctggcagatggtacctatgaaagacaatgggtaggtggttatcaggaaggacaggaatatggtgtgatttacgcctttaaatctcttggtatttataagagtgagagtgagattccaggcaatctgatagacagatccacttatacggaaaatggagcagatgccaaagtgctttatggccctgaagcttgggctaaattgtcggatgccgaaaaggagaaaggactgcctatacaggctggtgatgtgaaatggcaggatgtgaatggggatggtgtgattgatgattatgaccgggtgaaattgggtaatacgatacctcattggaccggaggctttaacattaatacttcatggaaagggttaactttgaactgccgtctggattatgctttaggctattgggtacatgattggaaaactccttggattatgggtaatatgcagggaacatttaataccatttctttagttaaagattcctggtcggaaagtaatccgaatggaaaatatccggtgtatggatgggctgactttttgggcaaacgtaattatgacagaatatcggacattaattgttatcgtggcgattatttggcttttcgtgaaataagcctgtcgtattccttgcctcagagttggattcataaatccggtttgagcaaggtggatgtttctgtaacagcacagaatttgggatatattacagcagccaaaaatatggcgacccccgaatatggtgtcagtcagaatggaggatatcccctccctagaacagttgttttgggtttaaatgttacattctaataaataggaaggattatgaagaaaatattttatagcatattgttgagtgggatgatggtattgtctgcttgtgatgcgttggacctgtctcctgaagattattatggctctaatgatttttggaatcagaagtctcaggtagaaatgtttatgactggtattcatgccgatttaagagataaatatcagatgcctgtcacattgggagagttcagaagtgagattctgataagtgatgttacttctatgggtgagggggtatatggtccgcctatgactaataatctgcttacgaaagataataccggtgtcgatgattggtatgaggtgtacccaaatatcatgcatataaatttgtttatcagaaatgtagataaagaaattgattatctgactggaacggagaaatcattttatttgggacaggcttatggcttgcgtgcatattactatttctatctttatcgaacatttggtggtgtgccgttagagacggaaccgaaagttaccgagggtagcattgatattacgcaattatataaggctcgttctactccggaggaaacgttggagtttatcaaagaagatattaataaatccgaagctttcttcaatgagtcggataagaagatgtccaaccaatatgaatggtcttatcatgcaacggaacttttgaaggccaagatatatatgtggtctgccaaagtcactacaggattaccagatgatgatattgcaggggatcatatagctactctgactgccgtagatcctaataacagtgacttgttgacagcaaagaaggctttattgaatttggtgaaccaacaattcgaactgcttccaaactttgcggatttatggactccggaagggaagaagaataaagagatcattttcgctctgtgttttaataagaatgaattgaccaattggggggcgaactggttctataatgtagccttgtttaccaatgctacggacttggatggaaataaatatggtccggatccgttgaagctattgacagccggaccattacgttatgagtataaagtgccgtttattgagatttatgataaggaagatactcgtttggatgctactttctttcaatatatgttcgaaggaaagactcgtggcgcttgttggaaaaaactgatgggacatacggatggaggaactcattattatgattcagatgtaccggtatatagatatgctgatgttttgttgatgctggccgagtgtgaaaacgggttgggagctccggataaatgtgctgcatatataaatgaggtacgtaagcgtgcttatggtgataaatttgaacaacataaatatattgcaggagattatgcggataatgagtgggctattttgcaggaacgtgataaagagtttgtaggtgagggaagccgctggtttgatttattgcgtttacgtgattccaacggaaaaccttttgtcttttctgttaaagcgcattatggaagttcattgcctatattaacagaggataaggcgtatatgatgttgtggcctgttaatgtggaagttttgaatggagatccggaaatcaagcagactccggggtatgaataatagtgagataatatgatgataatgaaaagattgctctttttagtatctgtatgcagcttatgtatggttggtaattctcagaattaccaacctgagaagcatgcagttgtgaaatcagatcgtggggatggacggttactaagtacttatgccattgttcatgagatgttgaaagatacacatccccaatatgcttaccgttccggtatgtccgcacaggaatttacgcaatggcaggatggagtgcgtgctgcgatggtggagatcatgaagtttcccgagataaagagacaaccgtctcctgtctgtgtgaaaacggaaaaaaaagagggatatattttagagaaatgggagttctatccttttccaaagtcagtttccacttttctggttttgaaaccggaacatttgaagggtgcagtacccggagttttgtgcattccggggtccggaaggaccaaagaaggattggccggtgagcccggcatctgtgataagttaactgaggattataataatcccaaagtaagtatggctttgaatatggttaaagaaggttatgtggcggtagcggtggataatgccgctgccggagaagcctccgatttggaatgttatgataaaggatggaattatgactatgatgttgtttcccgttttttgcttgaactgggatggagttggctagggtatacttcttatctggatatgcaggtactgaattggatgaaagcccagtcttatatccgaaaggacaggattgtgattagcggattctcattaggtacagaaccgatgatggtcttgggggtgttggataaggatatttatgcttttgtgtacaatgattttctatgccagactcaggaacgtgccgttgtaatgactaaacctgacaaggaaaacagacgtccttttccaaattctatccgtcatctgatacctggttattggaggtattttaattttccagatgttgttgcgtcattagctcctcgtcctatcatttttacagagggagggttggaccgtgatttccgtttggtacaatctgcttatgctgctagtggaaaaccggaaaatgcggagtttcatcattatccgaagtttgctgataaggcagttagaaaagatgtggagcaccttgatgaaggactggattcaaagacctatttcgaaacggtcaatgtagatcctccttctcattattttaaaaacgaactggttattccttggttacgcaaagttttaaagtaggttcaggtattttgataggctgtgattttttatataatatgagctccttgtttttcatctaggtgaaagcaaggagctcttttttattgattgtgaagaattcttgcaaaatttaatcttgttttaatgcagattgtagtgtttcccaattttcattgaaatcaggcatggaatgaaaaagtaaattcgctccttcattcagtaacacattgtcgtgcaatggtcctgtattcacggcgatggtaaaaataccggctgcaactcccgcctgtacacctagtggtgcattttctattactaacgcttcattgggtttaaagccgcctttctttagggccatcagatatggctccggatttggtttcccatatttcacatcaaaggcggtaaccattaagttggcttggaatatgcccggaaaattatgattcaatcggtccaataacgaagtttgtcccgaaccggtcactaccatcggagtcagtccttcactctttattttagtcaatacttccagtgcgccgggcatccgttctgctttggggcatttgttgaattcttcagttttggcttggtagatagcttttatttcttcttcagtagcatcatgcccacgctcccgacgacttactatattgatcgtagatgcaccggtacgcccttcgtgcatataagcttcttctcggctgaggccgaaaccgaagcgtttcattattttatgccatgactcagcatggttggacatggagtcgaacagcacgccgtccatatcgaataatacggctttcaagtcgatggattcgtatccatgagtatgaagatagttatttatcgcttctttaaacatagaataaatgtatagttattacttccaaaggtgtgaccgttggattggaacaaagtgaagaatctgcaagcatttggtggatgctttcagattcttcactgttattcggaatgacattgataaatggcattctgaataggttcttgatattataatctagcttggatagctttagactcttcttcgtatcccggtttattcaacaaagcaaacatatttttcttgtatgcttccacgcccggttggttgaacggatttactcccagcaaataaccgctgataccacaagctttttcaaagaaatagatgatttctcccaggtagtattcattcagttcgggtacaatcagtcgcatattgggtacaccaccgtcaacgtgtgccagctgagtacctagttctgccatcttgttcacttcgtctacacgctttcctgccaagaaattcaagccatccaaattttcgctgtccgaaggaacttgaagcgtatgttccgggttttcgatagagataactgtttcgaagatagtacgttcaccttcctgaatccactgtcccatagaatggagatcagtagagaagtcgacggcagacggataaatacctttaccatccttgccttcggattcaccgtacaattgtttccaccattcgttcatatagtgcagtttgggattgaagtttaccaaaatctcaatcttctttccgtctttatacaattcattgcgggtagcagcataaacagcggcaggattttcggcaaacggagtagccggaccacatattgtttccatcgtacgtgcgccttccactagtttctcaatgtcaaatcctgccactgcgataggcagcaaacctaccggagtaaggacagagaaacgaccgcctacattatcggggataataaaagtctgatatccttccttgtcggctgtaacacgtgcggcaccctttttggcatctgtaacggcaacaatcacttttttcgccatttccttgccaagctggtcttcacactgttttttcagtaaacgaaaagctaaggcggtttctgtagtagtaccagacttggaaatattaattacaccgaactttttgtccttcaagtattcagtcaactcgaacaagtaatcttcgccgatattgtggcctgcaaaaacgatgacgggtccgtcttgttttgctttcaaccattggaaactattggataaagcttctattacggcacgtgctcccagatagcttccaccgatacctgctacaactactacttcacagttgtcgcgcagaacctgggcagtagctttcaagtcagccaaatgttcggctgttatagacgatggcaaatgcaaccaacccaagaagtcattacctttacctgtaccgttttccaatgtttccatgcaggctttcacctgaggttcgtaagcagcgattgtttccttagaaacaaaaccggctactttgtcgatgtttaaactaatattcttcattgtatctgatattttatctgaatgaatcagttaataatttaatctcaatcatgggcgagatgcgctcatataaaatattataaacggcatctacgataggcatgttcacgtgcaagtgcttgtttagctccttgatacatttcgttccgtagtatccttcggcaatcatttccatttctatctgtgcgctttttacggaataacctttaccaatcatggttccgaatacgcggttccggctgaaattggagtaggaggtaaccaacaagtcacccagataagcggaatcatcaatagaacgctctacgggatgtacggtattcaggaagcggttcatctcttgaatggcatttgaaatcaatacagcctgaaaattgtcgccatatttcagaccgctgcaaattccagcggcgatagcataaatattcttcaataccgaagcgtattctatacctgccacatccgggcttacagaagtttttatgtaatgtccggccagctgccgggcgaatatcttcgccttgtcaatgtctttacatccgatagtcagataggaaagacgctccaaggctacttcttctgcgtggcacggacctgcaatgacggctatattctcttcgggaacaccgtatacctgatgaaaataatcggaaacaatcaggttctcgtcagggacgatacccttgatagcagtgacaatgaacttgtcctttattttggttttcagctttttcaggtggcttttcagatagggagagggggtaacgaatatcagggtatccgattcctttactatcttgttgatatctgaagagaagttgatgttctttatttcaaagcgcacacttgtcagataagccggattatgtcccaaacgtttgaattcttcaattcggtcgtcgcggcgcatataccagttgattgattcagcctgagccaagactatttttgcaatagccgtggcccagctgccaccacccattatcgctattttaccgggcaatttcatgcttattatttatgatggataattgacaattggaataattctcaatctttaaattctcaattctcaattttcgcaatccatccggcaacttcgtccaccgtaggattggttagttccaatttatattttttgttgattccgcaaatgtccatatgcagcttctgcggattcacttctttcatatcgctcaccaggttatagcctgctttctgaatgacaggaacccagtcttctgaaattcccagttccataaatttagcaggagtgtctttcggagtaatcttttcgggacgcatctgggggaagaacaacacttcctgaatggtagactgtccggtcatcagcatcgtcagacggtccataccgattcccatacccgaagtggggggcataccgtattccaacgcacggacgaagtctttgtcaataatcatagcttcatcatctcctttttcgctcagtctcatttgttcttcgaaacgttccaactggtcaatcgggtcgttcaattcggagtatgcattacacagttccttaccgttcaccatcagctcgaaacgctcggtcaaatccggattgctgcggtgtatctttgtcagcggagacatttctttcggatagtcggtgatgaaagtcggctggatgtaagtaccttcgcagaattctccgaagatttcatcgatcagtttgcctttgcccattgtgtcgtcaatctccatattgagtttctggcaaacttctcgtatctgttcttcgttcatgcctgtcagatcatagccggtgtgttccttgatagagtccagcatggtgacacgtttgtacggggctttgaagtcaatgatgttgtcgcctacttttacttgagtggtgccgtttacatccagacagattttttcaatcattttttctgtaaattccatcatccagttatagtccttgtaggcaacatatatttccatgcaggtaaattcaggattgtgtgtgcggtccattccttcgttacggaagttcttacctatttcatacactccttcgaaaccacctacaattagtcttttcaggtacaactcactggcaatacgcatatacagcggcatatccagtgcgttgtggtgagttatgaatggacgtgcggctgctccgccggcaatggattgcagaatcggggtttccacttccatataaccttttgagttgaaatattcgcgcatagagctatatactttactgcgcttgatgaagatatcttttatctcttcattcacagcaaggtcaacataacgttggcgataacgcagttcagggtcttcaaacttgtcgtaagcgactccgtctttgtattttacaataggaagcggtttgatagacttggacagtacggtcagttttttagcgtggatactgatttcacccatttgggttctgaatacgaatccttctataccgataaagtcaccaaggtccagcagacgtttgaacacagtgttgtacatttctttgttttcatccgggcagatgtcatcacgggtgatatacacctggatacggccttttgaatcctgtaattcgataaatgaagctttacccatcacacggcggctcatcatacgtccggctaccgatactttgcgaggttcctcatcatccttgaactcagcttttatatctgtagaaaatgcattggttacatactcagctgcggggtatggctcgatgcccatagcgcgcaattcattcagactgtttcgtctgataatctcctgttcacttagttctaatacgttcatcctgttaaaacattaactcaatttgttggcaaaaatacgaaagattttgcaaagtacctcattaagacgtgtttttatttcgataaagcctgttcttgagccagttcgcacaccatagatatcatgaacagcactccgattgcaccgcaggcaataatcagggcgagattaatcatacgggcacggaaaagggtggaagtatgcagatgggaagctgtgtattctttaaagaacagataaaggcccggtacagccgaacttgccagcagaaaatcttcgggaatatggaaaaagtaagttttggtgaaaccgatcagtgcccagtggcaaagaaacatgacgagaaagatattgactcgtttggaaaatgccagcagcagtccgatggtgaaaaccgctaccgaacaaggcattacaggtgaggtcatcatgggaaagctcatcccccttataatggagaagagtggataggccaatggcaacatacaaagcaggacggctagtgcggtatgtttgtgagtccggtcaaaaggggtgtagtttactttcaggtcataaatccagaagatggccatgattccccaaaatcctgccaaaacactgttgtaacttcttggttcacaataaatcatgtaatacacggaagctatccagacattcaagaatataagatataacttcatcgctacttttattttttttgtggggcttttgaatagagaataggttaaaataatgccgataagggtgataataacttgataaatccaggtacccgcattgtaatgagtgattgtatcccaaaaaatattcatcttcttgataagttggtagttattttgggtgccaaaattacgaaaaaatgatggaatagcctatctttgtagcgaatatataaaaataagagaagaacgatgaagaagtttatgagtctgatgttgctggtttgcgcatgtttgctgagccagccggtgaaggcacaacaggttactcctgataatgccggttatatagtaaaggtaggggatatggctcccgattttgaaatggaactgacagacggacagaaagtgaaactctctgatttgcgtggcaaggtggtgatgcttcagttcactgccagttggtgtggagtttgccgaaaggagatgccttttattgaaaaagatatctggttgaaacataaggataataaagcgtttgctctctttggagtggatcgggacgaacctttggaaaccgtagtggcttttgccaaacgtaccggcgtgacctatccgttggctcttgatccgggagctgatatttttgccagatatgcagaccgtaaagcgggcatcacccgtaatgtattgattgacaaaacgggcaagattgtaatgctgacccgtttgtacaatgaagaagaattctcttctttgtgcaagaagatagatgaaatgttgggagaaaaataacaggtaatgagaggatcggtactatttgtcacgtttttattttttgttctatcaccgcttctggcgaagaaaaagcctcgtaccggcaaagaggcattatttggaaaggagtatgctacctatcagattacatccaatgaattaagcggagcttgtttttatttggtgagtggtcacggaggtcccgatcctggggccatcggtatctatcaggggcgtcagttgcatgaggatgagtatgcatacgatattattctgcggttggcacgtgagttgttgtcacgcggtgcgaaggtgcatattatcattcaagataagaaagatggtattcgtgacggtcatgtcctggcaaatagtaaacgtgaaacttgcatgggagatcctattcccttgaatcaggtagctcgtttgaagcaacgctgtgactgggtgaataaactgtatcggaaggataaaagcagttacaaacgagctgtatttattcatgtggacagtcgcagtaagggacagcagacagatgtgtttttttataacgctcctaaaagtacgaagggtaggcggttggccaataacttgcaccgtacctttgataggaaatatgacaagcatcagccaaaccgtggctttcgcggaacggtgagtgaacgtaatttgtatgtattgcgtaatacgactcccgtagcggtgtttttggaattgggaaatattcggaacaagcgtgaccaacaacggctggttctgaagaataaccgtcaggcattggcaaattggattgcggagggaatagtgaaagactataagcaaggcaaataaaataggggcaacggatgtgcttttgttttgccagctttgtgatagttgggtgagttgtaatcggcagaatgtgactggtatttgagcttgtgaaacgtcgaaatcaagccttgcatattagagtcgtgaaataaagaaagggagtgataaaaaatgtcactcccttttcttttacttgatttcgatttcctctttcatgtctatctcctcaccgtgaatatcggtgaaccgatattgcaggaaggccagactttggtctgggataatctttattccgaatccgtatttcatttgccatttgcgcttcagggaaaccagaccctgattcacatatgctgcgatgtacggatggatgtacagcgtaaatctctttatcttcaatttgttgaccaggtaatcaatcttactctccaaagtatccgtgaaaaggatggatggctttatgctacctttcccgaagcaggtgggacaggtttcattcgtgttgacatccatggcaggacgcacgcgttggcgggtaatttgcatcaatccaaatttactgaggggcagaatgttatgttttgctctgtctttctgcatgttttggcacatacgttcgtacagtttctgccggttctctgctagattcatatcaatgaagtcaaccacgataataccacccatatcacgcaatcttaactggcgtgccagttcgtcggcggcacccaggtttacatccagtgcgttagcctcctgcccgttggcagatttggagcggtttccactattgacatccactacatgaagtgcttctgtgtgttcaataatcaggtaagctccacttttatacgaaatggttttcccgaaagaggatttgatttgtttggtaataccgaaattgtcgaatatgggaagctgacccttgtacagttttacgatttcggctcgttcaggggcgataagtgatacataatccttaatctcatggaacactgtttcatcgttcacatagatgttctcataagacggattgaaaagatcgcgcaacatggccactgtacggctggtctcttcgtataccaatgccggcagtttgggagccttctgtactttagtgattgtttcttcccaatgtttcagcaagactttaagctctgcatcaagctcggccacccttttgccttccgctacggtgcgtacaatcactccgaagtttttcggtttgatgctttgcaataactgtttcagacgggcgcgttcttcgctcgatttaattttttgtgataccgaaaccttatcgttgaaagggattaataccaaataacgtccggcgaatgacaattcgcaggttagtctggggcccttggtcgagataggttcctttacaatctgcacaataacttcctgaccttgttggagggtggttgaaaccgtcccttccttttcaatatcaggcagcatagtagcttttgtgatgggaaaaagttttttacggtcgcttaaaacttgcttcagatacttctgataagaatgaaattgaggacctaggtctagataatgaagaaaagcatctttttcaaagccgacatccacgaaacaggcattaaggccgggcattagtttctttacccgtcccaaatacatatttcccacattgaaggaagcacttctcccttctttctgaaattccaccaacgctttatcttcaaggagtgcgatggaaatctctttgggttgtacgtctactactagttcgcttgtcacttttgtatttttaaattgttcacttttctcattaaacaaagaacaaacctgaaagacttttgttgctttgcaaggtttgttctttatttgtcgtcacagacagactacaaattattttttgcttttatgtctgttctttcttagtctttttttacgcttgtgagtagacattttgtgtctttttttcttctttccgcttggcatagcttcaaattttatgggttaatactcttgtttattatttctttactgataatgtaaatgtcttagctggtttaaatgccggaatattgtgctccggaataatgattgtagtgttctttgaaatgttgcgagcagtcttctgagctcttttcttcactacaaaacttccaaaaccacgcaggtacacattttcttctttagataatgaatcctttactgtatccatgaaagcctcaagtgtggttaacactgtcaccttgtcaataccggtatttttcgtaatttcgtttacgatatctgctttagtcatttcgctaaataattattgttatacttatatcttaattttttggactgcaaatatatagcttttctccctctttaagaaatatattcagaataaatttcctaaaaaaagcatcttcttccattttcttggtttacttttgcggaaatattgcatagaatgcacttttatataatactgatatggagaattttagcagaaaattgatagattggtatagggaaaacgggcgtgatttgccgtggagaaggacaaaaaatccttatttgatatggatctcggagattattctacaacaaactcgtgtggttcagggatatgattactatcaacgttttgtggcccgttttcctgatgtgttcgcactggcggcagccgatgaggatgaggtgatgaaatattggcaggggctggggtattattcccgtgcgagaaatttgcatgctgcggctagaaggatggcagaggcaggaggatttcctgtaacatacactggggtgcgtgctttgaaaggagtgggagaatatacagcagcggctatttgttcatttgcttacggtatgccatacgcagtggtggacggtaatgtgtatcgggtgctgtcccgctggttgggcattgatacccccattgattcggcggaaggaaagaaactgtttgtccgggttgccgatgagttgctggaccgtgagcgccctggtctctacaaccaggctatcatggattttggagctttgcagtgtactccggtagcgcccgactgcctgttttgtccgctaaacgattcttgtgtggcgcgtctgaaggggattgccggctctttgcctgtgaagcaacataaaaacaaggtgactaatcgttattttaattatatatatgtacgcatgggcgcgtatacctttatacataagcgcagcggaaatgatatatggaaaaatttgtatgaaccgcctttggtagaaacagatcgtgaatggacggaagaggaactgtatgcatcgccacagtttcgcgggatgctgtccgggggagaggagcccatagtgcggctggtgcggaaaggggtgaagcacgtgttgtcccaccgggtgatttacgcaaatttttatgaagtgattctccctgagaattcggcttcttttgcgaagtatcagagaataagcgtggaagatttgcataaatttgccgtatcgcgtttggtgaatcagtttttttcgctaattttggagcctaataattaaaaaggaataatagaatgtcagtaaataaagtcattttgattggaaatgtaggaaaggaccctgatgtgagatatttggataccggcattgccgttgccactttctcgttggccactaccgatcgtgcctatacgttgcagaatggaacacaggttcccgaacgtacggaatggcataatatcgtgttatggagaggactggcccaaactgcggaaaaatatgtccgtaagggcgacaaactctacatagaagggaaaatccgcagccgttcatacgatgaccagaatggcataaaacgcaccattgtcgagatttttgctgataatatggagatgctgaccccgcgtaatacctcgcagcaaccgggtacaggatatgtaccgcaggcacaagcggtatcccggcagcaggtgtctgcacaaacggctccgcagcaacagcaagtctcggataatagcctgacagacgatttacctttttaattaagagaacttgatgtttaactaaaaccagattccttggaccctgactcgtatttatgccgcttggcggatttatttgacggtgtaaccgtaacggctcctaccatgggagctatcatagctatcttgttagctgttttattgttgtatgcctcaggctttgtgtctgcttcggaaatagctttcttttccctttcacctgttgatttaagtgagatagaggaaggaaaacatacttcggacagacgtatcagcgccctgctgaatgattccgaacgcttgttagcgactattcttatctctaataattttgtcaatgtaaccattatcatgctgtgcaattacttttttgccagcaccatacactttggaaattccgtgattctggaattcctgctaataacggttgtccttacttttctgctgttgcttttcggtgaaatcatgcctaaaatttattcggcacagaacacgttgaagttttgccgtaaggcagctcctgccatttcttttttaaagaaattcttttcacctttgtcggcattgctggtccgttcttcctttttggtgaacagatgtgtggcaaaaaggaattataatatttctgtcgacgaactttcacaggctttggaactaacggacaagagtgagatttcagaggaaagcaatattctggaaggtattatccgttttggtgaggaaacggctaaggaagtgatgacttcccggctggatatggtggacttggaaatcaatactccttattccgaagtgttgaaatgtattgtggaaaatgcctattcccgtattccggtatatgccgaatcgcgggataatataaagggaattctttatataaaggatttgcttcctcatttgggcaaaggcgacaactttcgttggcagacattggtccgtcctgcttactttgtacctgaaacgaagatgattgatgaccttttgcgtgattttcaggcgaacaagatccatattgccatcgttgtcgatgagtttggaggtacttcgggtattgttacaatggaggatatcatcgaggagattgtaggagagattaatgatgaatacgatgatgaagagcgtacgtatgtgaaactgaatgaccgtacctatatattcgaggcaaaaaccttgctgtccgatttttataagattatgaaagctgatcctgctcttttcgagaaagtggaaggagatgcggacactttggccggtttgttgctggaaataaaaggggagtttcctgtattgcacgagcggttagattatgggaattatcattttgaggtacttgaaatgaatacgcgccgcattttgaaagtaaaagttgtcgttgactcttccagctccctggaagaagaaaagaaatagattttattatgcctttataccgtacttatatcgaaggggagtttctgcttggaatatggaagtctgatgaaacaacggaacaactgctggcatcattggagcataaagactggtatagggagaaattggctgttctttccgaaaaacggaagcatgaatggttgtcggtacgtgtgctgctgaaggctttgtgtggagaagaaaaggagatagcttattactcttcgggaaggccttatctaaaggatggaagccggtatatcagcatctcgcatactcgcggttatgtggcggtggcgcttcattcttcctgtgaggtgggaatggatatagagcagtatggaaccagagtgcggaaagtagcttcccgttttattcgttccgatgaagaacccgcaatgatggaaggagatgaagtttatgctttattgctccattggtcggccaaggaggcactgttcaaactgatgggagtagaggaggtggatttcattcgtcatcttcgtatttttcctttcagcttgtcggaagagggggagttcgaggcatgcgaatatcgtacaggccggcaggaacgttatcgggtccgttatgtcactcatcccgattttgtattgacttggattataaaataatgctcaggcgaatcacttcggctgagcactccaaataaacttggcagagtttactttaaaataaattttctttttacctgatattcttttccggacagtgaaacggagaaaatagcggatgtgtttaaaggcatcccttacgttcagtgttccaagctctttcctcgaaagcttcagatttgataaatgcacaggcaggtcttctgactcgtttccgctataagcaccttcccggaaattatcccagtggttattggcattttgcttatgcgtttagtgaaacatacagcagcgggactgttcaggattctcaccttgattcccttttaatcattcacctcggaggggagataaatgaaccgatgcaccgcaaagatacagtttatatttaagaaaacaattatctttctttattttttggagcctgtttaaattttgaagaaaatttagaaacaggctcttgtatcctcttattctttactcaatgtaaatatgaattccagacctccaccgggggtatttttagcgaagattgttccgccatgcagaatgactgcgttttttacaatagctagtcccagtccggtaccgcccaatttgcgtgaacgtcctttgtccacccgatagaaacgctcgaacaaacggcttagatgttcgggtcctactcctacgcctgtgtccgagaaactgaaataataaaaacgttcgtcttcacggaaacagcggatggttatggaaatatgagttcctgcgtatgcaatggcgttgtctgtcagattccggaagatggagtatagcagggaagaattgccttgtacggtcagtccttcaggcagcatattgtgggctgtgatctgcttttcttccagttccaaagttacttcgttcaggatattccgcatcatggtagtgaggtttaccggttctgtttctatcatgttcggagcttcttccatgcgggtaagtacggagatatcccgtaacagatgtgccagccggttactttgtgcatagcttctctccaggaaagcattgattttctcacggggcagagtagggttgtttactatggtttccagatatccctgtatgctgcttacaggagttttcaattcgtgggcgatattctgtgtcagctgttttttcagaagtgcctgttccttttcctgagtgatgtcattgatggagatttcaaagctgtcatcttgaaagataatgcattccacggcaaagatacgtccgtttttgtctatgttcaatgacatccgtttctcttctttgccgatactgcgttccttgttttttgttatgaaacgggtgatgggctgcaattcggggatggagaagatctcttccgtagaactcagatttttgtccgagataaggttggcgtattgtgtgaacagattatttaccagaatctcttctttgcggtggttgaatacgcctaagccttcgtgcgagatctggagatgggtgatcagtttctcgcgttcgatatataaatcttcttttgcctgatgcagacgtttgtaaatctggatgatatgttgggatatttcgcccagttcgtttttgggaaaggtatcctgcatatcagtgtctatcggttcattgcggtcggctttcatggcaaattgttgcaatttggtgatagacattcccaatttatgtgtgaatcggtagaacacaattattaatatcaggctgattatcagtgtgaaccatacataatgagagtctgctttcaggtgtctcatcagactgacattatagggaagagccgaacgaatgatatagtccaggttaggataatactttgccgaatagaaaaattcaccgcccaggctttccgattgtctgttaatggagtagccgctgccataaatgatggcttcttttatttcctgacggttatggtggttctcgaagtggctgggatctttttccagattgtcataaattacagtaccattcttgttgatcagtgtcacgcgtagatcttcaaaggtgtgttcgcaaacatagtcgttcaattgttgaatattcagtgtatccctgccacggagaaaatcattcaggcggtcgttgtaattctggagttgtgtgttcagcaattctattttgtattccttctccctgcgatattggaatgccatgaaacagatggcgaatgctatgaataaggaaattaccgacaagaatagtttcttgttgaatgacaggacgtggctggataatttaatagtcatggaaaggtacaggttaggttattcgcattcaaaacagtatccgtatcccaggcgggtgacgatgcattttccatattcgcctatttttttacgcaggcgggtaatgttgacgtcaatggtacggtccagcacatagacttcctcctgccatactttagccagaatatcttcgcgtgagaatacgcggcctttgttttgtaacaacagcaacaggatttcgaattctttttttgtcagggaaatttctataccgtctatgctgactttcttcttggttatgtcgactaaaagccctttgtactgtaattgttcttgcgcttcttttccctgtgtagggctggtgcgtcgaaggacagccttaacgcgtgctataacttcgcgcagtgaaaatggcttcgagatatagtcgtcggctcccaagttgaaccctgttacggtatcgttttcagtatctttagcagtaatgaatataatgggaatagaagcagtagctttattctttttcagcatgttcgccattttgaatcctgatatttctcccatcatcacatccagcaacagcaagttgtattgggtcagttccatcttcagggcttcttcggcagagtttgccgtgtccacaaaatacccttcgttttctaaattgaatttaagaatctcgcatagatcttcttcatcgtcaactactaaaatgcggtaatcattcatatatccatctttttaatactacaaaactaatcttttttgatcagcattgcaaaaatggagcatttttattactatttgatgaaacaaatattacaaaaagattacatgctataaaatcgttaagttctcatcgcagattacaccattttaatgattctgcaatcatcccgccggatgataattggaacgcaataaattatgatttcgtaaactctccggctaccggaatactcatttggtaacgtatttctctttcactttttccgtgtcccaaaaggaacatcagtttggttagaacggattccaccgtactgtcatagccgctgatgacccctgcgtccagcagatggagcccggtttcataccttcccatttccactgttccggtagagcattgggagatgttgacaatgatgattccccgtgaggtggcatcccttagaagttcgatgaaccacggcttttgcggagcgttgcccgaaccgtaggtctttaataccactgcgcgtaatcccggtgtatgcaggatattgctgatcatgttttcctggatgcccggaaaaagggtcagtataattacattggtatcataaagatagtgtggttttaatggcagattgggatcggctttgtgaatacggtcatattcatattttatgtggatgcctgctgttgccagtgaagggaaattgtatgaacggaacgcattgaaattctccgcattgatttttgtggtacggtttccgcgcaacagatggttttcgaagaagatgcatacttcgggtacaatagcagtgccgtccggatgtttggcagcggctatttctatggaagtgatcagattttcctttccatcggtgcgcaacatgccgatgggtaactggctacccgtcaggataaccggcttgctcaggttttccagcatgaagctgagtgctgaagcggtgtatgccatggtgtctgtaccgtgcagaatgacgaacccgtcaaaattgtcataattgtatttgatgatcttgactaacttggcccacaaggcaggttccatatccgaagagtcaatggggggattgaactggtaagaggagatgcgatagttgaaccgcttcaattcggggacattgtcttgcaactggtcgaaattgaaggcttctagtgcacctgtctcaggattttcaatcatgccgatcgtaccgcctgtgtatattagcaaaacggaaggatattcactctgtgtcatgcgcttttcttgtttaattttggcacaaagatagtaattatgtgtaactatgacaaaaataagagaggg

SEQ ID NO: 3879 - DNA, 19409 bp, Unknown
  gut microbiota DNA sequence
ccttaacaaataccgctaaggtataactgatattattaggcagacatatataggcaacatcattgtgagctgcaagaacaccattttcattaacattacctgaacctgtcttatgcgctataacaaccccttctttatcaagaagtggagctgctatcctatctacacctgttttgcattcttttaacgtattcttaatgaaactttgtttctcatcatcgataagaccttcagtaaacaaacgattcatcaacattgcagcaccaagaggagatgtatagttagagtaagccttgttatggtcagccgacatttcctcttccgtataagctatctgaaaacttgaacgaggaatgagtgtagctataaaactatctgtttgagcgacattaaccatatccttaaacataaggttgcttgcattgttgtcactctgagtaagagtataacgcagcaaatctctcactgtcaatgatatgactggccctgaataatctttcagcataggactccaagtctttgggtcaagtttatccctatttatatttactaaggtatcaagtgaaattcctttattgtcaaagtcattacaaagagctaatgcctgatgaaccttaaacacactcatcataggataaacactcttattattgaccttaaccgtatctctgttattaacaataaccgccacaccaatttcgccaggacaagctgagacaatttgagaaatgctatcagtcaaaacatttgttaaaggaggatttgcgctatcttttgtcgctgatttatggaacaatgaaaataccaagatgaaaatgcaaactaaagctatactcaaaactacgatttgtttttttctgtttttttccatgtttatattatttatatttgtttgacgagaatatctttatttgccgacaaaggtacataattttacggaaaaaacccgttggcggaattaaaataatagttaaatttatatgaaagaaaagttgtacatacaagaatttatttgtaacttagtgttgctcaatacattaagttataaaatcagtatgcacaacttatatacaaatttcgtaaaaatcccttgaatatctgctgtattccgtcgtaatttagacaaaatagaaatataatctgcaaaaatggaactaagcaattgatttcccaatatgggaagatacatatatgcgtttatgaatatgttctttttgccatactcttaaaatgacattacatgaaaattactgttggtaactactcttttacctttgcaaagactaatcttaatattttgtaaaatcacagcataaaatgttgtttttcagaaattagatttaactttgcactcgaaatcaaagcgttctttgtatattgcaaagttgtgaaagaaaaagaatatagctcgtttctaaatcgttagcagtcacattctttaaaatactcaactcgctgatattcaataaataaaagaatttactgtgactcgccacatggaaggtgatgtgcttgtgtatattagcccttttgacccatttgtttaaaattcttagtgtgtaagaataggaggggagcccgaataccaactcctcgttaatgcctttatgtctttgcaggagcttgatggcagtgtggtttaagtttagatgcaagattgcgtttttggagtgtgactgtactttctgttgtagaatagtaaggcggtttgatgagaaatctatgtctttatattgcagttggtgcacatcacaccagcgcagcccacaatagcaagagaacaagaatgccctttttacttcgttgttggggcatggagtgatagcaagtttctgaatctcttttaagctgaggattgctttggttacctcatcaaactgcatcaggcggataccatctgtagggttagaggtcattaactttttttctatacatttattgatgcacattctgaatttcttgaaatatccgatgggagtgttacctcggagatgatccctgagatactcaagaaaatttatacaaaaatcttttgtgagaagggttacaggtaagcttttctttcttgtaaacagtcgcaggtgggtgatacatgccctgaccattttcttgtcctttttgtgataggtatccaggtattgtcctatcagaatatagaaatcgggaacattgcttttatctgttggaagtatatcatcgaatgtattttctatatcgttcagatgatattcaacagataagaattctagttccttctttgctcttatctgcctggcaattagtaccttgtttctgttttccgctcttcgctctgcactggtaggagcgtccaggatgatgcccaaatactctttgcggcgcttcccgttataactgtaattcaaataaagcgaaactcttcctttgttcaattgtttctttcctaatgtaattcccataatgaataataattaatacaataataatgttgaaaagaaggaccagagaggaactgaaaatgaattcctccatctttctttctataataataatatcttttgtacctttgtgtcataaacaaaaaaatggaagaaaattttgatatacgcgagcaacagctcacaactaaggaacgcgattttgagaatgccttacgtccgctgaattttgaagatttcagcgggcaggataaggtagtggataatctgcgcatctttgtcaaggcggcgcgtctgcgggccgaggcgttagaccatgttcttttgcacggacctcccggcttgggcaagacgaccttaagtaatatcattgccaatgaactgggagtaggttttaaagtgacctcaggaccggtgctggataaaccgggtgatttggcgggagtactgaccagcctggaacccaatgatgtgctttttattgatgaaatacatcggttgagccctgtggtagaagaatatctgtattctgccatggaggattatcgtatcgatataatgatagacaagggaccttcggcgcgtagtatccagttggagttgagcccgtttactttggttggagccactacccggagtgggttgctgactgcgcctttgcgtgcccgttttggaattaatcttcatttggagtattatgacgatgatgtattaacaagcattatccgtcgttctgctactatattgaatgtgccttgtgacgtgaaagcggcgggtgagattgcttcgcgcagccgtggaacgccccgtattgcaaatgcgctgttgaggcgcgtccgtgattttgcccaggtgaaaggttccggaaggattgatgtggaaattgcccggtttgctttagaagccttgaacattgacaggtatggactggatgagatagataacaagattttatgtactattatagataagtttaagggaggccctgtggggctgactactattgcaaccgctttgggtgaagacgccggaacaatagaggaggtttatgaaccttttttgattaaagaaggtttcttaaaacgtactccgcgtggacgtgaggtcacggaactggcctatatgcacctgggacggagcatttataatagtcagaagacattatttgatgattaaaagatggcaggattaaaagcattagccaaggaaacagccatatatgggatgagtagtatcatcgggcggttcctgaattatttgttagtaccgatatataccaacgctttgcctgtggaatcggggggctatggtatcattaccaatatgtatgctataactgccttgctgatggtgcttttaacatatggtatggaaaccggatttttccggtttgccaataagggggtggatgatccgatgcgcgtctattccactactttgctttcggtaggggcgactgcgctcttgtttttaatcgtttgtctttcttttctgcatcccatagcaggtttcttgggatatggagagcatccgtggtatatggggatgatgctgattgtagtcgcaatggacgctttccaagctattccttttgcttatttgcgatataagaaacgccctgttaagttcgctgcattgaaattgttgttcatttttgccagcattgccttgaatatcgcttattttgtaggtatgaaaggagagaatgtcggagtggcttttgctataaatctggcttgtacttctttggtgatgctgtgtatgtggaaagaattggtgggcttcaggtatgtgctggacagggagttgttgcggcgtatgctgcattattctttcccgatattgattctgggtattgccggaatcttaaatcaggtagccgataaaattatttttccgtttgtttatcctgataaggcggaggcgaccatccagttgggtatttatggggctgccagtaaaatagctatgataatggccatgctgacacaggctttccggtttgcatacgagccgtttgtttttagtaagagtaaagaaaaggatagtcgggaaatgtatgccaaagcgatgaagtttttcattatcttcactttgctggcctttttggctgttatgttttaccttgatatattgcgttatattttaggacgtgattattgggtagggcttaaagttgtacctattgtcatggctgccgaaatgtttatgggtatttatttcaatctttctttttggtataagctgattgatgaaacaaaatggggagcttatttttcattggtgggatgcagtatcattatcctgataaatattttccttattccggtatttggctatatggcgtgtgcgtgggcaggttttgccggatatggagtagctatgcttctctcttattttgtagggcagaaaaaatatcctattaattatgatttgaaagcgataggtaactatgtggcgttagcgctggtactttacattgtttcagtttatcttcctattcaaaatatattcttgttgttgggtgttcgtacattactgttgttattgtttgtggcatatattgtgaaaacggacttccccttgcagcagatacctgttataaaccgatacataaagaaatagctatgagtgacctgaagaatgatttgaagaatgtgccttatataaagcagttctttggtgaatatcttgatttgcgcaaggataaggataatgaagccttgattgtagaaagtattcgtaacggtgttgagttcaaaggaactaatttgtggattcttatattcgcaatttttattgcttcattgggcttgaatgtgaattctacggcagtgattatcggtgctatgttgatatctccgctgatggggccgattatgggagtggggctggctatcggacagaatgattttgaactgttgaaacgttctctgaaaagttatttggtggcgactgtatttagtgtgattacatccacgatttatttttcgctgactccgttggatgaagtgcaatcggagttgctggcacgtacttctcctactatatatgatgtgcttatagctttatgcggtggcttggccggtattatcgccttgtctacaaaggagaaggggaatgttattccgggggtagctattgctacggctttgatgccgcctttgtgtactgccggattcgggcttgctaccggaaatttactttattttttaggtgcgttctatttgtattttatcaattcagtatttatcagtctggctacttttatcggggtgcgtgtcatgcatttccaacgtaaggagtttgtggataaggagcgtgagaaattggtaaagaaatatattatttttattactttggctacgatgtgtcctgctgtttatctgacttatggcattgtaaaaagtactatttatgaagcttctgccaacaactttatcaacgaggagctgaattttaataatacccaagtaatagaccggaagatttctttcgagaagaaggaaatacgtgttgtgctaataggcaatgaggtttcggaaacagaaatagcaaccgcaagggataacttgaaactttttaatctggcaggaaccaaactggttgttcttcaaggaatgaataatgatgcgatggatattggcagtataaaggcgcaagtgatggaggacttttataagaatagtgagaaacgtttgctggagcagcaggaaaagattaagtctttggaaaacgaacttaatgtatatgccgcatacaataccgtagataaaaagataattcccgaacttaaagtactttatcctgcagcagaagctatagccatggcgaagactgtggaattgcaggtagactcaacccaaacggacacattgacaatagtcttgatgaaattcagtaaaaaacctgtaggaaaagaacaggaaaagatttccgaatggttgaaggcacgtgtcggggcgaaaaaacttaaattaattgtagaataaaaccatgaaaaaactactattgctgctgtctttcctgcctttatgtatatggggtaatgagggaatgtggcttccttgttgccttagcaaacaaactcaacaagtgatgaaagaaatgggattggaactttcatctgaacaattgtataatcccggaggaaaagcattggctaatgctgttgttagttttggaggtttttgctcgggggttgttgtatctccggatggcttggtttttactaaccaccattgtgggtatgatgccattcagcagcatagttctgtggagcatgattatttgcgagatggttttgtagccgactccttaagtaaggagcttcctaatccggatttatttgtcagtttcctgatacgcacagaggatgtgacggagcgtgtgttgcaagctattccagtcgggacaaaggaaaatgaccgtgcgctgattgtggattctatttccacattgcttgctcaggaagctgtggcgaatgatacgttgctgcgtgctgagataactcctttttatggtggtaatgagttttatctgtctgtgtataaagattattatgatgttcgtctggtgtttgctcctccctcttctgtaggcaagtttggcggggatacagataattgggtatggccccgccataccggggatttctctgtttttcgtatttatgctgatcagaataatcaaccggcagcttattctccggagaatgtgccttatcatccggattattttgctcctgtttctttgggcgggtatgaacaaggttcattttgcatgactatgggatatcccggttctaccagcaggtatttgtcttcatttgggatagacgaaaggattaatacggataatgccgctatgattaatgtccgtaccatcaagcaggctatctggaaaaatgcaatggaaaaaagtgatgatatccgcattaaatatgcttccaagtatgcacaaagctctaactattggaagaatagtataggcatgaatcaagcggtaaaagagttgaaagtgatagagaaaaaacaagctttggagcgccagttgcaagaatggatccgtcgggaacctgataagcgaagcaaatatgcaagggttctgactgaactggagctgaattatcgtaatcgtagaaatgcggcgcgggctatggcatattttggagaaacatttgctaatggaccggagttgattacggcagccttggctgtactgaattttgattttgaggcagaggagagtgatttggagcgtaatatgcggcaattgttggagatttatgccaatatggatataagtgtggataaacaagtctttgtggctatgttgaaagaatatgcggctgaggtaggcaaggagtttttacctgatgtttatccattgatagagaaagattttaaaggtgattaccaagcttatgtagatgatttgtatgctcgttcctctttaaagacaccgcatgggtttgaacaggtggtgaagggagataccacttatgtcttgtttgatgaccctgcggcttcttttgctattgatatgttggtgaaattttatgaattcaatcagtcggtggaagaagctagtatgaatattgagaaaaatgaacgtttgctgaatgaagcaatgcgtgagatggaggcagatagggtgttttatccggatgctaattctactatgcgtctgagttttggcatggtgggtggttactcaccgaaagatgctattgaatattcttactttacgacgacaaaaggtatttttgacaagataaggcagtataagggagatagtgatttcgatgtgcttccttctgtagtcgaatgcttgagaaggaaggatttcggacgttatgctaccggagatggtaatatgaatgtttgctttatttcggataatgatattacgggagggaattccggtagtggaatgtttaatggaaaaggggaattaataggtcttgcttttgacgggaattgggaagcaatgagtggagatattgtttttgaacctaatttgcagcgttgtatcggggtggatatccgctatgttctttacatgattgaaaaatatgggaaagcttcccgtttggtcgatgaactgaaattgacagactaaaagaaaaatatgaaatgacaggaagcttgggtatgtcaaagttccgatagtttgtcatataatctttcatccggaaagatggcaaaaaaactgttaatattaattcgatgtaaacaaggatattcggcaaatctttttttgaataatacgataaatccaactgattcattatgagtcagttggatttatcgtattatttgcggaatgtccttgaaatgacaggttgtttcaattctgcctgctccgctattattcgagagaagtggatgttatttgcatatttctactatgctcaattctctttcatgaagttggcttcctcatttcttggatttctttttcttattgttatcgctgttaaagaattgtttccagtcgtctttcgttttgggaccgcgttcttcaatgtagccacgttccgcacggctgggtcttccttcttttgaggtcgtttttttattggacctgtcactttttttgccgaatgaagcattccttgctgcactgcttctgcgttcgccattgtcgtttttgccattattgtcaccggcaacttctactacaattttccggccgccattcagattaaccttgttcaatgctttaatcacgtcctgtgcctgattttctgctacttcgaagaaagagaaattctgcatcaggtctattcgtccgatggtagtacgttgcttcttcatgttgcggttaatcagttctatgatttggttggcatagaaaccgtctgtctttcctacattcaggaatagacgggtgtatcctttttctgctttacgctctgtcttttcacgagcactgccatgatccttgcgttctttggagccacgttcgctgcgacggtcatttgtgctgggaatttctatttccggagcgttactatagtattccaagaagcggttaaattccattgacaccacgcgctttatcagatcttcctttgaaagccattccagtttacgatagattccgggtaggaaggattcaatttcttcatcgtttacttttaccttttctatgtcatctatcaatttaatcaattgctgctcgcaaatttgtttaccactgggcatctcacccatgataaattttttgttgatgattcgttctatctcacgcatcttgcctttttcgcgcaggttgatgatggcaatagaaatacctgtttttccggcacgtcctgtacgaccactacgatgagtatagctttctatatcatcgggcaagccataattaatgacatgagtaaggtcatttacatctaggccacgggctgctacgtcggtagcaactaaaagctgtaaatggcgttggcggaatttttgcatcactaagtcgcgctgggcttgtgagagctcaccgtgcaaagagtctgcgttataaccgtcttgtattaatttatctgcaatttcctgagtttctttacgggtacgacagaaaatgatgccataaatctgtggataataatccgcgatacgtttcaatgcggcatatttgtctttagcgtgtactaaataggctatgtgattgacgtttttactgccctcatttttggtaccgatagtgatttcttttgcgtcatgcagatattttttggcgatgcgtgagatttccggactcatggtagccgagaacatcaaggtattccgatcttcaggaactttttcaaggatagcatttatgctatcagtaaatcccatattcagcatttcatcggcttcgtccattactacatctgtaattgtttctagtttggcaacctttctttctattagatcaatcagtcgtccgggagtagccacaataatatgtacgcctgttttcaacatgcgtatttggctttcgatggatgaaccaccatatacgggaaggattttcagcccgtcaatgtacttggagtaatcgttcagatcgcctgcaatctgcaagcacaattcgcgtgtggggcataaaattagtgcttgaggtgcacggtgttttacgtcaactttttggataagcggcagaccaaatgcggctgtttttccagtccctgtttgtgctagggctactacatcgttgccgtttcccaataaatacggtattacttcttcttgtaccggcatgggattctcatatcccatttctttaatcgcttttagtatttccggggaaacgcctaactcttcaaatgtcttcatttattttcaaatatctaattcgctgcaaagatacggataatcatgggattatatggtgcttatgcaatatttgtttttatcagtagtgtatttttagggaatattggctaaagcgtgtcgggaagtgataagaaaattttaggtataaggtgaaaatactctgccggtatggcaattgaaatgctttatcggtcagagtatccggattaaagatatgagaattttatggtatcagagtgtttgtatatgtggctgtttatattattcaccttcttctctatattctaaaatatctccgggctggcaatttagttccctgcaaatagcctcaagggtagagaaacggatggctttcgctttcccggttttcaatatggaaaggttagcaggagtcaggtctatcttctcggctaaatctcccagcgaaatttttcgtttcgccatcattacgtctaaatttactataattggcatagatcaattcattttgggtttattcgggttctcatctactgcgcgccaccaaagggtgtggcgttgcgtcagtttcttaaaggcatacagacagaagcaagtccatccaatgttgatcgatatcctcactattttgttgtccaacaatggatgtaacacaaggaaatagatgaatgaacttacaaacagagtagctatcaggcaaagtatcaaataaaagatgctttttctttttgaggggaaagtatttttttctttcatggtatttttcttaaatggttaaatcctgttcttctttcatttttgccccgatagcaaatatctcggcaaaaagaatgggaattatcacagctacccagtcgggagaataaccggcgtagctgatgattttgtagcccggcagactgatttgctcaactgctgcgtttcctacaatccattcgtcaacagctatgaggatttccaagcttgcactggtgtatgcaaaccaacggaggcgccgtacattggcagatgtaaatacttcgcggcgtgagatggaaatgagcaaccggatcaatgagcagaaaccgatgagaaaaaggaatattccgggtatggcaagtcccatgacaaggatgtgccaggccgatggcttggcatacgtttctatttcagtcactgtgtaggggagtgtccagtccacgcggttgttgctcagtgaatcgacagtagtttcaggtaacggctctacattcagtttgactgaggttgcatgatggggtataatgtggcgtccaggctcatatatttccattgtactgttatgtccatcttcaaatcctttcttgaaatctctccaattttcatccaatcctccaaagaagtttgcaatgatggctataatggctatgacacctaatattctgaacttgttcatagtctgctctgtttttttaaatggttaaatcttgttcttctttcatcttcagtccgatggcaaatacttcggctaccagcaatgaaatgaatcccagaatgagagtcgcatcggaaaaagcaaaggtataggagaactcgcatccgttgagttgcaacacttgcgaagcttcataatttccaatcacgatggtagccagcgtgcagataaacaaaagtatcaatgcccatcctaacttgcgcagaaacttcacattcttccagctgaagatatcaccgcgattgatatttctgatcaaataaaagaactgcaacaggcagaaaattcccgctatcaccgaaatgaatgaggcaatcctgtttagtgcatggaaggtatcattttctttcgttggcgcctctaccatgcttataatcggtatgatagatgcctgttctcctgtcctgacattggttacacttcctgtcttttcaagtagatcggtaggaagggtgcaaatcatcttataatcggaaatgtggatatcctttcctttttctacactttcgtatccggctttaaaggcacttgtgaaagaatggaacatgatgctcactgtcgttgaggtggaaaggagcaaggcgataagtacgcagacgcaaaagaggttgagttttgttttcattgttacatttatgcttgtgtgttagtaatttcagagggtgttcccggctgtggcaaatgtttgttcagatagaaatacatgccgactaggatgattatggcggctgctaaaaggatgtaagtaggtgtggcgccaatcatatcaaccgttttttcattcaactcttcttgggttgatgtagccatggcaatggtagccagggagttatttagaaaatgccctatcattcccggtataatgcttcctgtgcggtaataaagccatccgaataccaatcccagacagaaggcgaaaggtacttgcgccggattgacatggatgagaccgaaaatgagtgctgacaggaggattgccataccgggtctttttccggtttgcaggaaatgcccttcaatggctccacggaacagcaactcttctaccagaggtgccatgacggcaatggcgatgatgccgaatacattgcggctcattcctatgaatgtgtcttccactaggttgggcagttctatgaattcgctggctacattgcagatgaacatggctgctataatgaagggaatactcaataaaatggtttttgcaggtacttcagtccagcttgtcttgttgaattgaacgtatttaaagtagatcaggtgccagatcatggctattcctgccagtaccataacgagtcctgtcatagaggctgtattcttacctgcggcataagccagattatcattttctgaaatttcgttcatcactttaataattcccgccggaagtcctaccaggaaggtgaaagctaactgataggcgaagtaataaagtactaatttaattgcgcgtcccataatagaatgtttattggtttaaaatggatttgaattaaggggtaggacggacttccgcatccgtcctgagggtatctgtttctttaagtaagcatccttgggtttctccttggtgcgatcaaaatcatggttgttttcatctggttgtcttttaaatttggttgatttgtttttagttcatcaagtgagcaatggcatgtttgcatggaacgtaccaatggttcatgaataggataagaaatgctaaaataaggataattgcgcttttttgttgtgctctttgggccagtggggtgttgacaggaatcttggtcaggaccagtcttcccaaagctattcccaaaagcatacccaagcctaatcctatttgcggatataaaaatccgaccatcattcctatgtacattcctatggtttgccacaggctggtcgcattcttattttgggtttgtgtttcattcaaagtttccattactttttgttttgtgtgtcggccaacaagtttgcgttgttgccttcacggtaaatactttcttgtttgttatggttgaaagtgctctctttggcgttccattcagcgtagttgagtttgatttcatagactccgggagttacggtaagcagataggccggcttccacagttcccggtaagcatcccagcgataagcttttttctcaattacctgaccattttcatcgtgtttgtactcatacttcagtttgcgtgtcaatgttttgccgtcttcattcagtgtgtacacggttgtgtttgtgtcattctgaccgtagatgtactttgtgtttcctgtttgtgcgtttgctgttgttgtacaactcatcattactactgcaattgctgctaaaactgattttaatactgactttttcatttttacttcgtgttttaatgtttatgtttattctttcttgtttctcgatattcatttatcgtttatcgatatgcaaatgtatatcttattttgatactacaaaagaaaaacgaaaaaaaaatatcgaaaaacgataaaaatatatcttttttcgtgctttgtaggatggaagtgtatgaagaaacagattttatgcaagaagtgactggtatcggtgaattaattcttccgatagcgtttgcgttcactggcaggggcgattttgtctgccctaatacatggaatgaactgttttcgagcaggcaaaactgactgtaaacgaagatgtgtagaaagagtagtttgaaagggggaaggctgtacaatgctcccttgtatttagagaagaattctggccgttttttcccggtctttatgcatttgggcaatgagtgcatctatagtgtcatatttttcttcagggcgaagatactttacgaactcaatgcgcatttctttgtggtagatattctccgaaaaattgaggatgttcacttcaatacttaaattgttgccgttattgatagtagggcggtgtcctatgttcaacattcctgcccatttttttccttccacatatacatatactgcataaactccttccgagggaattaacttgtcgctacaatccacttgcaggttagctgtagggaatcctatttttctgcctactttgtagccatctaccactgttccatccagatagtagttataccccaggaatttggcagcctgacttacttcaccttcttttaatagttggcggatgactgaagagctgattttgccctctttgtctgtgtaagctcgcgcgcgtactatatatatgttcagttcctcaccataacggcaataatcttcaaaattttcactgcggttgtgaccgaaacgatggtcgtagcctataactaatgtatggatattgaacttgttacgtagcaactgcataaactctcgagccgaaaacagtgaaagttcctgtgtaaaagggagaagaaagcagtaatctacttgcatcgtttccaataattcgagtttctctgttggtgaagaaagtaattgcggacgataagcggtttgtatcacttgtctgggatgtacaggaaaagtgatcaatgcagaatataacccatccttggcagcgacctcttttacttgattaataagaaagcggtgtccgcgatgcactccatcgaagaagccgatagtggcaactgaaggaggcaatgtttgatggtttatatctgatattattttcattattcaaaaagtgaacttaaatcttctccaatatggtaatgataggactgtatgccaagcgatattgctgcctggcaattgattgccgagtcatctataaaaaacgtttcttcgggcaagatgtttgcttctttcatcatttgctcataaatgtctttttccggtttggccttgtgcatttcaaaagacagaaaaatatcttcaaaaaagtcatttacacggaatccccgataacagaacatttgctcacaggcataatcccaatgtatccggttggtattactaagcaggtaaaccatataatgttcgcgtaactttagcaataagtccagcttttcacgaggaatatcaagtagcatcaggttccacatatcatcaatttcatggtcggacagggcttcgctgacctccttacgaatggctttccggaattcttccgggctgatttcacccaattcaaattgggaaaagaaaccttttcccctgaactggcatgcctgtttctctatatctcgaaatcctgctttacgaaaagcattcaggcaattgtcaaaatccagatttattaatactcctcctaaatcaaaaacgacatttttaatcttactgtccataactctttatgtgctttattctcttttttagtcttttttctgtattcgttttatccaacggtagatttcaccaatccacaatacgaatgacgttcctgcgataatataaacccaagtcatgaaattcataggttcggtacggaacactttacctccgaactcgacaatcagaatttgtccgactaaaataatgatagccacacttagcatgcctaatgcatgacgggaatccttgaatacagaatggttggtcccgaaaacactggcattaaatagattccagaattgcagcatcacgaagatcgtgaagaattgcgtcaaagcttgtcctactaaatttgctggcatctgtttgataatgacaattaatgtcatcagtatggcaaggaagcagaagcctacacctagtatatttttacgcatggctttagtgatgatgaaatcatcggtcttgcgtggcttttcattcatgacgtctgcactggggggaatagatgctaaggccatggcggcaaaagtgtccataataagatttacccaaagcatttgtgttacggtcagtggtagttctgtaccaaagaaagcccctaataaaacactggctaatgcgactacgttgatagtcagctggaatacgatgaaacgctgaatgtttttgtaaagagagcgtccccacattactgcggtagcgatactgtggaacgagtcatccaatagggttatgtcacttgcttccttggctactgacgtaccggttcccatagaaagacctacttgagcgtgattcagtgcaggagcatcgtttgttccgtctccggttactgctactacggctcctttttgctgtaacagttggaccagacgttgcttgtccataggacgcgcacgactcattactttcaagtcaagtacgcggtccagagcttcttcatcgcttaatgcagcaaactctacccctgttatgcggttccggtctgtatcttcaggtttccatagccctatttggcgggcaatttcggtagctgttcccggggtgtcgcctgtaacaattttcacaccgatacctgccgactgacatttctgtacggcttccggtacatccggacgaatagggtcgctgatagctacgatacctaggaaaatcatattcccttcattgactagttcggcacaatcgttaccggagtcttcggggataaatttataagctaatcctaaagtacgcattgccttgttctgataggccagcagatcggcattgtaatgagcctgttcttcggaagagaggttgcattttctcattacaatttcgggagctccttttatatagagtacctttttctgctggataggtgaatctactaatgtagccatatacttacgttctgtagagaaagtaagttgattgataacttttgcattttcacgtaattccaaatagttcttgccctgttcattcagccaaagcaataaggctatttcagtaggattacctactccggatggtttcttgttttctcctgtttcttcaaggaaagctgtggagttggcactgatcccttcagctattaaatctgctttggtggcatcaagtttcgcttcatgtacctgcatcaggttttgtgtcaatgtacctgttttgtcggtgcagatcacagtaatggcccccattgtttcacaagcatgcattttacgtaccagattattggttttcagcatacggcgcatatttagtgcaagacttaaggtgacactcatcggtaagccttcaggaacggctactacaattaaagtgacagccatcatgaaatatttcaatacaatgcgggctattgccatccacccatgccagtctgttatttcatttacgctgaggtaggagtaaaggtctttagttgtgaaaacgataaaggtaagcgtggcaatggtaaaacctatttttccgatgaaacccgccaattttgtcaattggatattcaatggagtctcttcttcactttgttcggtggcctgacgtgctaccttacctatttcggtggaatcacccacacgttctaccttcattattccatgtccgtcaactactgtggtaccacgcatcacttcattgctgggataagtggcttcttcatcaaatagttcttcatggatggttttattgaccattaattctcctgtcaagttggattcattcacttgcagggaaatagcttccagtaagattccgtcggcaggaatctcctcaccggtattcagaactacgatatcacctactacaatctccttacggggaatttcccgtactttcccatttctgattactgtaactggtgtttcttcgcctacagcgttcagtaagtcaaacttcttattcgcatcgtattcaaagtagaatccgataccggttgccagaaaaatagcaaagaaaatgccgattgtttccgcatactcattttcaataatggcaatcactaaggaaaagaatgctgcgactaaaagaatacgtataaccgggtcgcggaacttttccagataaagtttccacatggaaggacgtttgggaggtgtcaagaggttattcccatacttctctctactgataaggacttctttgtccgaaagccctgttagggctgtttcctgttttttttgtgccatacggcttagcaaaattaattaatggtgcacaaaaatacaatttatatccttacgaataagggaattaaatctttttatcaaaatttgggcgataaatcttgcaagtttcaagggaatatactacttttgcacctgctaacaggaaattgtggcacggacttgtagctcagttggttagagcaacagactcataatctggaggtccctggttcaagcccaggctggtccacaaactaaaaggctcatctctaacgagatagagccttttttgtttgcataccctccagatataaatctgttgctcttggttgattta

SEQ ID NO: 3880 - DNA, 72964 bp, Unknown
  gut microbiota DNA sequence
gaagcaactgccctggagctccctatgatggagcagaagctgccgaatatgcacagcgcgctaaagatgtgaacagtaaatgtgctgtagcctatctgctgagtggtgatgtggcattgaaactaaatgatgtgaacaaagccagcagtgattataaccaggctatttatctggatgaaaattgcagcgaagcttattttaaatatgcacaggtatataaaggggtagacccccaactgtcactggatatgctgatgcgtttgcagaccaagactccggacgataaccgtatcagtaaggaattggccgatgtatattatacgatggggcagtatggcaaagcaaaagaagcttatgaaagttatctgaaagtaggtacgcctaccgaacaggactatacccgctatgccatgttgctatatctgaataaggactatgcgcagtcttcggatatggcaaagaaaggtttggaacttgctccggaaaatcatgtgctgaaacgtctggcgatgtatgataatctggaattaaaggattacaaagaaggactggaagcagctgccactttcttttctaatcccggtaatccggattatgtatatttggattacgtttatttcgcccgtttgctggaagctgacaagcagtatgatgaagcggtggcacagttcgacaaagcactgtccatggacaaatcgcatacggaaatctataaagatatctctgatgtatacgaaaaggaacgtgattttccgaaggcaatagaggcttacaaaaattatttgggcggaatgaaaagtgatccggatattagtgacctgtttttatatggacgtttgaactattatgcggctactgattctgcttatcaggataagcaaccactttatctagctgaagccgatactatttttgcacaagtggctgctaaagttcccgataactatttaggaaatttctggcgtgctcgtgttaattctttgcgtgatcctgaaacaactcagggattggcaaagccttattatgaggctgcactgagtattctggaacagaagcctgattctattaaatcagtgttggtggaatgtaatagctatttgggatattattattttgtaaaagaagattataaccagtcaaaactgtattggaataagatattggaaattgatcctggaaacgaaactgctactaaagcactacaaggaattaaatagtcctttttttcatttatcattttgagttgagcggacagtactaggttgctgcccgcttaattcgtttcatggttaatgaatattaaagatgagtcattcttcttgtttattcaaataaactatatacatttgtggtgtactaattaactaatacactaaataactaataaaaccataaatacaatgatgattgaagtaaagaacatgtctttcagttatggaaagagaaaacagaaagtctttgatgacttctcgctggcattggataaaggttcagtttatggtcttttagggaagaacggcacaggtaaatctactttgctctatttaatgacaggtttgcttcgtcctcaggccggacgggtgctttacaaaggggtggatgtttccatgcgctatcccctgactttgcaggacatgtttctagtgcctgaagaatttgctttgccatcagtcagtttgaaacaatacttgaaactgaatactccgttttatccgaatttcagcaatgaactcttgagcacttgccttcgtgattttgatatgaatgaagatattcatttgggcgagctttcgatgggacagaagaagaaagcatttatgtgctttgcattagctaccaatacctctttgttggtaatggacgagcccagcaacggattggatattccttctaaaagtcagtttcgtaaagtaatcgcttcgggcatgaccgatgaaaaatcagtcatcatctctacgcaccaggtgagagatattgacagcctgctggatcatgtggttattattgacggtactcgcgtattgttgaatgcatcggtaaagaccatctgtgacaaagtctattttgcagagcaaggcatgaatgaaccgacggacacagcactctatgtccagccgtccgtccagggaaacagtgtaatcttcccgaacactgagaatgaggagacgaatttgaatctggaagtattattcaacgctatgctggcagagagagaaaaaatgcaaaccatgtttaacaagtaacacacacaaacactatggatacgaataacttctttagcttttcgcgtattgcaatggtaatgaaacgcgagattatggaaaattggaaaacgaatctttatcgtttgataggaatttatgctgcattcgccttggtaatgatacttcatatgtggacaatgagttctggtaggtcttctcagatatcgtttactgcttattgttctaatataatggggacctttgtttttatcattggtattgccagtattgcttatgctgccaacattatggaaaacatgattaccaaagaaaaacgcatcgcttttctgatgcttccggcaaccatgatagagaaatttgtggcacggttcttaattgttacggtaggactggcggtggctgtctttgttgcggcgtcattggcggaaattacccgttatctgttactccctttatttaatgtacctgaaacattccatcaatctgttttatataaccttctttccatggcttcggtagatggtgagcagatatataggggatcaggctatgctatgaatatgccgtaccagaattggttgggtgagctgtgcggatgggctttcttggtgtggtcacattcactttatattctaggaggtagttattggtacaagaaaccttttttcaagacattgggtacattgatgcttatttctattctgtgttcggtcttgtcagtacatatcatatcatgggtaggcaatgacggtatgcgtagtttcgccgaatggctggaagctaattcccagtggatgacattaaacaagttactttccttaggagtggcgttcttcagtgcattcaccatgttcaactggtggctgagttaccggctctttacccgttcacaagttattaaacccaaattccgcttgctatgaaatttaaagaaagtaaatccatttacttgcagatagctgaccggatatgtgatgaaatcctgcaaggacaatatatggaagaagagcgtattccatcggtcagagaatacgccgccacagtggaggtgaatgcaaatacggtggtccgcacgtatgattaccttcagggacaagagattatttacaataaacgcggcattggttattttgtatcggcaggggctaaagaccggattattgctttacggaaaaatatattcctgcatgaggacctgcctgagtttttcagacaagtgaagacattggatattcccatgaaagagatagagaaaatgtataaggaatatctgactcaacaatgacacaacaccaaacacatctacgacaacacatacacaacatcggttagataaagaaatcccggcagagcgatgactcgccgggatttcttatatccggttacttgtctgctataaaaattgtagtccagtataaccattcggttgcagctcggaggatatcgggattgatagattgggtgttatctttgggatgatggtaataaccgcctcccaaggcccataagtctatacatggatagccggctttcataaagactgcaccgtctgtgcgagggcgggtcaggaaatgagtctcactagtgaacagacgtcgatgtacatacctatcattggctttctctgatagctcagccagttcggggtatttatagtgataattcgctcctagcatctcacctacacccacttgttccagattcaggattgctgccactttgttttggggcacaaggggatggttggtgtagtaggtacttccggtaagtccggcttcctcaccgtccacactcatgaagatgatgctgcgtttcggctttatttttgattttgccagtgcttcagctactcccagcatggcagcggaggaagaattgttgtcattcgctccttcaatcaggaaaggaatcattcctaagtggtccagatgggcggaaatgattacatattcattgcatagtataggatcactgcctttgatcatgcccaaaatattttttccagtagcattgggattataggtagcattcattttgatgtgggctctctttccggtatggaaagaggcaggcttctgagtcttataaatctgccggatggtttctttataggtcttgcctgttcccctgaaaatatcattgaccacagtgtctgtaacatgacaatagacaaatcccggattatagggggcattcggaccgggaacccatttgtataacaagcctgccgcaccatgggctgcagcgttgttcagcttggtctggtgcaaagtatgtttgtaccacatggccagtgaatcggggttacggcttatattgggtgtttctccctctaccagtacaatcttgccttttacatctatgtctttgtaatcatcatatcctaattcgggtgctgtaacgccaaatccggcatataccacatcggctgtcacttctccgttactggtcattcctccggcaaaccaaccatctgcccaagggtatgtcttggagatccatacagtttttttcttgtcttgggtgacaggaaataggatatccatagtgcttcccggttgtatctctacacaagggtgggggaatagctgtatgtaggaaccattctcaccacgaggtattagtttccactctttaaaatatccttttacgatatctacagctttagccattccgggcgaacctgcgagtcgtccctccaaggccgggtctgaaagttgctttacataaccgaaaatcttttcggtagtgatgttacgatgcatggcatcaaggtacatttcttcatcagtcatggtagccgttcttctttgggcggatgaagacagggagcccaatgcaagaattgcagataacaagaggagtccttttttcatgttaatatgttgatttaagattcggttctaaagataaaaagaaaagatcagattcctgtttatctccttgtaaaaatcttaagttcgtatttcttgatataaatcaaaccgttacatcgtgaaaagtccgtacctttgcaccccgaaaatcaagggtaacaagtggacgtaattcaagaaccgagaagtgtacgaaagaaccttgccagactggcggttcctattttcattgaaacattgctgattatgatgctgggcgcggtagataccgtgatgctgagtcagtattcagacaatagtgtggctgccgtcggggtggtcaaccagctcatcatgtttgctttcctgatattcgaggtgattaatataggaacttccgtactctgttcgcaatatttgggagcaagaatgcacaagaatatggtgcaggtggtgggagtatcattgatactcaatttggcgttcggtctgtttgtcagtgccattttgcactatggagccacttctctgctatctatgatgggacttcgtcccgaactgatggaatatggagtgagttacatgaagatagtaggggcattcgctttttttcaagccatatctctgactatttctgcctctttgcgtagtgctaacaaagcggtttatcccatgatggtaacggtagttgtgaatattctgaatatcatcggtaactattcgctgattttcggtaagttcggcatgccggctttgggagtggaaggtgcggctatctctacagcatttgcccgaggggtatctatggtgatactttttgtaattcttttccgcaagcatattcccagatttccgttatcctatttttgccccttcccgtttgtcgagctgaaaaacctgttgaaaatcggagtcccctcggccggagaaaatatgtcctacagtttctctcaggtagtattgacctattttattaatatgttggggaatgaagcgctggctacccgtacctatgtggtgaatatagtgatgttcgtttatttgtttgctattgccatggcacaaggcggagccatctgtatcggacatctggtaggtgaaaggaaaattcatgcagcctatctgttaggcaaatatgtgatgcgtatttctattttggtttctttggttttatcctgtatctgggctttgatggggcataccttgtttagctggttgacagataatccggaaattatccgtctgggtactattatcctgtttattgatgtgattttggaagtgggacgggctattaatatttatgcgacgaatgctttacgtgcaacgggtgatgtaaattatccgttttatgtaggatttgttgttcagtggagtgttgccgtaggttgtggtttcttgttcggcattcattggggatggggattggtaggtatgtggtgtgcgtttgtgctggatgaaaatcttcgtggtattatctttgtacagcgttggaacagtctgaaatggactaaaaagggatttgtgaaataaatcttcattttcgcaaactttatgcatcttcaggccgttaaactcaagaaaaagaattaattttgcagtctgataattatcaaagaatataatatggagctcgatttactcacggcaatatcacctattgacggtcgatacagaggaaaagcgggagctttggcctcttatttttctgaatttgcactcatcaagtaccgtgtgcaggtagaaattgaatactttatcactctgtgtgaactaccgttgccacagctgaaaagctttgatcatgcacgttttgatgcattgcgcgctatttataagaatttttcagaagctgatgcacagcgtattaaagagatagaaagtgtaacaaaccacgatgtaaaggctgtagaatatttcatcaaagaagaattcgataagttgggcggaatggaggaatacaaggaattcattcatttcggattgacatcacaggacataaacaatacttctgtacctttgtctataaaggaggcattggaacaagtgtactatccgcaaattgaagagctgattgctcagttgactacatacgctgaagaatgggcaaatatccctatgttggcaaaaacacatgggcagcctgcttctcctactcgcctgggtaaagaaatcatggttttcgtttatcgtctgaatcgtcagctggctgtattgaaagcttgtcctgtcacggctaaattcggtggtgcgacgggtaattacaatgcacatcatgtagcttatcccgaatatgactggaaagcattcggaaatcagttcgtggcagagaagctggggttggaacgtgaggaatatactactcagatttctaattatgataatctgggagccatctttgatgccatgaagcgcatcaataccattatgattgacatgaaccgcgacttttggcagtacatctctatggagtacttcaaacagaagattaaagcgggcgaagtcggttccagcgctatgccgcacaaagtaaaccccatcgacttcgaaaatgcagagggtaacctggggatggcaaatgctattctggagcatctttcttctaagttgcctgtttcccgcttgcaacgtgacttgacagactctactgtgttgcgtaacgtcggtgtacctttcggtcacattgtgattgctatccaaagttcgttgaaaggtctgcgtaaactgttgctgaatgagaaagcaatctatgccgacttggataattgttggagtgtggtggcggaagctatccagactattttgcgccgcgaagcctatcctcatccgtatgaggcattgaaagctttgacccgtacaaaccaagctatcacagaaggggctattaaagaattcatagaaacactaaatgtaagcgaagatattaaaaaggaactgcgagtgattacaccgcataattatacaggtatttaaaaaatagttagttggattttaatcaaaaaagcccgagagggcgttatacattaattaataaacaaaaggaaaaccatgagtacagaaaatgaaagcagacaagaaggtgctgcaaacgaagaaaaccagaatgtaagccgtgatggtggttataagtcttataacagagacagtaattacaacagatacaacaacgacggcgaacagcgtccttaccgtcctcgtacgaacagctataatcgcgaaggtggcgaccgtccttaccgttcttcttataacaacggtgaccgtccttcctataatcgctataataataatggtgaccgtccgcaacgtccccgctttaatcctaacagtgaggatggaggagaacaacgttcataccgtcctcgtacaaattataatcgtgaaggtggtgagcagcgtccatatactccgcgccctcgtttcaataatggtgaggaaggtggtgaacgtcaataccgtccccgtacaaactataatcgcgaaggtggtgagcagcgtccttatactccgcgtccccgcaccggaggatataatcgcgaaggtggtgagcagcgtccatatactccgcgtccccgttttaacagcggtgaaggtggtgaacagcgttcttacactccgcgtcctcgtaccggcggttataatcaaggcggcgaccgtccttatcgtcctcgtaccggtggttatcaaggtggtggatacaatcgtccctatcgcccccgtacggctgattataacccgaatgcaaagtatagtctgaagaaacagattgaatataaagatatattgaccgatccaaatgagccgattcgtctgaacaagttcttggctaatgcaggtatatgttcccgtcgtgaggctgatgagtttattacagcaggtgtagtcagtgtaaatggtgaagtggtaaccgaattaggtactaagatcaagcgtactgacgaagtgaagttccatgacgaaccggtaagtattgaacgtaaaacttatattttgttgaataaaccgaaggattgtgtgactacttctgatgatcctcaggaacgtaagactgtaatggattttgtgaaaggtgcttgtaaggagcgtatttatccagttgggcgtttggatcgtaatactaccggtgtattactgttaactaacgatggtgatttggcttccaagctgactcatcctaagtatttgaagaagaagatttatcatgtatattgtgataagaatgtaaccaaggcagatcttgaccagattgcagcaggtgtgacattggatgatggagagatccatgcagatgccatcagctatgcatcggaaacagacaaatcacaagtcggtattgaaatccattccggaaagaaccgtattgtgcgtcgtatttttgaatccttgggatataaggtaatcaagctggaccgcgtttattttgctggcctgactaaaaaaggtttgcgtcgcggtgactggcgttacctgacggaacaagaagtgaacatgctccgcatgggctcatttgaataataaacaataaagagacaaaacaatggaaaaaattagtagaacaaagattgttgacttgctgaagcgccgtgattttggtgcgatggtcaatgtaaaaggttgggttcgtacccgccgcggtagcaaacaggtaaattttatcgccctgaatgacggttctacaataaataatgtgcagattgttgttgatttggcaaactttgacgaagaaatgttgaagcagatcaccaccggtgcatgtatcagtgtgaacggtgagttgaccgaatccattggctctggtcaggctgccgaagttcaagcgcgtggaatcgaagtattaggtacttgtgataatacttatccgttacagaagaaaggtcatacgatggagtttcttcgtgagatcgctcatttgcgtccccgtaccaatacatttggagctgtattccgcatccgccacaacatggctatcgctatccataagttcttccatgaacgtggtttcttctattttcatacacctattatcacagcatccgattgtgaaggtgcgggacagatgttccaggttactaccaagaatctttatgatttgaagaaagatgaaaacggagcgattatttatgatgatgatttctttggcaaacaagccagtttgacggtttccggacagttggaaggtgaattggctgctactgctttgggggctatttatacatttggacctacattccgtgcggagaactccaatacgccgcgtcacttggccgagttttggatgattgaacctgaggttgcgttcaatgatattactgataatatggatttggccgaagactttattaaatattgtgtacagtgggcgcttgacaactgctatgatgatgtgaagttcttgaacgatatgttcgataaaggattgatagaacgtttgcagggcgtgctgaaggaagaatttgtccgtctgccttatacggaaggtatcaagatactggaggaagctgtagtaaaaggtcataaatttgaattcccggtatattggggagtagacttagcctctgaacatgaacgttatttggtggaagagcactttaaacgtcctgtaatcctgacagactatccgaaagaaatcaaagcattctatatgaagcagaatgaggatggaaagacggtgcgtgcaatggatgtattattcccgaagattggcgaaataataggtgggtctgaacgtgaggctgattatgacaaattgatgacccgcattcaggaactgggaattccgatgaaggatatgtggtggtatctggatacccgcaagtttggttcatgtcctcattctggttttggacttggttttgaacggttgttgctgtttgttaccggtatgaccaatattcgtgatgtgatacctttcccacgtactccgcgcaatgctgaattctaattgtaggaaataataattcaaaaaatcctgccctataacatagagcaggattttttttgtgtttaactgtaaaaaagttatttgaaaagcagaaagtttgaaaaatttttctaattttgttgtatccacataacgcaatttgttaactaaatatatacagctatgaaacggaaaaaattattcctactgatgatagcattcttgctaatcggtacttcgcgtgtagtgggacaggaaaaatcagatgcagcccctgtcaacttgaaagggatttggcagatgtgcttttatgtatcaggtactcctcaggtgccgggtgagttgaaaccaagtaattcttttaaaattttgtctgatgacggcaagtttaccaatatgaccatgattcctaatcatggagctattattattggttccggtacctatcggcagactgctcctaatgcttatacagagcatgtggagaaaaatctgcatcttccacaattggtaggtgtggataatattttggaatttgagatgaaggggggcgatgtcatggtactgaagttttttgtgaaaacggataaggatggaaatgaaatcaattcttggtattatgaaacttggaaacgggtgaaaatgcctcctgtttatcccaaggatttggtcagataagtttgaatctttgtttataaacaaaggatagtcattggggaggggctgctctttcattttttgaaagcgtggtccctatctatatggtgggatatgtgtcttgtttatatgattacttgtttggatacttaaatgaaaggtgtctatgtattaattgtttccaataaaatgatgtagtgagtaactgttacctgtttgcaggttgcttaaatatacggtaaaattcctgtaatctcttcttaatttgcacagaatttcaaaaaatgtgctattcttcatcacttttatgccttttcgagaacaaaaattggaaataatcgttaactttgtcgccaataacagaaatagaaaaggagattaatgtctaaactttatataatagcggggtgtaacggagctggtaaaacgactgcttcgtatacggtattacccgaaattttagagtgccgtgaatttgtcaatgccgatgaaatcgccaagggactttctccttttaacccctcaagtgtagcaatcgaagcgggacgactgatgctgaaacgcatcggagaactgttgtcagccggagtcagtttttctgttgaaactacattgtctacccgttcttatatcaatcttatccagcaggcacaaaatcaaggatatagtgtcagccttatttatttttggctgaattcgcctgaactggctatagagcgagtgaaacagcgtgttgccaacggagggcatgatgtacctgctcccattatccgtcgtcgttatcgttcggggttggaaaactttttccgtatttatatgccttgcgtggattattggatgcttgcggacaatagctgcacaccgcgtgttattgtggcggacgccttccgtttgggagatgaggtccatatctataatcaagaactttttactaaaatcagaagttatgtcaactgaagaagaatataaggaattaagtgcgaagttgcgttatggtttagaattagcggaacagcggttgatagaggaaactgcacggcgcgaagggacactgtgttatggtcgtcccgatggaaaagtagttcggatctcagcaactgaacttttaaagcttcgtcagtccggtggaaacaatgcggcatctgtggctgtttgtacttgctctgagatggagagtggctggaatcgttgaaaatatatgaataactgtatatgtatagggaagaatcaaaatttcttccctatgtttttactccgttattcaaagcctagatgtggttgtatcagccttttgtatgcaaaaagcaggaggaaaaaatatcttaatttgtttgtcagttcaaagaaaagccgtacctttgcaagccgattattatcaaaagtttataaagaattaattcttagcgtgttaatagttctttgtccgggaacggttagaaacgctgggaagaattgttttttagtagttaacatttaaaaaagaatttaagagtggatactttaagttacaagaccatttctgcaaacaaagaaacagctcataaagaatgggttgttgtcgatgcaaccgatcaggtcgtaggccgtctcggttcgaaagttgcgaaactgttgagaggaaagtacaaaccagactttacccctcatgctgactgcggtgataatgttattatcattaatgcagacaaagtgaaatttaccggaaacaagtggaacgacaaggtttacttgcgctatacaggttatcccggtggtcagagagaaatgactcctgcccagttgatgaagaaacctaacggtgaagaaaaactgttgaagagagtagtaaagggtatgcttcctaaaaatcgtctgggagcacagttgctgggcaatttgtatgtttacgctggtagtgaacataaacatgaagctcagactccgaaatcaattgatataaactcacttaaataataaagaatggaagtagtaaatgcattaggcagacgtaaacgcgccgtagcacgcgtgttcgtaagcgaaggtacaggaaagattactattaacaagagagaccttgcacagtactttccatcaactattcttcagtatgtagtaaaacagcctttgaacaagctggaggctgctgaaaaatatgatatcaaagtaaatctttacggtggtggttttacaggtcagtcacaggctttgcgtctggctatcgcccgtgcgctggttaaaatcaaccctgaagataaaacagctcttcgttcagaaggcttcatgacacgtgattctcgttctgtagaacgtaagaaaccgggtcagcccaaagcacgtcgtagattccagttcagtaaacgttaatatccggttttacttggaactggttaagaagcgtttagtatctaaaccagcgggactctacttggtagcggactacccgatggttggttgagataaacaaaaaagaaagtaaacgatttaaagaataacaaaatgtctagaactaatttcgatacattattggaagccggttgccacttcggacaccttaagagaaagtggaatccctcaatggctccttatattttcatggaacgcaatggtatccatatcattgacctccataaaacagttgctaaagtagatgaagctgctgatgcactgaaacaaatcgcaaaatcaggtaagaaagtcctgtttgttgctactaagaaacaagctaaacaagtagtagctgagaaagctgcttctgtaaatatgccttatgtaatcgagcgttggccgggtggtatgttgactaacttcccgactatccgtaaggctgtgaagaaaatggctactatcgataagttgaccaacgatggtacttattcaaacctttctaagagagaagttctgcaaatctctcgtcagcgtgctaaattggagaagaacttaggctctatcgctgatttgactcgtttgccgtcagcactgttcgttatcgatgtgttgaaagaaaacattgcagttcgtgaagctaaccgtctgggtatccctgtatttgctatcgttgatacaaattcagatccttcaaacgtagacttcgtgattcctgcaaacgatgacgctactaagtctgtagaagtgatcttggatgcttgttgtggcgctatcgctgaaggcttggaagaaagaaaagctgaaaaagtagatatggaagctgccggtgaaaatgctcctaagggtgctggtaagaagaaaaataccaaggctcgtatggataaagccgaagaagaagctatcaatgctgctaaggctgccgctttcttgaaagaagacgaagaagcttaatagtataaattgagagttgagaattgaaaattggggaaggggcagattatgctgttgattctcaattctcaattttcaattctcaattctgttttaaagatattactaacaattaaaaaataaaggaatattatggctgtaactatggctgaaataaccaagcttcgtaagattagtggagctggtatgatggattgcaagaacgccttgactgaagcaaacggcgatatcgataaagcaatggaaattatccgtaaaaaaggacaggctgttgctgcaaaacgttctgaccgtgaagcatctgaaggttgtgtgctggcaaaaaaggatggcgaatttgctgctatcatcgctttgaaatgcgaaaccgacttcgttgctaaaaatgctgatttcgtagcgttgactcaagctattctggatgctgctgttgccaacagatgcaagactttggaagaagtaaaggctttgcctatgggtaacggtactgtacaggatgcagtaacagaccgtagcggtatcactggtgaaaaaatggaattggatggctacaatgtggttgaaggtgcttatacttctatttataaccaccagggaaataaccagctttgtactattgttgccatgaataaggaagctgaagctgccgctcacggagttgctatgcagattgccgctatgaatcctattgcaattgatgaagccggtgttcctgaatctgtaaaagaagctgaaatacaggtagctattgataaaactaagaaagaacaagtagacaaggctgttgaagttgctttgaagaaggctggtatcaaccctgcacatgtagacagcgaagagcacatggaaagtaacaaggctaagggctggattactgacgaagatattgccaaagctaaggaaatcattgctactgtttctgctgaaaaagctgccaacttgccgcaacagatgattgaaaacattgctaaaggtcgtctgggtaagttcttgaaggaagtttgcttgctgaaccaggaggatatcatggatggtaagaagactgtaagagaagtgttgaaggaagctgatcctgaattgcagatcgttgctttcaaacgtttcactttacgtgctgaataagatttccgcaattatagaatgggggactgtgtgacaacagtccctttcttttttccggttatttggtctgggtatatccttcagctttcaataactcgatgacccgttgcttgaactctccttggataaggatctccccgtcttttactgaaccgcctactccacatttgcttttcaataatttacccaactctttcaggtcattttctgttccgatgaacccgttgattaatgtcacggttttgccaccccgtccttttttttctatattgacacggagtttctgttgttttttatctaatgtctcaaccgcttcctcttcaacactttcatacttgaaatcaggatttgtggaataaaccacattcagacgttctttccaatcgttatttttcatgtgaattttgcttaaatgaatactcaaagataagactttttttatactctatccgtcaatgtaacaaataaaagtgtacttttgcaaattacctaatgataatacctaaagaaaaagatggatatacgtatgcataaattctcggataaagtgcctgagccgactttgcgcagacttccgtggtatctttcgaatgtgaaactgatgaaagaacagggagaaacgtacgtgtcttctacccaaatatccaagcaaatcaatgtagatgcttcccaaatagcgaaagatctttcttatgtaaatatatccggccgtacacgtgtggggtatgagattgatgcgttgatagaggtgctggagcgtttcttgggatttaccaaaatgcataaagcttttttgtttggtgtcggtagtttgggaggtgctttattgcgcgactcggggctgcatcattttggattagagatagtaggtgcgtttgatattaatcccggattggtcgggaaggaaataaatggaattcctatttatcattcggatgaatttgagataaaaatgaaatcctgtgatgtgaatatcggggtattgactgtgcctattaatatagcacaggagataacagataaaatgatagcgggtggcattaaggctgtttggaactttacaccgttccgtattcgtgtaccggaaaatattgtggtgcagaatacatcactttatgctcatctggctgtaatgtttaacagattaaatgtaattcaagaataataatatgaagattatagccgtaggaatgaactacgttgcacattgccacgagttacatgctgatgaaaaattaccggaagaaccggttatttttatgaaaccggattcggctctgctgaaagacagcaagccgttttttattcctgatttttctcagcaggtggattatgagacagaattggtagtacgtattaatcgtttgggaaagaatattgctccgcgttttgccagtcggtattatgatgcggtgacggtaggaatagattttacggcacgtgaccttcagcggcggttccgggaggaaggcaagccttgggagctgtgtaaagggtttgatagctcggctgccataggtgattttgtgccggtagacagatttaaggatatacagaatttaaactttcatttggatatagatggaaaaacagtgcagagaggcaacactgcggatatgttgtttaaggtggatgagataattgcatacgttagtcggttttttacattaaagattggagatttgctctatacggggactcctgtgggagtagggccagtcggcataggacagcatttgcaggggtatttggaaggtgagaaattattagatttttatgtaagatgaaaataagagtaggatttggattcgatgtgcaccaactggtaaccggtcgtgaactatggcttggaggaataaaatttgaacatgaattggggctattgggacactcggatgccgatgtgttgattcatgccatttgtgacgctttgctgggagctgccaatatgcgtgatataggttatcattttcctgatactgcgggtgaattcaagaatattgatagcaagattttattggctgaaacggtggacctgattgctgcaaaaggatataaagtaggtaatgtggacgcaacgatttgtgctgaacgtcctaaattgaaagcgcggattccggaaatgcagttggtacttgctcatttgatgaggattgatgtggatgatgtttccgtaaaggctaccactacagagaaactgggatttacgggcagggaggagggcatttccgcttatgccactgtattgatagagaaagcggaatgatttgttgcgctttattgggaaatatcttctggcaagatcttgctggaagattataggataaggccgaatgctagtaatacgccgaatagcagcatattgcgggaggtttctcccaatatgctgtttaattcttttcccctgttgatttttaccattctttgccatgccatgaagtgaggtaacagataaatttggggtaataatgcagcccaaatgtgcccggtcgggataaacaataaacaaagccatgcggcagccaatcccaaaaataagtataattgttgccctgcattggctccccagcgtactacgattgttttctttccgctttttgcatcctgatcgcggtcacggtaattattcaccatcaacaaggtatctataatcagtccgcaagctagagaggcgagtgtcacattccaagtccagtcacggcacatcacatagtaagtgcagcctaccggtacaaatccgaaaaagacaatgacaagtatgtctccccatccgtgataagctagcggataaggtcctgctgtataaagaaaagcgaataaaacacataaaattcctactggaatcatttcaatccctccataagctaataggcataaccctgctaaacaagctgttgctgtggtcagggcgattccctttctcatggcgttcagtgtgatccatccttgcgcgcaggcacgttcaggacccaaacggtcttcacggtcactgcctttcaggtaatcaaagtaatcattaatgaagttggcgtctatctgcatcagaaaagcgaaggcaaagcaaagcaatgctggtgtcatttggaagcagctgtctgcataggccaaggcacatcccagtaaaaccggagtggcggctcctgccaatgttttagggcgggcggctagaagccatgcttttattgagttaacttgaacaatttccatttctatttataattaaggttgtgcaaagataaaacaattaattctgtatctttgtctccaaatagaaaggattatgaagaaacagtttctttttttgcttttagcggttattcttttgtcttcttgcgccacagctactttgtccgagtttccgggggtagggcgtgtgaagcaatatgatttttatagttatgatattccacccgcttttgacggttttcggatagggtttgcttcggattttcattatgagagtcgctttaagaggagtgaattgaacagcgcggtgcgggcattaaagtcaatgcatgccgatgtcttgctgttgggtggagattatcgtggcaagaaaggtggaaatctggatactttgttcaccgccttgagcagagtttatacgccttacggaacatttgctgtgatgggaaatcatgattatggctattgttattccgaagtggtggaggccatgcaaaagaatcatgtgcggttgatggaacataaaagctataagctgatgaaagatggtcagtatattatagtgagcggtgtacgcaatccgtttgatttaaaaaagaatggtgactctccatcccagcattttccggcggatgattttattatattgctcacgcatactcccgattatgcagaagataccgatgtgtcgaatgccaatttggtgttagcggggcatactcatggtgggcaggtgagcttgtttaaaaaatattctccggtaaagcactctatttatggaaaccgttttctgactggttggaaagagaatagcaaaggtactccgattattataaccaatggattgggtacttcgcgcgttgacgtccgtttatttactcccagcgaagttgttctggtagtcttgcatcgtgttgaaaagcagaaagaatagactgtttgtccgttaataatgtacagggtgtccataatcggacacccttttttatgtttacttgttgatacttagtggattaattccatggcatgtactttgcactttataaagtgaagcgactcaagaaaaaaaacggatcatgttgcaacgttttgagagtcatttgcgtcttataaataaagacacaaataaacacgaattataaacattaaaaataagacattatgaaaactacaatgctcactaaagccatgatggcagttctttttgcaatgacaagtgtattaacattgaatgcggccaagcctgtgaagattacaaatgaagaggtggaaaatggtcgggtgtcggctaaggtcgtttatgaacaggaaggtactttcctgactccggagtatcgttttgagttcagatacaacgataagggacaaatcatagagaagaaaagtatgaaatggaatggcacggattggataaattattattgtatggaagttacgtacacagacacagaagcgcatattgattattctttgtggaataaaaataaaaaagcgtttgtccctacgcagaaatatgtatatacgttagatgaagctgggaagtttttggcgtggcactcatataaaaaggatacgacaggctgggagttggacggattgataaatagtaaggtactgctggcaaagcgttaatggagtgcgtcctttgaattttagattaaataattgatgtgtttttccccggggaatttggattgtatcctcccggggatttttattttttcagtcgttcatatactgccggatgcaggaaatatcgtatatctcgtccttccgccagtgcctgtctgataaaagtagaactgacttccaataacggagtatcggctaattgcacggaaggaggaagggttgttggatcaatagtgaaattcggacggggatagatcattacatgatgattctttaaaatctcctctgctttgtaccaacgggggaatagaagccagttgtccgccccaatgataagggtgaattcccggttgggataggctttgtgtaaagcatccaatgtgtgtatagtataggaaggacgaggcaggtggaattcgaagtcggaagcccggaatttgggataatccgcaatggccagttttaccagttccaatcgcagattatcatcccataaatccgtttgttgctttaatggattgtgaggagagacgagaaaccatatttcatccagtccattatattcacataaataattggcaagtgccagatggcccatgtggataggattgaatgagccgccgaaaataccagtctttatcttactcttttccatttattgtaattccatacttgtcctacagtgacaatacccattgctatggcaataatgtattgctccattgccattgcaatgatgcctacagccaaagctataaaaccaatgaggatacaaagtatcgacattctttgggccagttttttcggatctttgatcatcgtcttattgttcaataaagtttctaataactttcagtgcttccgcctttgccttctccaaatcgtcatttactatcacggtatcgaatttatcggcgaaccccaattcgaattctgcttttgcgattcggctttcaatcacttcgggggcatcagtaccacggccttgcaggcgtttacggagttcttctacactgggtggttgaatgaaaacagacaatgcgcggctgccataatattttttgatattacatccgcctaccacatctacgtcaaaaatcacattttgtccggcttccaattgtttttccacttgtgctttcaaggttccgtagaaacggttttcgtatacttcttcgtattccagaaactcattattggcaatgcgttgtctgaattcctcaggagataggaagaaatattccacaccatgccgttcttttccgcgaggagggcggctggtggcagaaatagagaaagacaggttcaggttttgtgtcaacagatagttgataatggttgatttgcctgaacccgagggggctgaaaaaatgataagttttcctgttgccatatcttgattctttgcttatgagaatggtgtccggtatgtgaaccggttacattacatttaacacctgttctttgatttgttccagttcgtccttcatctgcactacgatgttttgcatttcggcatgattggatttgctgccagtcgtattgatttcgcgtcccatttcctgtgctatgaaaccaagtttttttccttgtccatgaccgcctgccatggtttcacggaaatatctcaagtgattgctcagtcgttgtttctcttcgttaatatctaatttttcaatgtaataaatcaattcttgctccaggcggtttttatcataatccacactgatggtcttttccaaagcatctgtaatgcgttcacgtatcttggctacacgctctgtttcgtagggttcgatggactttaacaaacgctcgatgttgtcaatcttttcgttgaatttcttttccaaggcggttccttcctgtttgcggaaatctaccaaatggttgatggcctcttccactacccggcggactacctcccattcgtcttccgaaagttcttgtacatcggctttggtcagtacgtcaggcattcgtagaagggttgcaaaccaatcttcgggcattggtatatgggtcatttcggaaatagattttatctgattgtagtagttttctacaagggcggcgttaatgggagtggctgtatccgaaacgtctttctctatccacaggctgaaatcaactttaccgcgttccaatgatttggaaatcatattgcggatttccatttctttttcacggtataaaggagcgatccgtgtagacaagtccattgctttactatttaaagacttgatctctacgttaatttttttttctccgaatatagcggttgctttaccgtatccggtcattgactgtatcataactaatatgtttttttgcaaaagtaatctttttatggaaatgaagtataaataaaagtgtatatttgcagattatattatataagtagagcattatgtcgtgtattttgcatattgaaacttcaacagaggcctgctctgttgccgtcagtgaggatggattggcggtgttctccaaagaggatttgaaaggaccttcacacgccgtgcagctgggcgtatttgtagatgaggctttatcttttgtcgacagtcatggtatgccgttggatgcagtggctgtgagttgcgggcccggctcgtacacagggctgcgtattggtgtttctatggcgaagggtatttgctatggacgtaatttgccacttatcggtctgccgacattggaggtgttgtgtgtgccggtgttgttacatcatgatttgcctgaggatgccttgctctgtcctatgatagacgcacgtcgcatggaagtctatgcagctgtttatgatcgcgcattgggcgtgaaaagggaaatagccgccgatattgttgatgagcattcctatttggagttcctgaatgaacatccggtctatttttttggtaacggtgcagccaaatgccgtgggcagattactcatcccaatgctcattttattgatgacatccgtccgttaggtaaatggatgttcccattggcagaaaaggaaatggtaaggcagaactttaaggatgtggcttattttgagcctttctatttgaaagagtttgtagcttccaaacccaaaaagcttttgtaacagccgatgaacaaatcagtgcataaatcataaattttaaatatatatggagtataatactcaacaacgaactttaccccttcctgaatatggcagaagtgtgcagaacatggtagaccacgccttgaccatcgaggacagagctgagcgccaacgttgtgcgaatacgattatcaacattatgggcggtatgtttccgcatttgcgggatgtgcccgatttcaaacataaattatgggatcatttggctattatggccgatttcaagctggatatcgattatccgtatgaaattgtgaagaaagaaagcctggaggtgaaacccgatatgttgccttatccgcataatggaatccgttaccgtcattatggacgtattttggagaacatgattaaaaaggcagtggactatccggaaggtgaggagaagaagcagctgatcagcctgattgcaaaccacatgaagaaatgtttcctgaactggaacaaagacggggtggaggatcagaaaatcttggatgatcttcgcgattactctaagggaatgattaatctgacccctgaagacctgcatttgaatgaacaacaacgtgtttatgttccacgcaggccgcaacagaacaacaatcagcgcagaccgcaacaaaacaacaaccaaagaaagaaatattaattcctaaaaaatgataccatggcttcgtttgtaattgaaggaggacataaattgcacggcgaaatacacccgcaaggtgctaaaaatgaagtgttacagattctttgtgccactctgctgacctcggaagaagtgaccgtaactaatattccggacattctggatgtgaacaacctgattcagttgttacgtgatatgggtgtcaaggtatcaaaaacagggattgattcatatacatttaaggctgacactgtggatttgaactacttggagagtgatgaattcttaaagaaatgttccagtctgcgtggatcagtcatgttggttggtccgttggttgcccgttttggaagggctttgatttcaaaaccgggcggtgacaagattggtcgccggcgtttggacactcactttatcggtattcagaaactgggagcctgttttaattatgatgaggaacgaagtgttttcagtatttgcgcagagcatttggaaggtacttatatgttgctggatgaagcttcggttaccggtacggctaatattgtgatggcttctgtcctggcgaagggcaaaacgaccatttacaacgcagcttgtgaaccttatctgcaacaactttgtcgtatgttgaaccgcatgggggcgaagatttccggtattgcatctaatttgctgactattgaaggagtggaaagtctgcatggctgtacgcatcgggtgttgcctgatatgattgaagtaggtagttttatcggaatggcagctatgacaggaagtgagcttaccattaagaatgtatcgcatgaaaatttgggcattattccagaaagtttccgtcgtttaggtatcagagtggaacagcggggagatgatctgtttatccccgagcaggaacattatcagatcgaatcgtttattgatggctctattatgaccatagcagatgctccctggccggggctgactcccgacttgctcagtgtggtactggtggtggctacacaggcgaaaggcagtgtactgattcatcagaagatgtttgaaagccgcctgttctttgtggacaagctcatagatatgggagcacagattatattatgtgaccctcatcgtgccgttgtgatagggcatgaccgtaatttccagcttcgcgccggaaatatgatttcacccgatatccgtgccggtatcgctttgctgatagcggcaatgagtgccgacggtataagccgcatacacaatatagagcagatagaccggggatatcagaatatagaccagcgtttgaatgcgcttggcgcacgtattactagaatttagagaaatcaatcatgattaagaaagatgaagttttcaagattggtatattcaacaaaccgcatggagtaaaaggagaaatctcattcacttttacggatgatatttttgaccgtgtggaatgtgagtatctggtctgtttgttagacggtatattcgtgcctttctttattgaagagtatcgttttcgttcagataccactgctttagtcaaactggaaggggtggatacctcggaaaaggcccgtatgtttacgaatgtagaggtctatttcccgaagaaatatgtcggtgaggaggaagattcggatgatatacctacctggaactattttattggctttaaggtggaagatgtgaatcatggtgagttgggcgagattgtggcggtggatgacagtacgatgaatgtcctttttgccattgagaaggatggcgaggaacttttgctgcctgcccacgaggaatttatcatcaaattggataagaaaaagcgtttgctgacggtcgaagtacctgatggcttgatataaatatagaaggtgcgcacaatgaagaaaaaaggaaggaaagcattttggcataatttcaagtttaagtataaactgaccattaccaatgaaaatacgttggaggagattgtgggactgcacgtttccaaactcaatggtgtgtctgtattgctgtctgccgtaacggtaattttcctgatttcggcaactatcattgtttttactcctttacgtaactatttgccgggatatatgaacagtgaggtacgtgcgcaggtggtgaccaatgccttgcgggccgattcattacaacaagtggtgacgaggcagaatatgtatatcatgaacattcaggatatatttagcgggaaagtaaaagctgatacagtccaatctatcgactctctgaccattcttcgttctgattctttgatggaacgtaccaggcaggaagaagagtttcgcaagcaatatgaagaatcggaacgatataatctgacggctgttgatgataataatgccgcttccggattgatattctatcgtcctacacggggcatgatgtcatctaattttgacttggagaacaggcattacggtgtggacattgccgctaatccaaatgaaagtgtgttggcaacattggatgggacagtgattttgtctacttatacggcagaaaccggttatgttattcagatacagcatggacaggattttgtgtcggtgtataaacattgtggttcgttattaaagaaagaaggagatccggtgaaaggtggtgaagctattgcattggtaggaaataccggtgaaaaaactaccggaccgcatctgcatttcgaattatggcataagggacgtgcgattgatccctcaaaatacattgtattttaacaacattatgaaaaaacaaatagcgatattaggttctaccggctctatcggtacacaagctttacaggtaatagaggaacatccagatttatatgaggtctatgcgttgacagccaataacagggtcgatttattggtagaacaagcccgtaagttcatgcccgaggcggtagtgatagccaatgaggaaaaataccttcaattgaaagaggcgctgagtgatctgcctgtcaaagtatatgcaggagcggatgcgctttctcaaattgtggaatcacaacctattgacattgtactggcttctatggtagggtatgccggattgcgtcctactataaatgcgataaaggcaggtaaagctattgctttggctaataaagaaacactggttgtagccggggagttgattaatgcactggcaaatcagtaccatatacctgtacttcccgtggattcggagcattcggctatcttccagtgtctggaaataaataaccggttggagaaagtgatcttgacagcttcaggagggccgttccgcacttataccatggagcagttgcaaacagtgaccaaagcacaagctttgaagcatcccaattgggagatgggagcgaagataaccattgattcggcttccatgatgaacaaagggtttgaagtgattgaggctaaatggttattcggaatgcgtccggagcaaattgaagtggtagttcatccacaatctgtcattcattctatggtgcagtttgaggatggggccgtgaaagcacagttgggcatgcccgatatgcgtttgcctattcaatatgctttttcgtatccggagcgcgtgaaatcttctttcgagcggttggattttgcccgtataacagacctgacttttgaacagcctgataccaaacgttttcgtaatttggcattggcatacgaggctttgtatcgggccggaaatatgccctgtatagtgaatgcagctaatgaagtggtggtggatgctttcctgaaagacaaaatatctttcctgggtatgagtgatgtcatagaacagactatgggtaaagttgcttatatcaaggaaccgacttatgaagactatgtggatactgatgctgaggcgcgtcgggtagcgttgtcccttttgtcatcttaaatggtagttggcagagaattatgttaattataaattataaaatagtaaatagttagatggaaacatttttgattcgtgctcttcaattgataatgagcctttcattattggtcattattcatgagggaggacattttcttttttcacgtctttttaaagtaagagtagagaagttctacatattttttgatccgtggttttctttgttcaaattcaaaccgaagaacagtgatacggaatatggtattggctgggtgcctttggggggatatgtgaaaatttcgggtatgatagacgagtctatggataccgagcagatgaaacagcctgctaagccatgggaatttcgttcaaaaccggcttggcagcgtctgcttatcatggtgggtggtgtcttgatgaatttcttgctggctatcttcatctattccatgattttattccattggggagattcttttgtatcgctgcaagacatgactcatggtatgaaatttaatgagcgtgcccgggaaataggtttccgtgacggtgatattcttcttcgtgcagatgaaaaaccattggagcgtttcggggtggatatgcttcgtgatattgctgaggcacgtacagtgactgtattgcgcgacggaaaggaagccgaagtatatatgcctgagatcagcttgttggatatagcaaaggatgatccgatgtttgttacggcgttagttcctaatgtcgttgactcggtgataccgggcggtggcttggataaggccggtatacagaagggagatagtctggtcgcggtcaatggcgagaggttgaactcatggaatgcattggtggaaaaactggataatatgcaggctgatgcggaagctacaggagataaagatgcttctctacaaatggtatattcgcgtaacggactgcgtgacaccgtgacggtgcgtacagactctttgtttagagtgggtgcaacattctcttcattggctgattataaagaaacaacccgtgaatttggtttctttgaatcttttcctgccggggtgcaattgggggtaaatacgttgaagggatatgtgaacgatatgaaatatgtgttcactaaggaaggagccaagagcgtaggtggttttggaacgataggaagtatttttccgaaagtatgggattggcatcgtttttgggaaatgactgcttttctgtcaatcattcttgcgtttatgaatattctgcctattccggcattggatggcggacatgtattattcctgctttatgaaatcattgcccgccgtaagccgagtgacaagtttatggaatatgcacagatggtaggtatgtttttactgtttgccttgctcatttgggcgaactttaatgatatcatgcgattcttgttctaggtctgcatgacagaaaaggacacggcatttttataacaatgccgataggcacggatttccgcaaagattgaatcaatcgtctttgcggaaatctgcgttttttatattgtttctctcccgtggtgaaaaaaagacataaaaaaagagcgaaagtttttatcaaacccgctcacatcctgaagaacccccctccattatggggttcttttcatctttctcgtctcagttgtgttatcctctctctcttgtacctaaaaaaaacaactcttttaatacctataaaactaatctcctgaaaactttctttttctaattaccttaaatcttactactaatacctttctaaatcaatctttctttacctaaatctaataccttaaattaaaatctttaccttaatacttaatacctaattttgttcttttctttattaacttaatatttggtttcacaaccacattgcaaaggtacggcttttcttgaaattagcaagtaaatatatgctgaaaaacataaaaaagggtgaattcatgatatatatcaagaaaacaccccttttttatttcttttagcgttatcgcacacggatgatgcgttgattactgctgccccgaaattccaagtaaggagagtacaaatccggctcaaatcgtccgtctactataacatccacataatccagtatcggttttaacatttcatcgttttgtatctgttcaaatgtatatccagtataacaccagatgttttgtccggtagcttctttgatctgtttgaccagagccaggaattcttggggatgataaagtggatctccaccggaaaaggtgattccgtccaataatggattggcatttatttcgcagatcattttttctattttttccggtgtgagcggagtgcctgccgatggattccaggattcgggattctggcaaccgcgacaatggtgacggcatccggccagatagatggaatagcggatgccttcaccgtcgactattgtttcaggataggtaaataacaagttcatgctgattatccatgctttacccggtcacgttcttcagcacgcttggctgaattccaagtgctgaggtcgcctgtcaaatacccggtaatgcgacgcattcgcattatattctcgctctggcaaacagggcacttgtcgtaaatgactcctttgtaaccgcaagcctgacaagtatcaacaggatggttgatggaaccgtatccaatgccttcgtcatgcattacttttacaatcttggctatggcttttacatttttctgagcttctccgtccagttccacgtaagtgatatgccctccgcgggtaatggcgtggaaaggagcttcccgttttatcttctcggtgatggtgatgggctcttttacatctacgtggaaagagtttacataatagtcattgtccgtcacgccgggaatgatgccgtatttgcggcggtccatacgggtgaagcgtccggaaagtccttcggcaggagtggcaagtacggagaaattcaactgatatttctgtttgtattcatctgccactttattcatttccgtaacggcttcgaataatgtatcccatgctttctggctatgtgcgtgaccttctccataaagagccatcatggcattgtgtccgccgataaagcctatccctaatgtgccttgacgcaatacatcccccacctggtcgttgggcgaaagttttcctccgcctttccacacatcattccccatcatgaacgggaactggcgtgccagggctgtacgttgatactggtagcgtgcatacaattgttcggcaatcagttcggacaaagcatgtacactttccatgaatatttcttttgcttttctttctatggcctctttcttgcctgactcttccagactttctgccttgatgcgtgcttcgatggccagccggggcatattcatggtggtgaatgacaggttgccacgtcctaatgaacttttttcacctgctatattttcgtatacgcgggtacggcatcccatagttgccagttcatagcggtaacgtttagggtccttgatatcccatttctcatttttgttataaggagtatccaaaaacataaaattagggaacaaggcttttgcggtggtacggcaggctttcagaaacaagtcgaaattgggagcttggaattccattttgccttccagtgccgcttcgaagttttccatggctttcttatagtcctcttcggaataagatactccgtctttaaccttgaatatctgtatggggaagaccggtacttcgccacgggtacccaggccttcgatggtagctttcagcagttcctctatgaccatgcggccttcgggagaagtgtctgttccataattgatggaactgaacacgacttgatttccccctcgcgaatgcatggtgttcaggttgtggatgaatccttccatggcctgatgtgtatctttgcgtgtcatggcgtatgctttctcttcaattttcttgagagcctctgttccgggttcttttccctctacttctatataaaactcggttaaagttttcagatgtttgcgaaatgtcttccgtaccccttccgccataaagaagtcgaaggcgggaatagcctgtccgccgtgttgctcgttctggtttgtctggaatatgatggtggccagagtggcataactttgaatggactgtggagtacggatacttccgtttttagtgcggaagccgcgttcgaacaagtcatccaggtcatattggatacaagtggtagtcttggtgggatagtaatccaaatcatgtatatgtatgtcgcccaactgatgtgcttcggcatattttttaggcaacaggtatttataggtataatctttagtaacttccgaggcaaaagtcatcatctgtccggcgggagtatggctggacatgttggcattgctcaggttgacatcatttttgtcgatggctacaatgccgtccatgatgtgcttcatttgcgttttacggtcgcgttccgtattccgccattcgcgataaataatatatttcttggccacttcgggacgtactttcatcagttccttttctaccagatcctgaatctcttccacactgatggttggagatacgaaattgctgataacccgcatggtaatttcagcaatcagtttgtcttcattgtcaattccggaggcatggaatgccttgccgattgcatttttaattttactgatggaaaagtcttcccgctttccatcacgcttaataatacaaatctcagcgtaattcattgtttgaaaaattaattgttaatttaaaaaacttggctgtccttccaggcaggttttctgacttatctctcccttaaaacgccttcccgcaaatggttttgtagtggcatattgtttcagctctacgagaattacagcagcgggtactgttgctgattttcacggcattccctcttggaagtggttaacttcaccttgtcggacagctgcaaaggtataacattttgggaaactttctgtttaaaaaatgaataaaagtttcccaaaacggataacttattgaagatgggaaggttataaaatgtaccacaatgccatcatgtgacagaccgttcctcctaatacgaacagatggaaaacagagtgcatatagggcaatttggggaaggaataaaagacagctccggtgatgtaagacactccttcgccgattaaccaataaataaaagcgggaggcacatgttggcagagcggcttgaaacctacaaaaatgctgcatcccatggctatatagcaaattgtttctaggttgctatgttctttcaggttacaaaaacatagaatgatcccggcgagggcgcatagccatacgaaactaagaattccccatccccaataatctgcttcccgcaaggctatcagcatgatgggggaatagctgcctgcgatatgcagataaatcgaagcatgatcgaatttgcgcaacacttcgcggtgaggagatggtttgctggcatgataccaggtggagctgatataggaagacagcataccgaataggtagagccacatgccgcctgttgcccacggattgccacttttcatggcagtaagcaacagataaccgccgccggcgatacctatcaggataccaacgccatgtgacagggtattggcccactcttctcctttggtatagtgtatggtcaatttcttataagttttttggagttaatcccatgctttttgctttcttcaacatgtgttctaaagcagcatcatgctcattagggatgattccatccagtatggcatccttgatagaacttttcagactgcctatttcacggcagggctgcaggtcgaatatccgcataatttcttctccgtctaccggaggttggaaattgcgtatccggtctttttcttccaggtctttcagcttctggcgtaccagtttgaagttatccaggaatttttgttttcgtgcttcattttttgaagtgatgtccgcttcgcacagcatcatcaagtcgtcaatatcatctccggcttcaaaaagcagacgtcgcacggcggaatcggttactacatcatctgcgataacaatggggcgcatgtgcaggctgaccaacttttggacatatttcatcttctcattcatgggcagtttcatcttgcggaagagatccggaaccattttctcaccgataaagttatgattatggaaagtccatcctatacgtggctcccagcgtttggtacgtggcttgcctatatcatgcaacagcgtagcccaacgcagccataggttgtcggtatgtttggaaatattgtccacaacttccagggtatgatagaagttgtctttatgggcacgcccgttccgggtttccactccttgcagcgccaccagttcggggaaaatcaaaggcagcagtccgcagcggtccagttctataaagcctttggacggtatgggggcgagcaggatcttgttcaactcgtcggcgatgcgctctttggagataatatgaatgcgttccttgttgcgtgacagtgcttcgaaagtggtgtcgtcaatatagaagttcagttgtgtggcaaaccggacacaacgcatcatgcggagcggatcgtcactgaaagtgatgtccgggtccagcggtgtacggatagttctctctttcaaatcgtccagcccgttaaaaggatctaccagttcaccgaaacgtgctttgttcaggcacactgccatggcattgatcgtgaaatcgcgccggttttggtcatcctccaaggtgccgtcctctactacaggcttgcggctgtcatggctgtacgactctttacgggcaccgacaaattccacttccgtgtcatggtatttaacttgtgccgtaccgaagtttttaaaaacagaaacgtgtgccccacgtcccagcttcctgccgaaggcctgtgccatttcaattccgctccctactacgactacatctatatccttcgagggacgcttcaggaatatatctcgtacataacctcctacaacgtaacattccaatcccagttcgtctgccgtttcggagattaacttgaatatcttattattaaagtgttcttttagttccatattcatcttaaagaggggcaaatttacgattttttgcgcaggataaggagaaatcacgcaattaaattgtatttttgcctgcatataaaacgatcaagtacatgaaaaagataggattagtagcattatttgccttgttgctggccggttgtgatgatggcggcgagaagaaagcgcaagaaaatttgcgtaaggccgaagcggctttagaaaaagagaactttaatgaggccaaattgcagatagacagtatccgcatcctttatccgaaagcgtttgaagccagaaaacagggagtcaagctgatgcagcaggtggatttgaaagaacagcggaaaagtctgatttacctggatagcatgatggtggtgaaacaagctcagctggattccgtcaagggtaattttgttcttgagaaagatactgcatatcaggaggtgggtaactatttttatcccacccagacggtagaaaagaatataggccgttcattcttgcgcggacaggtgaacgagcagggggaaatgtcccttacctctatttattgtgctggcggcacgttgcatcacacggcggtgaaggtgagtgtggggggtacctttgccgaaactcccgcctcgaaagacagctatgaaaccactgacttgggccgtgcaatcgagaaggccgattacaagatgggggaagacggcggcgttatcgcttttattgtagcgaacaaagataagaatatccaacttcagtttatcggagaccgtacttataaaacagctatgcaacccaatgaccgtaaggcgattgcagaattgacggagttggcgcgcatcctgtccggcatggaacaaatccgtaaagataagaaagaagcgaacttgaaaatagagtttgtaacccgcaaaatgcaggaacaggaggaagagaagtgatgtggatgggaacacaaacaatgcggatcctgaagagaacctccccaaagtccgcattgtccgtgttccttgtttcatgtacggcccttacaatcgcttcaaggccagcttgatcactttttctaccggggcggcaggctcctctttcagtatggcagccactaccttttgtgatgcggcttgtgcgaatcccagcatggtgagtgcggcgacagcctcgtcatgaatttccgtattgcccggattggcaaacatttcactgttcaccgtctccacgcccgaagtggcgatcttgtcctttaagtccactatgatgcgttgggcagttttcaggccgatgccttttaccgttttcaataatttgtcattaccggaactgattactccgcacagctcggaaggggataaggccgacagaatcatacgtgccgtgttgccgccgatgcccgatacggaaatcagtaacaaaaacaactcccgttcctgtttggtcgagaatccgtagagtacgtaggcgtcttcccggatcgcttcataaatatataatttcgtattgctctgattctgaatggccgaatacgtattcaatgagatattgatgccataccccatcccgttacaatctaaaaccaccgttgccggagtaatctccgcaatgtctcctttaatatattctatcatggttgtttcatttgaaaatttacagttctttgcaaaaataggacatctatcttttaaattataagttcggcaagaatatttttaaattattaggtcgtagtgaacaaaaaaacgaggcaaaatgtttatttttgcagcgaattaacagataatagtaaactaaacccaataaaagatgaaaaaaataagagcggccgtggttggatacggtaacattggtcagtatgtagtggaggctttggaagctgctcccgattttgagattgcaggtatcgtccgtcgtagcggtgcggaaaacaagcctgccgagttggaagcatacgctgtggtgaaagatataaaggaattgaaagatgtggatgtggctgtgctggctactccgacccgtagcgtggaagaatatgcgaaagagattctggcaatgggtatcaatacggtagatagtttcgacattcatacgcaaatcacttctctccgccgttcattggatgagtcggcaaaggccggtaaggctgtcgctattatttctgccggatgggatccgggaagcgattctgtagtccgtacactgctggaagccatcgctccgaagggtattacttataccaatttcggtccgggacgcagcatggggcattccgtagcagtccgtgccattgatggagtgaaggatgctttgtccatgactattcctgtgggaaccggtatccatcgccgtatggtgtatgtggaactggaggaaggtgcggacttcaagactgtggaagccgccatcaagtcggatccttattttgtaaatgacgagacacatgtaaaacaagttccatgtgtggacgatttgaacgacgtaggtcatggcgttaacctggttcgcaaaggggtatcgggcaagactcacaatcagttgttcgagtttgacatgaagattaataatccggctcttaccgcgcaggtgctggtttgcgtggcacgcgcctccatgaaacagcagcccggatgttataccatgatcgaagttcctgtaattgatctgctgtgcggcgaccgtgaggaactgattgcccatttggtataaagaggtttcctcaaaaagaacgatattctgaaaatctcttctctgttttattccggagaagagatttttttatttcctttgtgttcataaacaaagaaatagaacaatgatagcaagtattgtatgggatgtggatcctatcttatttaaagtaggtagttgggaagtgcgttggtatgggctgatgtggggccttggtttcatattggcttatgaaatggtaagccgtttattcaaaaaagagaagtatccggaagagtgggtggacaagctttttgtctattgcatagtcagtacggtcattggcgcccgtctggggcactgtttgttttatgaatgggactattatggcgcccatcctgttgaaatattcaagatttggaaaggcgggctggcaagtcacggaggggtgttcgccatcattctggctctgatgtggtactcgaaaaaagtaacccggaaaagtgtgtggtggttgtttgaccgcatgatacctgctgtggcgattgtctgcttctgtatccgttttggtaatttaatgaattccgagatattcggatatcccaccacgttgccttggggatttgaatttgtccgttcccgggagtggcatcagctgtatgaaggtttgccttgccatcctactcagatttatgaaatgctgtattgcctggttgccggtgtaactgcctgggtgatgtaccatacataccatttacaaaagagggtgggattaataaccggagtaagcttgcttatattctttggcactcgctttgctctggagtttatgaagaatccgcaggttgccgaagaggcggatatgacttttaacatagggcagtggctcagtgtgccgctgattctgctgggggcgtatctcatagccaccagccgcacccggaaagaataaaggttccgggagaggggggaagcaggtgaaaggataccttttcagccttccggcatcgccctgtatttcacgtgcggggcgcgtccgtttctttctattttcttttcgctgctccattggcgtagttcgctgccggcttttgttttcagcaaccctgtcaaggcacaatattccttgcaagtgataatggagtgctctttcagataatttgtcagccgtacaaagcgttcttctgctgaatatcgggtggaggaggtccggaaaccatattccgcccgttccagctttcctttgcttcgtacctccttacggaatttccgggtgggtttgaactttatgttgtcaaaatgtaccgatgcggcgcgtatctcgcttttgtccgttaccttgcggcaagtcagtgtggccgagaatgtgcccagttctcccagttttacgttataaccgtctgccaggtaattggcgataatgctttccaggtcacataacagaccgacgacggtcccttcgtggacggtagaacgccgggcgatgtctttagccaggtctttcaggttttttgtgcccgatactacaatttgcggatacagggtgggctgttccttctctccctgtatgtcgggggaggttttgaaatcatactttgctgccatgtttaatgctttttaatagggagattaagtcgtttcttgctgaacgctaaggggattctttctattaacttctatagacgcaggcaatggaccgtacggtttactgtagtggactgtacggtctgctatagtggattgtacagtctgccatcggagtctgtcttagtattcaggacaaaagtacttaatcatactggaaaaacctattaattcataggagaaaagagcttgtacgggcaaattagatgtttcccttgaaggtttgaggggttttcctttcattgtggtgtctttcttttcagttggtgtgctgtaaaggtaagtgttttatgctgattaccggcatacttcggatagaaaaagaggaggcgggctgacagtaggctgaaggattatccttcaggtgttttcttcgatggaatggggaaaaacagcccaaactgaaggctgaaggaaaattggcatgaatttgtttttagaggtgaaaaggcgtatggttcacgagaaatgttacataatccgtcacttttgttgcaatgaaacaaaaatgccggcagctgtaacaaatgttttatagaggttgccggctgtcccctacctttgcctcagaaaaacttctaaaaacatttaatgctatgaacaaaaatcagcaaaagaaccggatgggcgcggtcattattttacttgccgccgcttgcttgaatggttatgcacaacaagattctaccaaagtgtcctctgattcgaaagaggaaggcaatcgcaatgtcatgttgaatgcggctagtgccaatggtcctcgtgaaatctctatcggtctgcccggtggtgatgtgaatgtactcgaaaatggtctgcctgtggtatataattcgaatcctcataatgtaaacacgcattggcgcggagacagcagcttgggacataccggattgctgaagatttccgaaacagcgattactaccggtaatataggttatgctgtcaattcgtttacggaactcggcttggataaagagaagaaaatgaatggtgtgctgaactacggcaccaatcatttcggtaaacagcaatttgacttcaatctgaatggaagcatcggaaaagattggttttacagcggcagcatctatcagaattttgatccgggttcgttcaaactgcgttttgcgcaatatcaggaccggactcagatctataagtttgccttgaccaagttctacaatgaaggacgtggacagctctctgccatctaccattacagcaacagccattggttgtccaatgctaccaccggtgcaccatttatttatgtaggcgatgggagtgtgaaggaaattcccggtttcggactggggacttcttcttatctgcccaatgtatcggatatggtttatatggacatgcgtaccggcgagatgaaaaagatcagtctgtatgatgctacggccagtaaaggaaatcagttgacggttctgaaccgttaccggtgggataacgggttggagtggaaaatcaatatgaagtatgaccatgctttgggttcctatctgtaccagactccgatgtctatggagcagaaagtaggagccgacggctatagcaccaaaggactggatggaacattgaatccttatgagggatatgtacagagccgcatgtcctgtttcaaccgggggaatatagatgagttcttctttaccaccgagttgtcgcggaagtatgatgatatgacttggcgtgtgggggtgaacgaatggtattatgatgtggactatgcttcgaacactaccatgtatgaccatacggtggaagaatatccccaaatgttgtacagcgctgatacgaaggatattcatcattacggaaacactccttattataatctgaaccagaatgcttccgaatattacaaaggacatgaaaacaaactggctctttatgctactcacgactgggacatcaccgataaatggaatgtgtattatggcgcacgcttcgagtaccagcgtctggcaggaaagaacctggcggtatataatgccgaaggcaatccggtaggccgctttgccggttatcatatcggggcagttgcagccgatggtacgaagatagctccccgttatttcagttacaattggctgaacatggctttcacggctgccgccacttataaaatgacaaagcagtttggctttaccgccgatttcacctacaatacccagcggccgaatatgtcgaactttgctcctgccgagatgccgaatgtagataagattacaattccgttggggcgtgcgggtatttatttcaataatgactggattagtctgacctcactgttcagttacattgccaagactaacaacaactctaccttgaatctgattaatccgaataatgataaggatattaaggcggccgcattgagttatgatattgaaacaatagggtggacgacggatgcggtggtgaaacctttcaaaggatttgatttccacttcctgttcacttaccaaagcccgaagtataagaagtatgaaacgggagtgacctttagtgacgggacaacatcgggtatcaatgccaccggcaatatcgttaccgaaattccgaaggtgctgattgaactggaccctagttacaacattaccaaagacttgaaggtatgggccagtttccgttacttcagcaagacgtatgcaaatattaaaaatgcctattatttcaacggccgttgggaaacattcggtggaataaactggaatgtgaacaaacatttgtccttaagcggaactgtgataaacttcttgaaccagaccggggcgaaaggaagtatttcgggagccgagctggtagataaggagaatgcggcggcatataacggcgcatggatggcaggcagctatatccgtccgttcaccgtagaatttgcggcgaaaataacattctgattcaagagggatttaattcttctttatggtggaaaagtaacatttatacataagaatgaaacaaatgtttcagccggtaaggcaggtttccgttaactttgccgataacgaaaaacaatcaaacaaaacttttaatatcctatacttcatgaaaacaaatcttgttaaccttgcattaggtttagcctttacaggaggcgctgtttcttgtcagtcacaaaaaaatgacctggttttcgaacatcagggagatacggtgacaatcgtacatattgcccgtcccgctaactatttgttgcttccgattcaggagagcagcaaggaaggactggtaagactggatactgggagccccgcagataccgatatggatgtgcgtctggctacagacagcgttgaatattatgttccgtttgccttgcctcagggaagtgaggaagctactgtcattataaagaaggtggcggcagatgcgctgtgttgggacagcatccgggtttcggatacatttgatacggcaaacagggataagttccgtccggtttatcatcacactccgctttatggctggatgaatgatgccaacggactggtttataaagacggtgaatatcacctttattttcaatataatccatacggctccgtatggggaaatatgcactggggacattccgtgagcaaggatttggttcattgggagcatcttgacccggcgattgcccgtgatacattggggcatatcttttcgggaagtgccattgtggataaacataacagcgcaggctacggtgaaaatacaattgtcgctttttatacttcgcaccgtaatatacccggtgggcagagccaggtacaaagtatggcatacagtacggacaacgggcgtacttatacgaagtatgaacagaatccggttcttactccgtttgacggactacagaatttccgtgacccgaaggtcttttggtatgaacccgaacagaaatggattatgattgtcagtgcggataagaatatgcgtttttattcatctgccaacttgaagcaatgggaatatatgagtgagtttggagaaggatttggtcctcagcccaatcagttcgaatgtccggatttcatccaacttcctgtagatggtgaccggaccaggatgaaatgggtgatgattgtcaatatcaatccgggatttgtctatggaggcagcggtacgatgtattttacaggcgactttgacgggcatcagtttgtatgtgatacgaaacccgaggtggtgaaatggctcgactgggggaaagatcattatgccactgtttgtttctcgaataccggcgaccgtgtcattgccgtaccttggatgagcaactggcagtatgctaactatactcctatacaacagttccgcagtgccaatgctttgccgcgtgagctgagtctgtatacgggagaagacaaacagctttatctgagtgccgcaccggtaaaggaaacggagcacttgcggaaagattctaaaaagctggatgattttacagtaaatggcgagaagcgtttagaaacactttttgaaaataacgacggcgcttttgaactggaattgcaactggtgtcggctggtaaagaggctggttttgaattgctgaacagtttgggtgagaaggtgaagatttatctggatgcttcggagggacgtgtggtaatggaccgtgcggaaagcggtattgtagactttggcaagaaggtaaaaccgcatgatttggataccgaagaaagttatgctcgttataaagaggttacggtgaattataaaaatgattttgctttgggtacttgggctccgataaacaccgcgaaggcacataaaattcaagtttttgtggataatggaagtgtggagttgtttgttgacggtggccgcgttgccatgactaatctggtattcccgaatgaaccttataactctttgcgtttttatagtaaaggaggagagatgaaaatttcaaatttcacaatatataagttaggtttgtaaactaagtataaagtcatgaatagcaataaaaatctgtatgccaaattaattccggtgatgctgtgtttcttcgccatgggatttgtagacctggtggggattgcatcgaattatgtaaaagcggatctggatctgacagactctcaagccaatatatttccttccttggtcttcttctggttcctgattttctccgtacctacaggtattctgatgaataagatagggcgtaagaagacagttcttctgagtctgattgtcacttttgcctctttgctgctccctatattcggcgacggctatacgcttatgttgatttctttctctttactgggtatcggtaatgcgttgatgcaaacctctttgaatccgttgctgagtaatattattgcgggggaaaagttggcaagtacattgactttcggtcagtttgtaaaagctattgcttcctttcttgccccttacattgccatgtggggagcgatgcaggctattcctactttcgggcttggctggcgggtattatttcctgtttatatggtgatagccgtttttgccatcgtgttgttggggctgacccctattgaggaagagaaacccgataaagcgtccggcttcaaagcgtgcttttccttgttgggaaaaccgtttattctcttgtctttcattgggatcatgtgccatgtcggtattgatgtcggtacgaatacaacggctcctaaaatcttgatggagcgtttggatatgacattggctgaggccggttttgcaacaagtctttattttattttccgtacggtgggttgcttcctcggagcctttatcttgcaaaaggcttctgcaaagtctttctttgctctcagtgtcgtgttcatgttgctggcaatggtgggattatttatattccattcggaaacaattatttatatttgcattgccatgattggtttcggtaactccaatgtgttctctattatattctcgcaggcattgtttgccatgcccgaaaagaaaaatgaagtttccggattgatgattatggggctgttcggcggtacggtatttccgttggccatgggagttgccggtgatgccatggggcagagtggcgctgtggcggtgatgactgtcggagttatctatttgttgatgtataccttgaaaataaagaaatgattttaattgtaaacagtaaataatatcatgaatcaaatcatcgtaggaatgggtgaggcactatgggatgtgctgcccgaaggaaagaaaattggtggtgctccggcaaacttcgcttatcatgtgtcacaattcggttttgacagccgggtggtcagtgcgattggcgatgacaagctgggtaatgagatacttgagaattttgatggtaagaacttgaagtatcagatagagaaagtgccttatcccacaggaaccgtacaggtggaactggaccctaatggggtacctatgtatgatataaaagaaggggtggcttgggataatataccttttacacctgctttggaagagttggcaaagaatacccgttccgtatgtttcggctcgttggcacagcgtagtgtggtttcaagggaaacaatcaaccgttttctggatgtgatgcccgaaggagaaggacaatgtaaaattttcgatgtgaatttgcgccaaggtttctatacgaaggagattctttgcaactcgatgaaaaaatgtaatattttaaagattaatgacgaggagttggtcacagtgagccgtatgttcggttatcccggcatagacttgcaggataaatgctggattctgttggcgaaatataatctgaagatgttgattttaacgtgtggtgtcaatggcagttatgtctttactccgggtgagatttcatttgtagagactccgaaggtggaggtggccgatacggtaggtgcgggcgattcgttcacggcgacttttgtagctgctattttgaagggaaagccggttgccgaggcgcataaactggctgttgaggtttctgcatacgtatgtacgcaaaacggggctatgcctgagttgccggctcgtttaaagaatgagttgatttaaattttaatggttgcggatactcattcaaattggattggaaatcatattgtctgaggctgtatcgcgaagaacctgtaaatacaaagtagatgtaatcaggttcttcgcgatgttctttttttactttctcttgcagatgtttgttttattagcggttaccttttatctttgttatctataaataccttgaggaacatgaaaaaacatcttttgtttttgattttatgccttatgggaattctgacatcgtgcagtcagaaacatacgcgctattacattggtgtttcacaatgtagtgatgacgaatggcggcataaaatgaatcatgaaattgtacgtgaagccttgttttatgatggggtggaggtggagatccgtaccgcgaaagataataaccggaatcagatagaagatatcaactattttattgacaggaaagttgatttattgattgtcgctccgaatgaggcggcggctgtcactcctgttgtggagaaggcatacgggctgggaatacctgttgtggtaattgaccgtaagattttgtcggaccgttatacggcttttgtgggtgctgataattgtgagattggcaaagatgtgggacaatatattgtgaaccgtttgggtggaaaagggaagattttggagataacgggactggaaggttccactccggctatggagcgtcatagaggattggcggatgccttgaaggcagagcctggaatagaaattgccgccagcgtggacggagcctggctgcaaagtgtggctggggagaaaatggattccatacttcaagacaataaggatataaatctggtttttgcccaaaatgaccgcatggctgtcggggcttatttgtcggccagacagcgacagttggaaaaggaaatgttgtttgtcggtattgatgcgttgcctggcaaggggtatggagtggagcaggtactggaaggagtgttggatgccacttttatttaccctaccggaggagataaagtgatgcaggtggcgatggatattttggagaagcgtccgtatgaacgggatactaagttatcaacagcccttgttgataaaacgaatgcccgtgtcatgcagttgcagacagaccacattgccgaacaggacggaaagatagaacggctgaataatcaggtggacgaatattggtcaagatactctgcccagaccatgtttctgtatgcatgtctgattatcctgttactgtttgctgccttattggcgatcatcgtccgtgcgtattggacaaagaaccggataaacatggagttatcccgtcaaaagaaacaattggaggaacaacgcgaccaactgatcagcctctccaagcagttggaagaggcgactcatgccaaactggtcttctttacgaatgtttctcatgatttccgtactccgcttactttggttgccgatccggtggaacagcttttagaggataaagacttgacctctaagcaacgatccttattgaaagtggtacataagaatgtgaatattctgttgaggctggtcaaccagattcttgatttccgtaagtatgaaaatggtaaactggagttggtgagaaccaatatggacctgcgtgcgcaattacaggaatggagccatgcatttcaaacattggctttgagaaagcatatccattttgttctggacgtgaacgatgaccggacagactgtctgatggcgttggatgccgaaaagatggaacgtgtctattttaatttgttgtccaatgcgtttaagtttaccccggagaatggaactatcactgtcacactttctactttaataaaggaggaaaatagaagatatgtccgtctggtagttgctgataccggttcgggaatctctgtccggcacatccggcatattttcgaccgcttttatcagatggatgtgaaccatgcgggctcaggtattggtcttgctttggcaaaggcttttgtcgagttgcacggcggggtgataacggtggacagtgtggaaggaaaaggaacagtgtttacggtggatattcctatggagatagtggaggagcagtctgtagatcggatacaggaaccgcacactacacagccgacggtggtggaggaattggaggaaacggaaacagaagaacggcttccggatgagaataaggaatgcatcttgataattgacgataatgcggatgtacgtggctatgtgaaatcattattgaaagaggaatatacggtgatagaggctgccgacggacatgccggattaaagaaagctatgaaatatgtgcctgatgccattatctgtgatgtgatgatgccggtgatggacggattggaatgttgcaggaagctgaaaatggaattacagacttctcatattccggtgatgttgcttactgcctgttctttggatgaacagcggatacaggggtttgaatgtggagcggattcttatatttccaaaccttttaattccaaattgttactggtgcgtcttcggaatctgattgataaccataagcggttgaaacagtttttcggagataagattactttgtctaaagagtctgtaagcgaggtggataaaggatttgtggagcgcttcagagagctgatagaagcaaatttgatagattctgagttaagtgtggaagaattaggcagtaagatgggattaagcagggtgcagctttatcgtaagattaaggcacttaccaattattctcccaatgaactggtgcgtattgccagattaaagaaagctgcttctttgttggcttcttctgagaaaaccatatccgagataacgtatgaggtaggttttacatctccttcttattttaccaagtgttacaaggaatatttcggagaaagtcctacggatttcttgaaacgcagaggataattgtgggggcggacacgcagctccgcccctacaaggaatactttaaatcagtgttgataaatctttttcggctacaaaagagagattattaagaataatcacttcccttgctctgtccggattgtctgtccggaaaatcaagatgcctttatttcctaacaggaaggaatacagataagtaatgcctatttgggcttcactgaaaatggtgatggcgtctgccgcccgccccggctgattgtctagtgtgatggcgaacacatcggagagtgccacggagattcctgcctctttcagcgtctcgtatgcgcgtttgggttccgagcagatgatacggtaaataccatactctactgtatcggcaatggtagaggcaatcaactgtatgcctgcttctttcaataagttcaatactttctgtagtgtccccgatttgttttcgatgaagacggataattgttgtatagtcataaacttattttttaaaaggttttacgtaagtctttcacacggactgctttaccttccgatttaggcagtgctcctttgggtaccagtttcacacgtggggtaaccaatatctcatctttcagttggcgggtaatttcccgggtcaatgcttgcaggcgtccatagtcatcggtgaacagttggctcaattccacttctacagtcatttcgtcattagattcggcggtttcgagtgtgatcagatagtcactgcccaattctttgaattgcaataaaatcgtttcaatctgaatggggaagatattgacccctttcaggataatcatatcgtcgctgcgccctttcattctgtccagacgtttgtgatggcggccgcaggggcattcccccggcagaatgcgggtcagatcacgggtacggtatctcaataacggcatcgcctcgcggttgatggtggtcagtaccagttcgcccacttcaccctcgggcacaggttccaatgtgtcggggtcgatgatttctacgatataatagtcttcccatatatgcaatccgttttgttcctggcattcaaaagccacaccgggaccgcacatttcggacatgccgaaagagttgtaggcttttacacccagcatatcttcgatgcggcggcgttgttcttcggaatgaggttccgctcctatgatcaatgttctcaatttggtgtcacgacgcggatcaatccccatttcctgcattatctcgtacatacgggctgcgtaactgggaatggcgtgcaaggcggtggttccgaaatcggagatgaatttcaactggcgtttggtgtttccggcagcggcaggtacagtcagcattcccagcctttcagcaccatattgaaagcccagcccgccggtgaacattccatagccggaagagttctggaaaatatctcccggacgtaatcctaccatataaagacaacgggccactgcattagcccattcgtcaaggtctttttgggtatgcagaatgacagtgggatttccagttgttccactggatgagtgaaggcggactgttttttccaaaggtacggacgccagtccgaaaggataagtgtcacgtagatcttgtttggtggtaaacgggattttctgtaaatcatccaatgaacggatatcttccggactcagatgattttcggcaaaccgttgtttatagaaaggggaattcatgcaatggcggacagtcttttgcagtcgttccaattgtagtttctcaatttcgggtcgtgtcagggtctctaactctttgtgtaaatacatagcatttcctgtttagttggttatcagtccgacaaaaatagaaaaaaatataatgcggttgggaataagctgacaaaatatgtatctttggaggattttaatttgaaaatgtgatgaaaaagacattgtttgtaataggtatgctgttatgtgggctttcattgtacgctcaggatatgaaaactctttttattgccatgcccgattcggtggctcctttattgacaaaggtaaatcgtgaggattgtgtggattttctggcaagcaatatgaaagcggaagtgaaaaatcgttttggcaaagtatctgaactgaaaagactgacggatgattatttgtttctgcaaaccaccggaagtagttctatggaaatgaaactgttacccttgaatgattctgtaaaggtgatttgtgtagtgaatactgtttgcggtccggcttgtgatagtgaagttcgtttttataatacggactggcagcaactggcgaaggaggattttattcagcttccctccgtcggggctttttatctgccggtggatacgctgaccgatgaggcttatgccgcgattagagagaaggcggatatggagttggtgaaagccactttatcagaagacaaacctattatttcttttacttatactactccggattatctggcaaagacggaacgggaaaaattggttgtatacatcaggaaagaacctgtagtgtatgaatggaaggggggaaagtataatgatgtatctttgaaataaaggtggatacgtatgataaaataaaaggctgcaaacttatcgggttgcagccttttattttggaacttatgtataagttacaaattactttttcatacggttgccgtagcggctcatgaacttgtctacacgaccagctgtatctactaatttggatttaccagtgtagaacgggtgtgatgtattagaaatttccagttttaccaacggataagtttcaccttcgaattcgatggtttcttttgtgctacaagttgaacgtgacaaaaatacatcaccgtttgacatgtctttgaatactacgggacgatagttttcaggatgaataccttttttcatttctgtatattattttattgttattattttttttacttgtctggtaaacaatattgggtgtaatggtccattttggaccgcaaagatactgcttttctttgaaatagaaaaaacttcgggctgttttttcttctaaaagccttattttcttcttttatagtattgtaaggtagacattacaatataatcagtttgtatgttttagtgaagaaaatagttaataaaatcattttttatgagatatttttggtgtgaacttgccatagttagcgcatttatgattacttttgcagtggaatttaattcactaacaattataaatattagaacaatggttaattacaaagatttaggtctggtaaacactagagatatgtttgctaaggctatcaaaggtggatatgcaattcctgcattcaacttcaacaatatggaacagatgcaggctatcatcaaagctgcagtagaaacaaaatctccggttattttgcaggtttcaaaaggtgctcgtcagtatgctaacgctactttgttgcgttacatggctcagggtgctgtagaatatgcaaaagaattaggttgtgcaaaacctgaaatcgttcttcaccttgaccacggagatactttcgaaacttgcaagagctgtatcgactcaggtttctcttctgtaatgatcgacggttctcacctgccttacgaagaaaacgtagctttgactaagaaggtggttgactacgctcatcagtttgatgtaactgtagaaggtgaattgggtgtattggccggtgtggaagatgaagtttcttctgatcatcatacttatactgaccctgaagaagtaattgattttgctactcgtacaggttgcgactcattggctatctctatcggtacttctcacggtgcatacaaatttactccggaacagtgccacattgatcctgctacaggtcgtatggttcctcctcctttggcattcgaagtattggatgctgtaatggaaaaacttccgggattccccatcgttcttcatggttcttcatcagttcctcaggaagaagttgaaacaatcaacaagtatggtggtgcattgaaggctgctatcggtatccctgaagaagaattgcgcaaggctgccaagtctgctgtttgcaaaatcaacattgactcagactctcgtttggctatgactgctgctatccgtcagacttttgctgaaaaaccggcagaattcgacccgcgtaagtacttaggtccggctcgtgacaatatggaaaaactgtacaagcacaaaattattaacgtgctgggttcagacaataaattggctgaataattgattcatcctatataaacagaaaaaagctgctttctttattgaaggcagctttttttgttttaagaccggtttcggtattgaagaggggacttgcctgtatgtttcttgaaatagcggccaaaaaaagattggtcagggaaagataatcggttggagatctcttgaatacttagagatgtggattgtagtaatgctttaatctcaagaattacatgtcggtcaataatgcttttggctgtgttgccggatacgttttgtacgattgtggaaaggtaacggggagtgatgaatagttcggctgcatagaaagatacctcacgttgggtggtgcaatgtttatgaattaattggatgaaacgtttgaatatctcttcctggcgatttattccttcggtctttttttgcaggaacaggtgttgggtcttgtcatagaagtccagaatgaagttttgaatgaaatttttgaagatctgaatgcggaaactattatccctgtcttcataaagatctttcatgaccaagctgagtccgatgaatggttttacacgttcttcagggatgacaatgcatggatgctcttttagaaagtgaaagaaggagggatccagacgtgaggtgatctctctgaaaagggtgtcggaaaaaacaatataggaaacggtaaaatcatggctggcgcaggtgcaattgaagatactgccggggagaagcagaagttgggtgttctccgtcacttcgtatgcctgcaaatcaatttctatgtgggcttttccgctacggcaatgaaaaatagatgcgtctgctaactttatgatctgattggagcatatatctatactttcttctattccggtgataaacggttcattctctggtaaactcaatatttccatatttattcttgttttgatgcaaaattaactattatttttgttataataggaaatctattccgaatttgaacaatggtagctaataattgaatgtgtcggcttgaaaaattccatctacctttgcgtccgaatttaaaagattggaatatgatgacattgaacaaaaaatggatgcgactaatggtattggttggttgtgctgctttgacagcgtcgtgtaaacaggcgcctgttgcacaaatggaggcggaatatgcggtattaaaggtatcaccgtcggacaaagttttgtctactacttattcggctacgatccgtggccgccaggatattgatatttatccgcaagtttccggtttccttacccggctttgtgtggaggaaggacaggcagtgcgtaaagggcaagtcttatttattattgaccaagtgccttataaggcggcattggaaactgctgtcgccaatgtggaatcggctaaagccggtcttgccacagccgaactgacttataacagcaagaaagaattgtttgccaaaaaggtggtttcagagtttgatctgaagactgcggaaaactcttacctgaccgctaaggctggattggctcaggctaaggcgcaggaagtcagtgctcgcaataacctttcatataccgaggtgaaaagtccttcggacggggtgattggtacattgccttatcgggtaggtgcattggttagtgccagtttgccacaaccgttgactacggtttctgataattcggatatgtatgtctacttttcgatgactgaaaatcaattgttggctctgacccgtcaatatggttccaaagcagaagcgttgaaaaatatgccggaagtggaactgcaattgaatgacaagtctatgtatggcgaaaagggacgcattgaaaccatcagtggggtggtagaccgtaatacgggtaccgcaagtctgcgtgccgtattcccgaataagaatgggttgctgtatagcggaacatcgggaaatgtgattcttccggttacgatgaaaggaagtttggttattcctcaggctaccacttttgaaattcaggatattacatacgtatataaagtcgtggacggcaaggcacaatcagctcctgtcagtgtgacccgtgtaaatggaggacaggaatatatcgtgaacgatggattgaaagagggggatatcattgtagcggaaggcgtaggtttgctgcgtgaaggtactcccattaaagtaaaacagaactaagaaagactatgaatttaagaacctttatagaacgccccatcctgtcggctgttatttctatttcgatagtggtagtgggtatcatcgggctgttcactttgcccgtcgaacaatatcctgatattgctccgcctaccattcaggtaagtacctcttattttggtgccagtgcggaaactcttcagaagagtgttatcgctccgttggaggaagcgattaacggtgtggaaaatatgacttatatgacttctaccgcttcaaatgccggagttgtggatatcactgtgtatttcaaacaagggacagaccccgatatggcagcggtcaatgtgcagaaccgtgtatcgaaggcaacaggacagttaccggcagaagtaacgcaggtgggtgtgactacctcaaagcggcagaccagtattttgcagatgttctcactatatagtccgggtgattcgtatgatgagaaattcttgtccaactatatcagtattaacttgaaacctgctattcttcgtatccagggtgtgggtgatatgatgattatggggggtgactatagtatgcgtatctggatgaagcctgacgtgatggcccagtataaattgattccatcggatgtgacccaagtgttggctgaacagaatattgaatcggctaccggttcattcggagaaaactctgatgaaacttatcaatatacaatgaagtataaagggcgtctgattactccggaagagtttggggaaattgtgatccggtcttcggataatggcgaagtgttgaagctgaaagaaattgccgatatagagatgggcgaggaaagctatgcctatcatggggctatgaatggtcatcctggtatttcctgtatgatttttcagacggcaggatcgaatgcgacagaagtaaacaataatattgatacctttttggaagaagcaaggaaggatctgcccaaaggggtggagatggttcaggttatgagctccaatgactttttgtatgcatctatccatgaggtgataaaaaccttgttcgaggccatttttttggtaatcttaattgtatatgtatttttgcaggatatccgttctactattattccgttggtggggatcatcgtgtccttgattggtacatttgcttttatgtccatagcaggattcagtatcaacctgattaccctgtttgctttggtgttggtgatcggtacggtggtggatgatgccattgttgtcgtcgaggcggtgcaggcgcgttttgatgtgggatatcgttcttcttatatggctagtattgatgcgatgaaggggattagcaatgcggtcatctcttcttcgttggtatttatggctgtgtttattccggtttcgtttatgagtggaacttcgggtactttttatactcagtttggtttgactatggcggttgccgtaggtatctctgccgtcaatgcactgactttgagtccggcgctgtgtgctttgttcttgaaaccgtatatcaatgaggatggaacggaaaaaaacaattttgcagcacgtttccgtaaagcgttcaatgctgctttcgatgcaatgattgaacgatataagaaaggggtattgttctttatcaaacgcaaatggatggtatggacacttcttgcggcctcggtagtactattggctttcttgatgaatacaactaaaaccagtttggtacctgatgaagaccagggggttgtatttgtgaatgtcagcacggcggcaggtagttcattgaaaacgactaatgacgtaatgatgcgtattgaaaagcgcatgatggatattcctcaggtgctgcatgtgcagcgtgtggcaggttatggtctgctagccggacagggtaactcttttggtatgttgattctgaaactgaaaccttgggatgagcgtgaaggaaaggaaaatgatgttcaggcagtaatcggacaggtatatggccgtacggcagacatcaaggatgccagtatatttgctatttctccgggtatgattccggggtatggtatgggtaatgcgttggaactccatatgcaggataaacaaggtggtgatgtgggcactttcttcaataccactcaacaatatctgggtgctctgaaccaacgtcccgagatcgcgatggcatactctacttttgatatccgttatccgcaatggacggtagaagtggatgcgtccaaatgtaagcgtgccggtatcactccggatgctgtgctaagcacattatccggctattatggtgggcagtatgtttcaaattttaatcgtttctctaaagtatataaggttatgattcaggcagatccgaaatatcgtgtggatgaaagctcgttgaataatatctttgtgcgtatgtctaatggcgagatggctcctctcagccagtttgtgacattgacccgcagttatggggcagaatcgctgagccgtttcaatatgttcaattctattgctgtaaatgcaatgcctgccgaagggtatagtaccggtgatgccatccgtgccgttcaggaaactgccgtacaggcacttcccaaaggttttgggtacgactttggtggtattacccgtgaagagaccgaccagggaggtactaccattatcatctttgctatctgtttcttgatgatttatctgattttaagtgcactttatgaaagtttcctcattccgtttgcggtgttgttgtctgttccgtttgggctgatgggtagcttcctgtttgcgaagatgatgggactggagaacaatatttatttgcagaccggtttgattatgttgataggtttgcttgctaagactgccattttgctgaccgagtacgctaccgagcgtcgtaaggcaggtatgagcctgacttccgctgcactttctgccgccaaagcccgcttgcgtcctattctgatgacggcactgactatgatttttggtctgttcccgttgatggttgccagtggagtaggtgctaatggaaacagttcgctgggaacaggtactgtgggtggaatggtgatcggtacgctggcgttgctgtttattgtaccttctttgtttatcgtattccaatatttacaggaaaaggtacgtcctattcagtttcagccggcggccgattggcagattcaagaggaatgtgtagaagcaaaagaagagagacaacaccacatcgaaagcaaaaacgaagagaaaaaatgaaaaaacagatcatcactctgactgtcgcagcgctcacactgagtagctgcggcatatatacccaatataaacctgcaaccgaagtgcccgataatttgtatggggaagaggtggcagttgctgataccgtggataatatcggcaatctgagctggcaggagatttttacagatccgcggcttcaggaattgatagagcaaggcttgcggaacaatacggatttgcagtcagcacaatggcgtgtgaaagaggcggaagctgctatgctgtcagccaaattggcttatctgccttctttcgctctgtcacctcaggggacagcaagtagttttgacaaaggaaaagctgtacaaacttatactttaccggtggcggcaagttgggaaattgatattttcggccgcatccgtaatgcgaaacgccaggcgaaagcattgctggaacagagccgtgactataaacaggctgtccggacacagctgatagccggtatagctaatacttactataccttgctgatgctggacaatcagctggccatttctgtccggactgaaaagtcctggaaagaaaccgtagatgcaacccgtgctctgatggaagccggattggcaaatgaagctgccgtttcacaaatggaagctacatattatactatatgtacttcagttcttgatctgaaagaacaaattaaccaggtagaaaacagtttgtcgttgttgttggctgaatctcctcatgctattgagagaacgggcacatgggacagttcttatatgatgaaggaacattttccggtaggcatccctgtgcaaatgcttgccaaccgtcccgatgtacgcagtgcggagcgttcgttggaagcagctttctatgccacaaatcaggctcgttccgccttttatccttctattgttttaagtggaagtgcgggatggactaattcagcaggaagtatgattgtcaatccgggcaagttcattgcaacggctgtagcttcgttgacccagccactgtttaataaaggtgcgaacatagcacagctaaagatagctaaagctcagcaagaagaagccaaactgagttttcaacaggctttgttgaatgcaggaagtgaagtgaacgaggctttggtgaaatatcagacggcccgtgataaatctgtttattatgataaacaaataaattcattaaataaagctttggaaagtacctctttgctgatgcaacatgggaatacgacttatctggaagttttgacggctcagcagactttgcttaatgcggagttaactcaggttgctaaccgttttactgaaatgcaaggcgtaatcaatctctatcaggcattgggtggaggtcgtgactaatttagcatactgttatcttcaacgtgttgaagaaagagaacgctgctctccgtgaggaaagcagcgttcttttatggttgtcaaggttccactataacacaaaccggattggattcttcattgatttcctgtaaaaagcttagctttccttcttggacaattcccggatttttatccatccattcgtctattttccctatctccaataaagcggcatactctccttcttctgtacaagtgatgggatagaaaggcatgaaatgcgtcaggtcatctgtcagccccacattggcatcattcatataagtaatatgtttttctttgtcgtaaataccgtagaagggttttctcttgtcgtataatccctgtagagatataaagaagagatgtttgggagtttccagaataccggttataacgatgtagttgtctgtatcctctttttgtcccattttttcagccgggaaatgccattgcccggtatggaaagtggtatggacagtagcttcgtgtcctttaatgtcgtagattgtgtcattgaacgcttttctgaaatgtatgctgccgttgttcagccaaagtgaaggctggtctataggaagaacagtcattgttccatcctgataatttatatatattaaccctcctatgttggcgttgccgggtaattgcttgaatacgttgatgctggatatctggtccatgcccataggatcacctggattggcaaattccggcaatgagtcttttacttctccctgttcgttgaagtaaagtaacgcacttgcttgcggttgtcctattccttctccataatgagcaagaataagggagtcggaaaaagtaaagtaaagggatggggaaatcttttgtggtaggtgtacttgccctagatagttaccttttgtatcgtattttaccaacttgtcgggttggcgataaaagtagagattgttggtatgggggtgaataaagcagttggcattgctgtagccttgtggatcttctcctttgtgcccgatgctgccaagatattttccggtttgcttgttgaatgacaggcatcgtccgttggtagagacaaagatatggtctttagataacttgatggaataggagttgccaatcagggatgagtctgttgtttccaaagggatataacggatttgttttcccaattgggaggtctttaattctgtgaggtgttccagacttacggcaatgtcaattgcattcgggtcattcgctttgttttggggagtacaggagcctaataataggagtaggccgcccagcatgatttgcttcttcatagtagtattgttttatggaagaaaagaagttgtttgcatgggcaacttcttttctttgtgtttaaatgatgttgtgtttattatcttgcagcaaaaaacaaggagtttcctgtagctattcttgcggtagcaataccttgtgcatcaggagtgacagtcatggaggttccgttttgcaggctcaaaacagccgttccgtcttcgttcattttcacaagttcgaagctctgtccgtcggctacggcattccatgtattgttttctttgttatagaccaaatctacagatttgtcttctccttttttggtaatggtataaccgttttcgttggtttttaccaagtattcgccattttctccttgcactgtttttacttcaccgatagaagctgtagggttggaaccgctccagaattcgatggaatttaaaaccaatgcgtctgccagataagcaatttcataaacagggacaatatggaaagcgagaaagataagttcgttgacaaacttgttgcttaccccctggttccagtctttcaaactattccataatccgaaagaaccgatgcatgatgaaaataagacgctgccactcaacatggcgcaaacaagaaatgttttgctttttttcatgatcaataaagttaagtttataaaaagtaattttatgacgatttcctacaataaaacgatttaatcgtcacgcaaagatagaacttttttatggaaagaggcttctctacctaaaaaactgtatctttgtaagctgaacatgaaaaactattaatcaaaaatcttataaaagaatgaaagaacaaattcaaaaaaagctcaatgactccaaggttcttcggtggagtgtgttggcgttggtggctttcaccatgctatgcggttattttttgaccgatgtaatgtcccccttaaaaccgatgcttgaaaaggagctgctgtgggatagtctggattatggtatttttaccagtgcatacggttggttcaatgtctttgcctttatgcttattatcggtggtatcattttggataagatgggagtgcgctttactggtatgggagcatgccttttgatggtgttgggctgtgggttaaaatattatgctatttctactacatttgctgagggaagcactttgcttggaatgaaaacccaggtaggactggctgcgttgggatatgctatatttggtgtcggtgtagagattgcaggcatcacggtttcaaaaattattgtgaagtggtttaaaggaaaagaaatggctctggccatgggtatggagatggcgacagcccgtttaggcactatgctggctttggctgttacggttcctatcgctactttctttggtattactgatgatgagggtgtgttccatcctaatattcctgctccattgttgctgtgccttactatgctttgtattggtacggtagcattttttatttatactttctatgataagaaactggatgcttctttagaagaagaaggggcggaacctgaagagcctttccgtatgaaagatatttggttgattgtaaccaataaaggattttggctgattgcgttgctgtgtgtgttgttttattctgccgtattccctttcttgaaatatgctacagacctgatggtgcagaaatataatgtagatccggaattggcgggtactattcctagcctgttaccattgggaactttgttccttactccgcttttcggtaatgtgtacgatcggataggcaagggagctacgctgatgatcatcggttctgtgctgttgatttttgttcatacaatgtttgcgttacctgtcttgaatgtatggtggtttgccactatcattatgattatattggggattggcttttctttggtgccatcggctatgtggccctctgttcctaaaattattccggaaaagcagttgggtacagcttacgctttgatcttctgggtacaaaactgggggttgatgggtgtacctgctttgattggttttgtcttgaatgagtattgcaaaggaccggtagtagatggaatgcagacttatgattatacacttcccatgtggatatttgcaggctttggtgtggctgcattgttctttgctttgtggctgaaaggtgagaataagaaaaaggggtatggattggaggaaccaaatattaaaaaataattgattgtcttttagtgaaaatgagggtgtccagtgtattatggataccctcattttgctatgtaggggtgagatggagttttagtctttatcaatcttcacaattcctccggtattaggattaaagatcactcgtgtatttacttttttattaaaaaggttatctatcagacattccgttgtcccaaattgtgtaacaggtagttctccgtcaaaataacgtttgtttggagtgaatacggtaacctgagcttttcccggaatattgtaaataacaccatccgtcttctttttttctttgcctttcggatccatcggtggcaatgtttcttggttgatgatggaaatgtaataaggttcaccggataaattatcggcatccagcatccctagtttctttgagaaacggaaagctactttttctttcatgtccgcttctggttttatgcggatggtaaatgatttttctatgcggtctgttgtgccggcaaacatttgcatcatggcttgttcctgttcatccagattgtccagcatgagttttaaagcggctccgtctttgggcatataatctgcttgcccgcgggtcaggctgtttttgctttctcgtatattgtagatttctttcgccaccaactcagccattttagcggtagaaccggctatcagaatctcttcggtcataaaactgcgtgggtcaatacgttttttgaccgtatcggcaacctttgtcacaggtgctttctctataggagaggtggtgttgatagcctttatgattccttcaggagtcaattctacctgtgaggccgcacttttgtctttcagttttacagcgtatgcattgtccgggtcaggaatgcctatggaatttaccttgatactgtttatttcccaatgttcttccggttgggatgatatgcctgtaaggcgcagatagcgatcggcgtattggcagaattctccgggcgtgtagacaactttggttgcggtgacttgcaattctatttcggtcttaggcaaataataaaccactccttctcccatggttccgggagtatatgtactgacatcttgtgcggtgccgcttaatgaaaccagtaaccctgctgcgattaatccttttttcatatttctatattctatcatatatgtaagcaaatatagctattcttttgtaaatctgccttttgtttctgttaatttcttccatgctgcgggtaatgcgtcaataagatcacttgaggtggttcctatttctcctttttcttccgctgcaatgtctcctgccagaccatgtacgtagacgcccaggcggcatgcatcttcttgagtatatccttgtgccaataaggctgccagaataccggtcagcacatcaccgctgccggcggttgccatacctggattcccggtgggattgaaataacaatttccttcgggggtgacaactgtgctccatgatccctttataatgatatagctttgcagataggctgccagttctttcgtctttgtcagccgttcgtaagtatccatgcatttacctatcagtcgttccagttcctttagatggggggtgagaatacagcgcttcggcatccggctgagccagttgcggtgagtgccgaaaatattaatggcatccgcatccagcactaaaggtaccggacaaccttgtatttgttccatcatggccaacgctgtatcttcttcttgtcccaaccccggaccgatggctatggcttgataacggtctgtatccacgggctcggcaaaataatggtcgtgtatgtctgtctgtacaatggcttcgggaacagtggtctgaagtaaatcatggttgtggataggtacatggacagtcagtaatcccactcccgaacgcaggcaggcacgggcagataaaatggatgctcctgccatgccataagatcctgcgatgagcagtgcatggccgaaagttcccttgtgggcaaatcgtttccgcggtttgatgagactgcgaatttcttcttcctctgtgatatagtagggactttgtgctgtatcaataaagtcttttttcagttggatgtccaatagttgccattcgcctacaatgtcttcgttttcggggaaaagaaaggataacttaggtagctgaatgctgagagtgacatccgcgcgtatcatgttttgacggatattataagtgttgtcctcacacattaatcctgaaggtacatcaatggctactacctgtgccttggatgcattaatatatttcactacggcagcaaatccaccgttcagtggtttgttgagtccggaaccgaataatccgtctactaccagatgcctttctgtcaggactggaggatcaaattgtgtgcttacttcagtaaagtacaccgagccgcattcttttaaccgttcaagattggtctgacattcttccgacagttttcctttggtgttaaacagaaagacttctacgtgatagttttgcttagacaacatacgggctacggcaagcgcatcgcccccgttatttcccggtccggcgaatactacaatatggaaagaagtatcccatcggtgggtaatggcacgagtcagttcttcggctgcccgttccatcaaatcaatggaggcaaccggttctttggcaatcgtgtacttgtccagctcttttagttgggtgctcgaaataattttcatgacaatctcttttgtttgaacgtacaaagataacactatttacaaaaagaggttatgtgaatacttcgatacttggaataaaaatgttatttttgcagcaatttaataaaatagcggttatggataccattcaaatcaaagataaacgtttcactcctttcattcctgaagaacggatcttaaaagaagtggcacgggtagcgagtgagattaatcgggatttagaaggaactaatcccttgtttttaagtgtattgaacggcgcattcatgtttgctgccgacttgatgcgtaaccttaccattcccagtgaaatttctttcgtgaaactggcctcttatgcaggaacttcttctacaggaaaggtaaaagagttggtaggtttgaatgatgatattgagggtcgtacagtggtgattgtggaagatattgtggataccggggtgacaatgaagcacttgttggaaacattacaagctagaaaaccgaaagagatccgtatcgctaccttgctgctgaaacctgataaattgaaggtggaattggatatacattatgtggccatgcgtattcccaatgattttattgtggggtatggtctggattatgatggtttgggacgtaactatcgggatatttacaccgtaatggaatgaaatttgtacaactaaatataaaaataaaaggtaaaacaagatgttgaacattgtaatttttggagctccgggttctggtaagggtactcagagtgaacgtattgtagagaaattcggtattaatcacatttcaacaggggatgtgcttcgtgctgagattaagaagggtacagaattgggaaagacagccaaaggatatatcgatcagggccagttgctgcctgatgaattgattattgatattctggcaagtacgctggatagctttaaggaaagcaaaggggttatttttgatggatttcccagaaccatcgcccaggcagaagcgttgaagaaaatgctggccgaacgtggacaggaagtatctgttatgttggacttggatgtacccgaagaagaattgatgactcgcctgattaagcgtggacaggaatcgggacgtgcggatgataacgaggaaacaataaagaaacgtttggttgtttatcactcgcagacggctccgctgattgactggtacaagaacgaaggtaaatatcagcacattcacggtttgggtacgatggatgctatttttgccgacattgttgctgctgttgaaaaattatagtaatatgctaatgtgctgatgcagcagtccgccaatgtgtcagtctgcataatgatacatggagtacagtttcgttggcacattagtaaattgataaattagtaaattattaattatggctgaatcgaattttgttgattatgtgaagatatattgccgctcgggtaagggcgggcgaggctctgcgcatatgcgtcgtgagaagtatgtacccaatggtggccctgacggtggtgatggcggtagaggaggtcatgttattttgcggggaaaccgtaattattggacattgcttcacctgaagtatgaccgccacgtgtttgccacacacggcggcaatggatcgaagaacaaaagctttggtaaagatggtgaagacaaagttattgaagtgccttgtggtacagttgtttataatgctgaaacaggtgaatatatctgtgatatcaccgaacacggacaagaaataattctgttgaaaggaggacgtgggggattgggaaactggcacttccgtacagcaacccgtcaggcgccacgttttgcacaaccgggagaacccatgcaggagctgatggttattttggaattaaaactgttggctgatgtaggtttggtaggttttccaaatgcagggaaatccactttattgtctaccgtatcggcggcacgtcctaaaatagccaattatccgtttactacgctggagccgaatttgggtatcgtgtcctatcgcgaaggaaaatcttttgtcatggcggatattcccggaattattgaaggggccagtgagggaaaaggactgggacttcgtttcctgcgccatatagaacgcaactctttgttgctctttatggtaccgggtgatacagatgatatccgtaaggaatatgaaatcctgctgaatgagttggctaccttcaacccggaaatgttggataaacaacgtgtgcttgccattaccaaaagtgacatgttggatgaagaactgattgccatgttggagccgacattgccggataatgttccgcatatctttatctcgtcggtaactggcttggggatacagcagctgaaggatattttatggacagaattgaataaggacagcaataagttggaaggtgtccgtacggaaacaattgttcatcgcgccaaagatgttgccaaactgcaggaagagttgaaagacatgggtgaggatgaggactttgaatatgaatatgaagaagatgccgatgatgacttcgattatgaatatgaagatgagaattgggacgaagaagaggaaaagaaatgaaacggctgacatcagataataaaatgttgggatatgagctgatgaaggcatatcccaacatttcttgtttttctaccacccgtcacggaggttgtagtaagggaaactacgcttcgttcaattgtaacggatattgtggggacgaggcagaagatgtgaatcgcaaccgggaattgctgcgtagcttgttacccggggaatcggtagaactcgtaattccgcatcagacccatagtgaccatgtgaaagttgtggatactattcaggtaaatactgaattggaaggagtggatgcattggtaacagacattcccggttattgcttgtgtgtatctacggccgattgtgttcctgttttattatatgatacccgaaagaaggtagtggctgccattcatgccggatggcgtggtacggtggcccggattgtggagaagacagtttcagtcatggataaccaatacggctcgcaagggaaagatctcatagcttgcatcggtcccagtatttcattggaggcttttgaagtaggggatgaagtttatcaagctttttgtgaggcggggtttgatatgaatcagattgcccgtaaagaagcaaaatggcatattgatttgtgggaagccaaccgtcagcaattgttggcatacggtgtgaagcctgaacatattgagatatccggcatttgtacgtatcataataacgatgatttcttttcggcccgccggcaaggaatccggtcgggaaggatattatcgggcattcttttaggtgtctgaggaacacactcattggaagaacgcagtataaaaataaatatggaaataaaagtatcggaagaaataaagaaagcctgtccgcagtttgccggtatagccatccgtgctacggtagagaacactgcttatagcgaatctttgtggaaaaagatagacgagttcactatatgctatcgtgaaatgtacactacggattccattaaggatatggttacgattcatgccactcgggaggcttataagaaatgtgggaaagaccctagccgttatcgtccttcgggggaagcgctctgccgtagaatcctgcgtggaatttccttgtatcagatagatactttggtagatcttattaacttggtatctattcgttacggatattccatcggtggctttgatgcggataaaatacaaggagatacattggtgttgggtatcggtaaatccggagagccttatgaagggataggacgtggagagttgaatatagaaggaatgcctgtttacagagatgctatgggcggaatcggtacgccgaccagtgataacgagcgtactaaactggaggcaggaactacgcatctgctgactattattaatggatatagcggcaaggaaggtttgcaggaagcggcagattatatgttggagctcttgaaagagtttgcagcgtccaaggatgaagaattaatttatttttaaaatgagataatgaaaagcacacaattactatttttattgttcataagtgtggcggcatgggctggggggccggccaagagtaattttaccgcaatggaagtaaaccatatcagagtcaagactcccgggctctttaacgggcgcaaaagtttctccattcatctggatagtataaaagagaatgaatattgttttcctcttcccggtggtaaagtgatttctgcatacggagcccgccgggggcacagtggaacggatataaagactaaggccaatgatactatccgttgtgcatttgatggaatagtacgtatggcaaaaacatacgctgcttatggaaatgtagttgttgtgcgtcatgataatggattggaaagtatttatagtcataattcccggaatttggtaaaatccggagatatcgtgaaggccggtgatgcagtaggattgacaggcagaaccggacgtgccactactgaacaccttcatctggaattccggatagatggacaacatttcaatccgaatctgatttttgatatgaaagaccgtactttgcacaaaacggaaattgtttgtaccaaagccggcaatagagtgatagtaaaacagaatttaacacctaaaaaatagacgatggacatagaaaaagcaatcaccgaaggaattgtattcaaaggtggtaaatctcctagtggtaagcaagaagataaagtgaagaccaaggctaaaaagaaaagctatataacagggttgcatgggtcgggagctgccaagatgaaagctgagtttcgtaaaaaacgtgctaacagacataagaataaataggaatgtagattgaatttaatattcagtactttattaataattaaacaattatcctctcctttgttttggaattattcgtttttatataaaatatgttgtaaaacatagaataaactgtacctttgcaatgtaaaacacaaagaaggcaaacctcttcggcgtggattaataggtaaaaagtttaatttaaaaatgacaaaagagatgaaaaagattgtattgtctattattgtagcattgattgctattactgcaaatgcgcaggtgtatgtaggtggaacatttggagtaggttctgataaagtggaaacagaaggagcagaagttaagaatactactttcaagattctgccggaggtcggttatgaactaaatgaagattggtctgtcggtacagtagtcggttatgaatataataaaagcggtgatgtgaaaactaatactttcactattgctccttatgcacgttatttctttttgaatagtgatgtagtccggttatttgccgatggcggatttggcttttctacttcaaaaacgaaggggaatgacgctttgaattcgtggaatattggtattaaaccgggtattgccatcaaattgtctgatcatttttgtctggttgccaagtatggttttcttggatattccaaaaaagagaatcatggatatgagagtgaaaatgttggtatagattttgatacggatgagttaaactttggctttcattatatattctaatcatatataaatgtatctgataatcaggaatcatataactgtataatagtttggtgagcggaatttttcattttatgaaagattccgcttattttctttacacattaggactggtttccaaaataaagcttatatttgtgaatgtaatgacggtataaaggaattgggaactgaaatttattattaactaaaaacaaacagtcatgaaaaaactagccttttttattttattgtcattggttacactagggacattcattaaatattacaaaatcagccaact

SEQ ID NO: 3881 - DNA, 53519 bp, Unknown
  gut microbiota DNA sequence
tactgaacacataatggattaagattataatgaagccacaaaggtaggaaggaaaagaggggaaaaaaacacgcacgaggccgaatgcttactaattaaactggcaatctgtcaaaatgataatgccggtgtatgagggtgtcctgtttcaaaggatacagtttatgtattttcatcgtattctcgtgcatcggcattttgacagattgtcttctttttctggttatttattcttttatggatatatgtgaacgtatatgtagggaaatgcatacatacgtgtccgacagggatctttatgccttttgagacccctctatttattgagccagctctttcaatatctcctctattttctgaaagagttgtcctatgtgcgctccgtccacaaaagcatggtttacagtgaaagcgatgggcattaccagtcttccttcgcgtggcactactttgccggcattcatcagcggatagtctaatggatggtcgggagccatttgtgtataggtgagtgaagtgaaataaagctgaggcgtggcactcagttggataatatcaaaatctccctgttctgtaatgactttttcggctccatacgggtcaccctcttcggggatgttatggacgatgtgatatgcttcggcataaaaccgttcaaaatctgcatggtaagggatgcggactgtgtagaaagtcttgccgggtacagcgataggtgatatgatgtccacctgatcgtgatagaccacctgtccgtttttatctgtacggaaacggaattctttcacttcattggcagcacgtagcacagcatacaggtaatacaggaaaaaagagcgcttggcggcttttgcagctggaaatgcttcagtgcaatccacttcactggtaatggatatccatgaattatggaagttgcggaaaaaattataattgtcccggcgttcccaggtttcaatatctattatatgtttcatttattttacgggtttaaaagaatggtacatgaagtgcgctcccagcagtatgaacggaatgctgagccattgccccatgttcagcatcatactgtcttcaaaggcttcctggctggcttttataaactccacaaggaagtggaaggtgaatatggtagtgaggcagtagccgaaatagaaaccggggtatagcgtggttttgtactttttatacaaccgcaagcctatgataaaaatcagaagataggcgatggcttcgtagagttgtgccgggtggcggggttgcatatcttcgtgcggaaaaatgaacgcccaaggaacatgagttaccgtacctactatttcaccattcatcaggttacctaaacggataaaacaacctgccagcggggtggcgatggctatattgtctagtacagtcaggaacttcaattttacacggcgtgaatagatccataaggcgagcattagtccgatggttcctccatggctggcaagaccttgataaccggtccattttatcccagaatcggtaatcttgacgggcaacagcatttctacagggtgggagagccagtagcctggttcatagaacagacaatgtcccaggcgagcaccgataacaatacccagcaggcagtaaacgaacagggaatcaaatttttcgtaaggaattttttggtcttggtagagtttgtatatcaccctgtaggccaatgaaagccctgtaacgaacaatacggagtaataacggatggaaatgccgaaaatggaaaagatttctatatcgggattccaaagaatggctgacagtgtattcatatcttgaatttttgtgcaactttgcggtaagtgggcatatccacatccatcttttcgcccagtgcgatcatatcaaacaatagtccttgtatttcggactcgtgtcctttggctatatctttttgcatggatgcggtactgtccgggtctaatttgtcaatcacttttaagttgtatcctatcgggtcttccgcataggtaattcccattttgcggcctatttcagaactttccttggacagactgatgaaagtgtcgcgttctgctccgggatgttgcagaggacccatcgggacatcatggtaggcacctgtgcaggccatagccgagatgaatgaccatttgatgaaggtgtcgcgattgatatcatccgaaatatcggctttgatccctgcttttcttagtacatcggcaatggtttccagacgttccggagccacaccctgttggggacgtgcaccgaaaaccagccggaatattttgcccatttgtgtgatttcacccggtccggaaacgaaacctacgatgtagatgcatccgtccaatactgttacatgtggaacgagttgcccgatgcggggacctataccgtaaacattcaggatggggataatcaaggtatctttatccgaggctttttccaacagatctttgatggaatccagggaatagcccttcacgcatacaaaaattacgttggccttctcgttgtattcctcggctgtgcaggcttgtataggtagaaagtgattaccttttaagtctgatcttaggtgaagccctttttcacgaatggcttccagatgcttgccacgggcaatgcatgttacgtcttttcctgctaaagcaaggaaaccggcgatgcttcctccaacgccgccggttcccacgattaaatatttttccatgttagttgtattttgttttaggaaacaaaacactgacttatcggtctgccatcagttttgctggtttcctgatgttctttcatgcattgcatggcatgacaagtcttttgcgttttgatttaccttatacattgaaacggaagtgcatgatgtcaccgtcctgtactatgtattctttaccttccacgcccatttttccagcctctttcacggcggcttccgaaccatatttaatgtagtcttcgtacttgattacctcggcacggataaatcctttctcgaaatcggtgtggatgactcctgcacattggggagctttccatcctttacgataggtccaggcttttacttccatttctccggcggtgatgaaggtttccagttccagcaggtgataagccgatttgatcagacggtttacacctgattctttcagaccgacttcctgaaggaacatctggcggtcttcataggtttcaagttctgcgatatcggcttcggttttggcggctacgaccagaatttctgcattttcttcttttacggcttcgcgtacttgttctacatatttattgccggtagcagcacttgcttcgtccacgttgcatacgtacatcactggtttgctggtcagcaagaacagttcttttgcgattttttgttcgtctttgctgtcaaattgtacggtacgcgcagatttgccttgttccaatgcgtctttatatttaacaaggatgtcgtacatttgttttgcttgtttgtcaccgcccgtctgtgcctgtttttgtactttttgaatacggctttcaatggtttccaaatctttcagctggagttcggtgtcaatgatttctttgtcacgtaccggatctacactaccgtctacatgagttacattttcatcgtcaaaacaacggagtacgtgcaggatagcatctgtttcacggatatttgccagaaacttgtttcccagcccttcacctttgctagccccttttacaagtcctgcaatgtcaacaatttctacagtagtgggaacgatacgtcccggatgaaccagttcggcaagtttggtcaggcgttcatcaggaacggtgatgacacctacattcggttcgatggtacagaaagggaagttggctgcttgagcctttgcattcgataaacaattaaaaagtgtcgactttcctacgtttggaagaccgacaataccacattgtaaagccattatctatttgtttttttgattattatctatctatttgtttgcaaagataaccattctttttgtatcagacttcatattgaagtcagatttggcttttttatatgcgaaaagggggaggcttgttacgaaacagaaagggcaaccgtcacggctgccctttcgtcgagtttttatgaaaagtgttagattgttagaatagatttatttgtccatagttacggtcatttcgggtactaatatatattctttctttttagagttccatttgtaatattcagtagtcatacttttattgccataagtataacgaatgcagaggttattttcccagcggtttttgttactgttccatttttgcgcctcgtcctcagtacgttggttgttggcgtcatacttgtaattgtgtttcatataattagtaagcatggtgccttccattttaaaaatcgtttccgaaacaactactccatttacttcttctgcattgtaaatcaggttgtcacccggatttcctgcaaaaactgtaaggttagcaataaataaaattgctacaacgagcattcctttcaaaaaattgatcttcttcatgatattgatatattagattgttactttcatattgtttttaaaagcggtgcaaatgtacgaaataaaattgaatctcctaacatttctactagaaaatgatgatatttttgcaaaatgtcactgattaaacaaatattaagaattgcataagggatatttgttataattgtcttgtctttgtgttttccatttatgtttgggatggtaaatgaaaagctcaatggattggaaaataccattgagcttttatgatataaatactttacatatagtactatctatcttgctaatagttggtttatgtatgctttaatgcgcttcaagccagttgcttccccaaccgcagtctgcgcgtaaaggtacttgcatacggtaggcattttccatctcttcaatcacaatcttctgtactttttccttttcttcgggtagaacgctgaaatttaactcatcatgtacctgaagtatcattttggactttatactttcagattgaaagcgctggtatatgcgtaccatagctaccttgataatatcggctgcacttccctggataggagcattgatggcattccgttcggcatatccgcgcacaaccgaatttctggaattgatatccggaagatatcgtttacggccgaatatggtttcaatatatccttgtccgcgggcaaggtcaatgcttttgtccatatattcctttatttggggataagtttcgaagtagccgtctattagttcttttgcctctttgcggtctacattcatacgttctgccagtccgaatacgctgatgccgtagatgataccgaaattagctgtttttgctttactgcgttgttcgcgggtaactttgtctatacttatcttatatacttttgctgcggtggcggcatgaatgtcatctccttccttgaaagcctctatcatattggcatctccgctaaggtgtgccataatgcgtagctcaatctgtgaatagtcggcggagaaaaattcgcagccatcatcggggatgaaagccttacggatttccttgccgtcttcgttgcggatagggatgttctgaaggttcgggttgctggaactgagccggccggtagcagtgaccgtttgattgaacgaagtatgaattttacctgtttctttattaatcaataggggcagagcatcaatataagtaccgagaagcttcttcagaccgcggtgttccaatatcttgcctactatttcgtgttttcctcgcagactttccaatacttcttcactggtgacatattgtccggttttggttttcttggccttctccacgatgcgcagtttgtcaaaaagcacttcacctacctgtttgggtgaagctatgttgaaatccgtacctgccagttggtgcacttcttcttctatttggttcatgcgggcggtgaaatgttccgaggtctgttttaaggcttcagtgtctacacgtacaccgttgcgttccatataagcaagtacgggtaccaggggcatttctatttcgtagaagagtttttccgcatcgttggttttcaattcctgttccaagatgtttttcaatttcagtgtgacatcagcatcctcgcatgcgtacttatagatagcttcgggggagaggtcgcgcatattcttttgacctttgcctttaggaccaatcagttcttcgatgtggatagtctgataatgcaggtagatttcggcaaggtagtccatgttgtgacgcaattccggttgtagtacataatgtgccaccatggtatcgaacaggggaccgcgcacttcggttccgtagttgcccagtaccagcatatcgtattttatattttgccctactttcaatactccttctttttcgaaagccggccggaactcattaactattttttgcgcttcagcccgatcggcaggtacaggaacataaaatgcttgattttcggcatagctgaagctcattcccacgagttctgcggtgatgggatcggttcctgttgtttctgtgtctagactgaaaatttcttttgtaagtaagttttgtaacaattcagttcttttctcttctgtatcaacgagttgatagtcgtattttaaattatctaaacatgctagattcgaatatttctcactttccgtccctccgtcggtaaattctgcaaagagattgccttgaggagaagacggggaagcgggtgattcaccgttcgaagctggttcgccgaaaagggagagttgtcccgaaccgttcggcgtatttccctgccgggcgcttcctcccggtgtacggtttcgtccttgcgggtcgtttccggtcgcatcggtgtatgttccggcgaaggcggatttcttgtctcggttgaaaacgcggtcgatgagggtacggaactccatctcttcaaaaatcttccgtagttcctcttcattcggttcttctcttttcagttcgtccatgttcaaagcgatggggacatcaatcttgatagttgccagaaacttggagaactcaatcattttccggttagtttccactttggtcttcaaggctcctttcagttcggcagagtgggagaggaggttctcgatgctgccatattgcgcgattaacttttgtgctgttttctcgcccacgcccggacaaccgggaatgttgtcggaactatcgcccatcagtcccagcatatcaatgacttgtgcgggtgactggatatcgaactttgcctttacctcttctattcccatcacttcaaaaccgcctgtatgcttgggacggtacatgaagacatttccgcccaccagttggccatagtctttgtccggtgtcatcatataagtagtgatcccccgtttgccggcttcggtggccagtgtaccgatcacgtcatcggcctcgtatcccggtacttccagaataggaatacggtaggcccgtataatatcctttataatgggtacggacaaacggattacttcgggtgtttcttcacgttgtgccttatactgttcataggcttcgtgccggaaggtgggaccggcgggatcaaatgccacaccgatgtgcgtaggattttctttcttcaagacctcttccagtgtattgacaaatcccagtacggctgaagtgttgaaacccttggagttaatacgcgggcttttgatgaaagcgtaatacgcacggtatattaatgcataagcatctaatagaaaaagtttgtccattcttaaaaatctttagttttttcattgtaaaagtacaaaaaaataccgtattccgtcttttattactacttttgtgcacaaattaacctgcatggacaaattacagcaaatcaaattgcctattgacaaggagtttgaggaatttagaaggttgtttgactcttcgctccaaagttccaattctttacttagtgaggtgttatcctatattaagcagagaaatggcaagatgatgcgtcccatattggcgttgttgattgctaaattattcggtgaaatcaatgattctacgcttcatgcggctctttcattggagttgctccatacggccagcctggtgcacgatgatgtggtggatgagagtgacaagcgccgtgggcagtcttcggtaaatgctatctataataataaggtgtcggttctggtaggcgactatatgctggcaaccagcctgaagcattctgccatgacccgcgagattacaattgtagatttggtggcttgtttgggacagaacttatctgaaggcgagattattcaattggcgaatattaatgcttctgagttctcggaagaagtgtattatgatgtcattcgtaaaaagacggctgcattgtttactgccagtgcggaagcgggggctatttcggtgcatgcatccgatgaaatggtgaaaaatgctcgtctgtttggcgaaatgattggtattgctttccagataaaggatgatattttcgactattattcttctgatgagataggtaaacctaccgggaacgatatgcgtgaagggaagctgacattgccggctttgtatgtgttgaatatgtttgatgatgaggagatgcggaaactggcgctacgcatccgggcattagacgcttcggatgaagatattgcccgtttcatcgaatatactaaggtgaagggagggatagagtatgccaggcaggcaatggtggattatcgtaataaagcgttggctttacttccacaatcagccggtcaagctgtaaaagatgctttgactgcttatattgattatgtgattgaaagagataaatagtacgattgttgaagatatgtacttcaaaaagttcgggcgtagtcctttatacaataaggatcacgcccgaactttttgaggtacgcctttctttggtagaaggtttacctttaaaataaccggaatagataaggctcattccggtcactttaaatgtggttgttatttaaatagtgaaacagttctttgtttagaagaacttggtttcttgacctacaatttctgagagaagcagattggccaggcggcttgttcctaagcggaataactcgtttgtcagccattcttcccctaacacttcttttacaatggtatagtaaaccaaagcgtcgtgtacggtattaattcctccggcgggtttgaatcctactttgcggcctgttgtcatatagtattctttgatagcctcgcacatcaccaaggcagcttcaggagtagcggcggggttttcctttccggtagaggttttgatgaaatcggctccggaatacatcgatagaatagacgcttttttgatgttggatgcgcttcccagtgctccggtttccaagatcactttcaggtgatgctcaccacatacagcttttaattcttctatttcatcacacattccttcgtaatccccactcaggaacttgcctaccgggataacgatatctatctcatcggctccggtatggagagccatggctgtttcggctacctttacttcggtaaaggtttgcgaggaggggaaaccgcccgatacacaggctatgtttacatgatctgcttccaaggtgtcgttgactacttctgccatattaggatatacacagattgcggctacattgtccagatcggggtacttgtcaacaaattcatttacttttccggtgaatttcattacactttcatctgaatcagtacactttaaagtggttaggtcaatgcaatggaacaggaatttctttacgtccggtgtattgttttctgctacatgtttttcgatgagtagggcagttttcgcttttacatcctcatcgtgcaaacggatgttatacttggcaagtgcttcttcgtacttgctgtgctcaggtccatgatcgtggtcatgacgatgttcatgtccaccttcgaattcgtgattatgttccataattctttataatttgggattgtttttatgtctgtctttatctctatttgttttcttctccaagttttgacggaaggcttcggtcaggtttactccggtctggttggccagacagataaggacccacagtacatctgccatttcatcggcaaggttgtctttctctccttgcttgaaagactgatctccgtatttgcgtgccatcacacgtgccagttcgcctacttcctcggtcagaacggccatattggtcagttcgctgaagtaacgtacaccatacgttttaatccagcggtccacttctttttgtgcttcttccagtgtcattattccttgtttttggtgtccatacatatagtaacaggaccgttgttcagaagttcaactttcatgtctgctccgaattctccggttcctacttctttgcccagaccgatgctcagttcttggcagaaataattgtagagggggatggctacatcgtgctttgcagcacggatataggagggacggttgcctttttttgtagatgcgtgtagtgtgaattggctgatcaccaatatgttgcctcctacctctaggatagatttattcatgactccattttcatcgtcaaagactctcagtcctattatttttttgcataaccagtcggcatcttcttgtgtatcagcttcttcaatgccaaccaatatcatgaatccttcttttatcgccgatttgcatacgccttctatggtaacagaggcgtggcttactcgttgaataactactctcatatttatattctttaatttcttgttagaaaaattctagttgtttatcggtaatgtctccgcttctacaatggacaatatgttgccggcttcttgcctggactgatacgaggcagagcatgtccctgtagtagatgtatgcaaaggtaggaaatcccttttattctgtgagattttctttgatatttttagcggctgcttcacctaccacggctgcaatctcttccagtgaggcttgcctgatgcggctgacgcttttgaatgttttcagcagggcggtctttcttttttcgcctattcccttgatattgtccaaagcggacgccacctgactcttgcttcgtttgtcccggtggaaggtgatggcgaagcggtgtacctcgttctgtatgttttccaacagatggaacaagggagtgctttgcttcacaccgatggtcagcggagggaatccgtataacaattccgaggtacggtgcttgcggtctttggccagtccggctatggggatatccagatgaagttcgtcctctatcacttctctcaccacttccatttgcccctttccaccgtcggtaatgatgaggtcgggcaggggggaaccttcctctatggcacggctataccggcggcgtaccacctctttcatcgaggcgtaatcgtcgggtccggtcacagtcttgatgatgtatttccggtactccttcttgcttggtttcgcctttttgaaaacgacgcaggcggccaccgcgtccgagccttgaatattggaattatcgaaacattcgatgtggttcggtagttttttcatgtgcagctgctcctggatttctttcatcagacggacgcttctttgttcaggattcaacttttccgcctgtttcaagcggtccactttatactgtttcacgttcattacggaaagatccagcaaatgcttcttttctcctcgttggggaacggtaaaggatacattgttcatctccatatccagttcaaaaggtacgatgatttcgcgggaagtgctcttatatcgttcacgcatctcaataatgcccaattgtagaagttcttctttcgtttcgttcagacgtttcttgtattcgaaggtgaaggcttggttgatgcatccgtttgtgatatgcagatagttgatataggctgaattttcttccatttcaatggagaacacatccacattatgaatgatggaattaacgacttcgctcttggaacgatagttttctatcaagtcatatttctcttttattttctgtgcttcctcaaatttcatttcggcagcaagcgcttgcatctcttccatcagcaggtcacttacaatctgggtatctcctttcagaatatttttgatttcaccgatattcttcatgtattcttcgtgtggctgctgcccgatgcagggccctttgcagttctttatgtgatattccagacatacgttgaacttgccggcgcgaatgttttcgggacttagattgagtttgcaggtacggatggggtagagctttttgatcaagtccatcacggcaagcatggagggcatgtgactgtacggaccataataagaggacccgttgcggatgacttgccgggttttgaagatacgtgggaaatattcgttgcttacacaaatagaggggtaagtcttgtcatctttcagcaatacattgtaacgtggcttgtatttctttatcaggttgttttcgagtaaaagagcgtcttcttctgtttttaccacgatataacggatatctgcaattttgctgaccagcaatcgtgtcttgccgttggggtgttctctattaaaataagaagagactctgcgcttcaggttttttgcctttccaacgtagataatggttccttcggagttcaagtattggtaaatgccggggctgtcgggcaggtttagtacaattcctttcagataatcattggttgtaatctcttctttttccatacatgcttattgaatattgccggttggcagaactgtttcttgagttgatgttgcaaccgcaacatcctatatctttcggttgtaacattatatatcttcaagctgtaacattatatatcttacagcctgaagatatatatctttcggtttcatcgtccatctcattccatagatctctttttattgtgaacgatgatggggcccgttttgacggacatgttgtgtgacactataaagtaagcagtgtatccaccgtgatatcttcggggaatgcctttctgccgttcagacctcccagttcgataatgaaattgatgaaaatctttttggcgccacatctttgtaccaagcgatgagtggccgccatggttccgccggtagccaataaatcatcgtgcagcagaaccacgtcgttctcatcgatggcgtctttatgtatctgaatggtgtcggttccatactcttttgcgtatgtttcctctactacttctgcgggaagtttgcccggcttgcgtgccatcacgaatccggcacctaaccgtgccgccagcgcaccacccataatgaagccacgcgattcaattcctactactttggtgatgcctttgtccttgtacatctcgtatagagtatctagtatttcctgcaagcattcggggtttttgaacagggttgtcacatcgtaaaacagaattcccggaatggggaaatctggaatttctcttaagtttgctttaagcgtttctttgctcataaccagtattttattgttagtctattaaattacttgtttcacgtgaaacataccttgtttcaccgtcccagcaggactagtaagacattgatgtcgctaggagagatgcccggtatgcggctggcttgcgccaaagtctcgggatctatcttcatcagtttctgccgggcttcggtagagagcgagttcaatgagttgtagtcgaacttgcctttgatgcggatggcttccaggcgatgtatcttgtcggcgatcattcgttcgcggtcaatgtatccttggtatttgatcagcacttcggcggcttcaatcacttcttctttacggtcggtgatttggtccagcagggctttgaaagccggaatgtgcccggctatattttcgatagtaatctgcggacggttcagcaggtcgattagtttgcagccgtgtgtcagacgggcagtacctaaactttccaaagcatcattgattaatgcggctttgatggagaaggttttggcaaagtcgatgattcggctcacggcttcccgtttgctgcaaagatgttcgtaacggtcttgttttaccagtcccagcttgtaggcgcgttcggtaaggcgcatatctgcatcgtcttgtcggagcaggatgcggtattcggcacgggaggtgaacatacgataaggttcgtccacaccttttgtaaccagatcgtcaatcaagacaccgatgtaggcctcgtcccgtcccagtgtgaacggttcgccaccgtggcaattgatgtgtgcgttgatgccggcaatgattccctgtccgcctgcttcttcgtaaccggtagttccgtttacttgtccggcaaggaacaggttcttgattattttcgattccaacgtatgtttcagttgggtggggtcgaagtaatcatattcgatggcgtatcccggacgatagactaccaagtccttaaatgcgggtactttcttcaatgccgccaactgtatgtccatgggcagtgaagaagagaacccgttcaggtaaagttcctgtgtggtttctccttcgggttccaggaaaagctgatgttgcggcttgtcggggaaggttacgattttggtttctatactgggacaataacgcggtccgatgctttggatttgtccgttgaaaaggggagagtcgggcagacctttccgtagtatctcgtgtacctcttcgttggtaaagcaggtccagcattgcagttgtttcagtttgcgcggttcgctcatgaacgaaaagcgatggaagtcgttttctccgtcctgtgtttccatcaggtcgtagtgtacgctgcgcccgtctatgcggacaggcgtaccggtcttcatgcgtccggcggtgattccctggcgggtgattgattcggtcagatggtaggaggcaggttcggccatgcgtcctcctgccagttgtttatgcccgatgtgcatcagtccgttcaggaaggttcctgcggtgagcacgatacatttagcatggaaagtcactccccagcaagtcatgactccggtcgcttcgccgttttccacgattagttcttctacggtatcttgccaaatgtgcagattgggagtattctccagaatctcgcgccatgcccagataaacttgccgcggtcacattgggcgcgggggctccacatagcgggacctttggagcggttgagcatacggaactgtatggctgtacggtctgtaaccagtcccatgtagccacctaatgcgtctatctctcttacgatttgtcccttggcgatgccacctacggcagggttacaactcatttgcccgattttgttcatatccatggtaatcaggcaggtcttcgaacccatattggctgcggccgcggctgcttcacagcctgcgtgtccggcgcctattacaataacgtcgtacttaaaatccattgatttatttctttttaccgattgcaaaattacgaattttactctgtaaagcggtgataatacggttaaaaagaatgtgtggcggcagaaatctgtttctgccgccacatcatacaaacgctattcttaaagtaaactatttcctgttatttcttgtccggagcaggaggggtgtcggtcgggcgtttctttccgtccttgtctaccggttcaaaatcctctttctcaggtttattctgtgcatttcctttcgaggaaggattgacaatgttctgataggtatcatgaatgggaagcttgtctagaatacccagtgcgggagccactttgctgaccacattctgcaagaaattggacgttgtgccgttgccaccgtcaaatacagtaacatttcccagttggatatgttcaaatgccttaacctgttccgaagcgatttccttccattggtcaaccatcttgtattggatggcgatttcgggattgcgctcggcagccttcaccatggcctcgaaaccttccgcttcggccagcaaggatttcttcttgccttccgcttctgcttccagtttcatctggatggccttggcttccgcctgtgctttggccaggatagcttccgcttctgcatttgccttacgttttatttgctcggccaatgcgtccgcatccaagatggcctgctgtttggctatttcggcaggaacaatcttatccgctttcaaggcctgttccactttgcgggctttcgcttcttctatttcacgctgtgcgttttcctgtgcggtgaggacggcagcttgtgtccgggcttgtgcttcaccggcttttctagaggcttccgccttggtaacttccagttccgcattgctttcggcaacctctttggcagcgttattttgcccgatggccgatttcttttgtgcttccgcctgctttatttccatatcggattggagctctgccgtacggctttcctgttcggtacgcgcctgttccttgttcacctccatagaggcgctggctttggcgatacgtgattctttttcggcattttcttctgctactttcgattcacgttccttgtcggctatggctactttaatttcctcgtcacgttgcgtatcggccagttgagtgttcttgtcgcggttggtttccgctactttggtggcacgttctttttgttgttccgcaatcttgatggcacccagtttctgttgttcttcaatgttagccaaggcttcgttcttggctttcgcttcggcttcttttcccagattgacgatataatcggcttcatcgcggatatcgctgatgttgatgttcatcaggtaaagaccgaatttcttcaattcggagtcgatgttcttgcggcagttctcaaggaatgtatcacgatcactgttcagttgttcgatggtcatgtcggcaatgaccagacgcatttgtccgtaaacaacgtctttaatcagttcctgttgtgcttcgatattcagtcccagtaagcgttcggctgcattctgcataacttcgggctctgtgcttacggccacagtgatggtagtgggcacatctacgcggatgttttgtttggaaatggcaccggtcagtttgcagtcaatctgcatgggtttcatgttcaggaaagagtatccctggataatgggccatacaaaagcggctcctccgtgatacagtttagccgatttcttgtcgccggtcttaccatatactaccaatacctcgtcgctcttgcacttgcggtaacgacttaaaatcccgacgatggtcaggacgatgacagctaccagaatagctgcataaatgagaatctgctcatccataaatgattgcgtttttagggtttatttaatcaatataatagattccttccttgtaatccttcagtgtgaggatatcgccttcccggtagcttttaccctgtatgctccgcacggtaagttctctttgtgcgccattgatggcgatatagaccacatagtttgttcctgcctgttcttgttcttggcagcgggtatatatttcgcatttcctgcctattaattcttctccctgttcgggcttgttttcttgtttcagcttatagcagagtttataaatccaagctaggacgaagacaaaaaagctgccgcttatcacggcgcccaggtaatgtaagacaatgtagggaggctggcataaatacatgaaccaaccgaaacccatgcagaaatgaatcagtcctttgaaggagagtacgctgctcatgtctatatcggcgttgccatcggcattaacgtctatgtcggtgtccatactgccgaaaaagatggataagatgaattgcagaagaaagattcccgtacttactaatgcagcgaaaaaatatacgttagcttccatatattttgtgtttatctgtttttcaattcacaaaataaagcaattaatccgaaaaagcaagaagataagggaagaaatgtagctgtgtatgtacagctttcgacgttttttatccgtccggcggaaagttttcctaattatgggcatgtctttaaaaggttacgggcaatcattcttgcgaactatgcccgtagcttttataggttgttctgccttgtatgtcctgttatagggaaatcaatgccagcgctttgttttcggcggcttccataatctcccgttcaccggggcctttgtcgttgatgccgcacaagtgcaggataccatgaataatcacccggtgaagctcgcggtcgtagggttgctcaaattgttctgcattgctgcggacagtatccaagctgatgaataagtcgccggaaatacggtcgccttcacaatagtcgaaagtgatgatatccgtgtaataatcatgttgcagatactgtcggttcacttccagaattttatcgtccgaacagaagatgtaggcgatttctcccactctttttccatagcaggcggctacttctttaatccatccggtggtttttttctttttgatatcgggcatttttaccccttcggtttgataacttatcataggctgattatttttttataatgtacaaagataaggaaagtatttcagccgaagaaaagataacagataagaatagctgcaatgacccctgccgcatcggctagcagtccgcaaggaacggcgtggcgtgtcctcactattcctacgctgccgaaatataccgccagaatataaaaggtggtgtctgtggagccttggaagatacaggacagtcggcctacaaaggaatcgggaccgtatgtggtcatggcatctaccatcaaccctcgtgccccgcttccgctcaaaggtttcatcagcgccgtagggagcgctcctacgaaatcactgtcgataccgcatagctttacggcgttgccgataccgtcaatcaaatagtccatcgcacccgatgcgcggaagactccgatacctaccagtatggctaccagataaggaatgatgcgcacggcggtgctgaatccttctttggccccttcgacaaaggagtcatagacattgattctttttctgatccctgccacaataaagccgatgatgataaggaataggaaaacattggcgaaagtggtggagtaaatatctatctgatctcgtgacaaggtattgaagaaataaataattcctgctaccagcaaactcattcctcctaaaaagaggaggatagtgcggttaaacagattgattctctgataaatacttactgctacaatgcctgccaaagtggagaagaaggttgccagcaggatgggtacaaatatatctgtaggttgggttgctcccagctgtgcacgatataccatgatgctgataggaatcagtgtaagccctgatgtattcagtaccagaaacatgatcatgggattgctggcagtatctttcttggggttcaattcttgcaggccctccattgctttcagtcctaagggagtggcggcattatccagccccagcatattggccgccaggttcataaagatactgcctgttactggatgtcctttgggaatatcgggaaaaagtttgctgaacagaggtcccagcaatcgggaaaacagagtgatgactccgccctgttcacctattctcatgatacccagccaaagagaaaggacaccggtcagtcccaatgaaatctcaaaagcggttttggaggaattgaaagtagagttgataatttcgggaaacacttgtgtgtcgccaaggaaaacgagtcgcatcaacgctactacgaaggctatcagaaaaaaggctatccaaatgtagttcagaaccatatcgctagttttattagtaataactcggacaaaagtagtcaatttattcgtttttgaattagaaaagattcaattctcttatttttatttccaatctttgtttgaacacgatagcaaaatagtatgaaatgattttaagggcaaactactctctcatttgattatttcgatgaacgggacgagaaggaagcgtttaagcgattctcgtgagtttaaagaatatcaaaaagagtaaaaaagacgtttggtagtttgctatttgtcgggtatataaagaaaaatgttttttatggatttaaatatgctttgaaatggatactaatgaaatgtaaaataactcttggaataagtctgttctagaagaaacggataatataagaatcgaaatagttaggaaaaagagttttgttggtcggatctgataataaaaggttatatttgtgcaaatatgcagtgtgaattctgtagtagaaggaaggcattgacgtaataacaagtaataagaggggggaatatgtggcctaccattttgctgatgtcagcaaaatggtttctgtggggtctggtgcagaaagagagatagatgatatctattttacccgttatgcctgttatttgactgctcaaaacggtgatgcgcgtaaaccggctatagcttttgctcaaaactactatgatggtaagccgaggaatctatccggaacaattgcctgcaggcgaagatttaaagaaagtggaacgccgtttgaaatcagaagaaaagaaaataactaagaaataatgaaggaaccgcttgaggagaaactataaatgagctgaaacggtttgctcactttcacatgcttcagtaaataattcttgtgatgtctggttaggcaaaatagagcttttagccatatactctttattattggcatagataaagagtacgcttcccccttttatcgtattgataataggtttggtcagtgcctgtggcaaagccggacaaccgaagcttcgtcccagtctgcctgatttgcagacggaagggttggcgtatgcggcgccatgaactacgatggcacgttcacgggcccggtcattgattcctttttccagcccgtccaataaaagggagtatccatttctgccttgataagtgtttccggtaagatagaagccgagggaacttttataagagccgacttcgttggagaaagaggtagcatagttctcgccgctgtttttcccatgagagaccactgatgagtatagcatctttttctgttccatgtcaaagacaaacaaacgtttttcggtagagggtttggtgaaatcaatcaatgtcagtatggatttgcttttttgtttaatcaagttgtatcctgccacagcctgtcggaatgccaggaaattgaccacccctcccaattgcatatcttcgaataattgttcgccgtccattttttgaggtgcagggacagatgtagcaactttcttttcgggtgtagccgtccgggtcgatacattgctcgacggaaagaggaataggaacaggagtaaaaaagctttctgcatacgtatggaaaaactggataacgggtgcaaagttacgcacatttctattccaaaacaaatataatcgtctcattaacaggtgcccattcgaaaataaacttggcatgagaggtggcatttcttacacacatatgtgagcgggggatggtacccaacgtataactgtattctatgatccctgttgccggtgcattggtgggtactccgtgaatataaccaccattattgaaacggctggcgtaaggtgcaaaaccaccggtggcggcagaaccgtcttttagaaaaatcatcttggtctttttctcttgcagaacgaacatacccaatggagtttcttgggcgtatggaggacgatgttgtcctgttgtagcaggattcatgctacgtatcagccagtagcccctttctttccgttccaaagtagttatattctgattatggcggtctataaaaatagctttgttgaacactacgctgtcgggaatcagttttatatattttgtcggagcataccattcgccacctataaagacaggttctactttggtgaactttccttcctcacctaggtgacgggtaagaagtccatccagtccgtagcgttcggcagtaagggtgtcatctgttaggaaaagaggaattccctgatagcgttccactcccaatgtgtcggctatccgtttgtatgcatcccttttaaaacttttcactaaaggcgcttctccgttccggtttttataattctgtaagatgcaccattgtgctggcttttttcgaatattctccaacaatgctagccgctcctttattttctcccattggaaatggcgggtggtgtctttataaggataggtatccttcaaagtatgtttatcatacagcagttccttgtcaagcctgatgtcttcgggtttgatatctttttctacaatctcggtgatggcttctgtcacagtattgtgtacctctgttatcacttccttaatttcgctatttgctttcgaggtacacgagcagattgtacagaaaccggtcaataaatatatgaattctattcttttcatcatagacacaggtttgtggctttcttctacaaatataattctttaaaaggaataaacatgcgtttttgtttttaaatgcagtgaaaaattcctgtttctttgaacaatctcccctattgcataccttataaaggaccgctgggaataatcgtttatcttggcttgaggtttttacagaaaaaaagaatcaacttaaaaacaagtattatggtggaatcaactagagtaagaagtaaaagattatccttttcaggtaagaagacactgtcttcctttatgcaagtgaatattgccagtctgagacaatcgggaaaattgcgtaccagtgagacgtatagagctacactgaacagttttatgaaatttatggatggcaaggatgttctgttgagcaatatggatgccgagttgatgatggggtatgaaacttatttaaaggagcagggagcaagtatgaacaccgtttctttttatatgcgtattttgcgtgcaacgtataatcgtgcagtagataaaggggtgatcagacagcgttttccttttaagcacgtctatacgggagtggaaaaaacggtgaagcgggccatttcttttaaagtaatcagacaactgaaggagatggatttaagtcactctcagtcaatggagtttgcgcgtgatatgtttatgttcagcttttatacccggggaatgtcatttgtggacatggcttttcttaaaaaaacagatttaaataatggtatgctgacttatagaagaaagaaaaccggtcagttgctttccatcagatgggagaaatgcatgcaggatatagtagataaatatcccggaaactattcgacttatctgcttcctattataattcatatcaggaaagatgaaagattgcaatataaaaattcaatttgcttggtgaacagaaggctaaaagaaatagggaaaaagttggggcttgttcatcctttgactatgtatgtggcgcgccattcatgggccagtgttgccagaggcaaacatattcctctttctgtgataagtgaagggatgggacatgattcggaaaaaacgactttgatttatctggcagcattggataccaccgtgatagacaaagcgaatatggtggtgctgagggaattcttgtgataatagggtaaagatattgtttcttgtcaaaaagaggatatcatatcacaaggtatcctccatttgacgggatcagtgtgtctagtattttgcttaataaatgtgtgtttgttctctctaaagatgatagcactttctgatgtggctgagttgaatatgtttgttgcaaggtcggcacagcctatgatctctttattgttatcttttgtcagaagataccttatagtaaaggagaatcggattacagatagattttgaaacaattgccataaaccattatgctgtttttgtccacctatttgttatgaaaaaaatatcagcttccaaatattcaatatttttccgtaatatgacaattgtcataggtttgtttttttatgtgaattatagctgatacaactattttttagtagacaaacttgaataaaagaaaaggcaaagtttacttggattttattctttgattttagagataatcctcttattacaagaactttatagaaaaaatactaagttggaatattatatatctcttattaagagatatatattttgtcgcaaatttaagcaaagttttgagaattagaacaatttagcaaggaaatttaataattgattcaaaaaaaacgttttctgaatacatgatttagtctttcaaagtattcttgtatgaatgtattttgttgatttataatgtgttataggtctattgtatatctcttaataagagatctatcgtataactgatgacacgccatataataatgtatggttgtgaagatgttaaagcgaagattaaaagtaaataaaaatatggactatctattcttgagacgacacagacggactgctacttcgaataggcagaaaagcctgcttcttaaggctgctgaacgccagtgggaactacagttcgccaataagggaactgaagggagaaaggtggattgtgccctatataaatgtatattgtataaccttgaaataaagcaagtttttttggattcggagctttctttgaaaaagtttagcgttatgatagacaccaaccaaacttacctgtcgaatgtggtaaacaagtatttcaactgcaatttgaaggagttgctgaatacttaccgtgtggaatatgccaaagagttactccatgctgggaaatgttcattagaagaactcccacagcgatgtggctttgcctctagaagtgctttttatgcctcttttagtaaaatagtcggaatgtctcctttgcgctttctagctcgagaacagaataattcgctcttagaatcaatgatttatgtataatcaattttagttttttaaatttataaatttaaagtttttctattatgaacaaaaagtttttaagtgcaatcctgtttggtgccttgatggttacctcgacaggaacatttgtatcttgtaaggactatgatgatgacatcgacagcttgaacgagaaagtggacaagctgactaaagatttgtctgaattacaggccgcagctggaaaatatgtcacagctgtcaagtatgatgcggcaacaggtaagttgactgttaccggcggtaacggtgaaactttccaacttccgatgcctgctgaacttcccacttactctttgaaagttgtagatggtaagatacagttgttagatggtgacaaggtcgtttctgaagcacccctgcctacaactgatgctcctgcggcatttgatcctactttgttgaagtggaacaatggctatctgtattatggagatgtaaaaatctcaggtgtagagaaacctcaaagcgttggttctattacagaagtgaaagatgaagaaactggtgaggtgattggctatgtcattgaactagatggaaaatctgctacattctctttggttgctgatttgaaggcgttagtattccaacctgcattctattatcacggtattgaagcaatggaagctattggtcttaattataaaaccttgacagtagctaaagtagatgcagatggaaattatgataaggatgctcctgttgtaggtgaagcaactacaatgattccggacttggtagctgattatcatgtaaatcctaccgtagcaaaagttccaggtgatgtaaaagcatatactttcttgcgttatgacaagaattatactcgttctgctgcgacagctccgaaagtagtaaaaactaatgttacaaacggtaaggcccccaagggtatattgactgtaaatgctcattttacagatgctgatattaagaacattgaaaatgatgagcaagtaactgtattagctttgcaagtaagtaagggggataccgttgttacttctgattatgctgctgttaaggctgcttattacaaggacttggtattggcagctgtagatagtattcatgcaaatgaccgccacttgtttacaactgctgctgacgctattgctgataatgaacatgtttgcaagattgtctggaacagcaatggtatcgatattgctcgtttggtcaatactcacagaactaatatagataaagaaggtacacattcaaaatgggatgttcgtgctgctgatggtactgtagaaaaatatggtttcaaatattcttacgaattagttggttatcataaaggtaataacgaaacttcagaaagtgctcatgctgcattgaagggttctgttattcgtcctcagatgacaagtggtggtaagcagcaaccttggggatttactcagaataaagctacaaaagatcgtgaaccgttggttcgtgttatcttgactgatactattagcggaaaaatagcttctgttggttatttaaaattcaagattaccgatactgctaatcagaatgaagttgtattgaccccgaatttcccatttgccaatggttatactgttgattgtacagaaacagagactaaacttggtttgtcatggcatcaagttgaagaacagattctggctcaattggaagaaattggtatttctaaggatgaattccataagaatttcaaattggatggtgctgtagaagacgtagagcaacaagctttggtaaatgctactcagtatgatggaattactgttgattctaaggctgttactactccggttggtgtggtttcacagactaattgggatccggcggatgaaatgactgaagttttgacttgggtagttaagaataatcaggcatatcacatctttaaggctggtgctaagagtattgcagtaaatgtacgttatagctatgaagtatctgaaggtgtatatcaatatgtatatgttactttcacttggactcctagtcctttgaactttactcctaatggtaccattgaaaactctgctaagattgataaatattggtatgaaaagaacggtgctgtagcaggttctggttattcagatattcatgctaatgttcatcaagttgttagcgataactctaatgattgtacatttgatagcgaaatcttgaatactttcactggtaatgtgattaccgtgacaagtgacgctacttatcctgcatttgctaatgataagttgactaaggaagttgtatttgctaaccctcaagatcatttgactaagaagggaactgcttatgtcgtgaatggtgcttctggtgctcaatatgatatcactgtatctgctgatggaaaaactctacaagctactaataacgctgtaacaaaagcagttgttgttcttgctggaacagtgatggaatatcaagaaaatgattttgcaaaagatattttgaacaatgcagatcacaacttgctgggacaagaccagacatttactgctaaattgcaaattaatgctgctaactgcgattatgtagattatgctttgggtaacaacgtattctatgctaaatatttgcgtcctgtatcagtagatccgtcagatgtagatgaattaattgatgctactaatggtgcttctattgcaggcttgaccttgaatctgattgattggagagacaagtattttgataaagcagaagatactactggtgatgatggtaagaaatataatttctatggattttatggcgtaactaaagttgctgctgatattgaaaacgctacaacaactttgaatggtggaacattaggttctactaaattatcttctgtaacgaagaatgtaaaattgtatttcggtgaagataaatctacaaccaatgtatttactgctctgaaggttggcgataatggtaaattctattattacaataatggtactactttaggtaagtttacaatccgcgttccgctggaagttacttataagtggggtactatctataccgaagttgatttgaatatcaataagactattcagaactaatattgtaataactttgagtttaatttaaataagggccggccattcatagtggctggccttttttaataggaggaaagaatgaaatgaaaaaactgaaatttattttattgttgactgttttattaacaaccttttcttgtcaatcaggaaaacagaaggtgcaaagcaaagaagagaagagtattaatgaatttgtagctcatctaacggaagttgatacggttttgataacaaacctaataaatcaatttatggaatatgcgaaaaatggtcagctggaatctgccgcagctatgctttataaagccgattcggcagatgtttggaatgaacctattcaattggataacaatgaattgcatcaagtcgcaaaaatgctggaatcttttcctgtattaagttataagatagattatataaagttctatactcctgttaaaaacgaggtgaagtgtacgattgttatgcagaaaggagaaagtggaacacctattgcaactagtagttggtattttaagctgatgaattatttgggtggatggcggctttgtatgatgaattagctaatgatcgatttatataagcagtcgtgggaaaaagtgtcatttaaaaattattgaagggggtgtttgtttaggatatttatgtgattttcaatacaaaagattatagttataaattgtagcagggtcaaaagagaacggtttctcaggcttgtagtcgaaaagttgacagttcaaccagataatccggactgtcagcttctttttttgtgtccggagagatttcttctgtccggtaagttccctatggatccagatagcagtgcatttacccatagcaaggataacagcattacgataatctgtgaaagtatttctttcttaatcatattatatcctgttccttttcaaaagttacgaaagagtgatcgcatgagtaagaaaaatcttactctgctgttttgtaagccttgtccatactttgtatccgtcgtcttgcaccgaatatcttgtaacaggaatgaaactcctttgtcacgaaacctttaatagagtgtaactctcaagaaacctgacccatctacttttgcggcagatttataacgcataaaaaagtatatgaaaaaggttgttagagctgtgtctcttatgctgctgatggcaggtgtttgtggaaatgcatttgccgaggaaaatgaaaacattgtccggcaaggcgctatccgcggacgtgtgatagacaatggaaaacaaattctgccgggtgcttccatctttgttgaaaatctgaaaaccggagtaatcagtgatgtgaacggtttttatacgttacccaatctgaaacccggaacttacactgtcaaagtgacttatgtgggctatagccccattgaaatgaaaatcaccgttcccgaaggtaagactttagagaaagatatagtgatgaatgaaggggtggaactgcaggaagtgcaggtaaagggagcttttcaaggacagaagaaagcaatcaatacacaaaagaataatctgggtatcactaatgttgtatctgccgaccaggtagggaaatttcccgactcaaacataggtgatgcattgaaacgtatcagtggcatcaatgtgcaatacgatcaaggcgaggcccgtttcggacaggtccgcggcactagtgccgatttaagctccgtcaccattaacggcaaccgtgtcccatctgctgaaggggatacccgtaacgtgcagttggacttgattcctgccgatatgattcagaccatcgaagtaagcaaagtcgttacacccgatatggacggcgatgctatcggtggttccatcaatctggtaaccaaaaattctccttataaacgcactatcaatgctacagcgggaagtggttacaactggattagcgagaaagcccagttgaacttaggtttcacttacggcgatcgtttcttcaatgacagactgggcatgctgctctccgcttcttatcagaatgctccttccggttcttatgatactgaattcatgtgggaacaaaatgaagatggcaaagtatatgtcagcgattatcagatgcgccagtactttgtcacccgtgaacgtcaaagttattcggcggcttttgattttgatatcaatgaaaaccataaattgactttcaaagggatcttcaacaaccgtaatgattgggaaaaccgttaccgtaccaatatcaaggatttggatgagaacggaaaaggcacagtccgcatccagaccaaagcaggtactcccgataatcgcaatgcccgtctggagcgtcagcgtaccatggatttcgctttgggcggagaacacttatggggggcaatcggtatggattggaatgccagttatgcaaaagctacggaagaacgccctaatgaacgttatcttgacttccaactgaaaaagcaggaatttgatatggacttgagtgatgaacgccagccgttggcaacacctggaacaggttctactttgacactgagtgataagttcagcttgaaggaactgacggaacaacaggaggacatcaaagaagaagatatgaaattctcggccaatttcaaggccagtttaaataatggagctaaactgaagttcggtgcgaaggtagtacgtaaaacaaaagagaaagaaatagacttctacgaatatactccgaaagacgaggatgccttcatgaccaacagcctgaaaaatacggtagaccagagtacggataagtttatgccgagcgacaaatatcaggtaggaacatttgccagtaaagaatatgtgggtggattgaatttaaatgatgcttcccagttcgataaagaacaggtacaagccgaattggctgagaactttgaggctcgtgaaactgtaagttccgggtatgtgcggtttgatcataaattcgcttccgatataaacctgatggcgggactccgtatggaacatacttcccttcgttataccggccgtaactatgatgatgagacagataagaccaccaagaccggccgcatgaccaacagttatgtgaatttccttccttctattttggtgaaatgggatgtaaatgatgatttcaagatacgcggttcttatacgcagaccttgagccggcccaaatattcagctttggttcccagtgtgaatatcaaccgtggtgataatgaaataaagattggtaattctgacttgaaaccgactatttcttataactttgatttgagtgccgattattatttcaagagtgtaggtttagtgagcgcaggtttcttctataagaaaatagacgatttcatcgtagatcaggtactgaccaactatgaataccaaggaacagaatatacccgtttcactcagcccaagaatgcaggaaatgctaatctgtggggattggaattttcttatcagcgtgatttcggcttcattgctccagccttgaagtatgtgggtttctatggaacctatacttatacgcactcacgcgtggaggactttaacttcgaaggacgtgagaacgagagcgggttgagtttgccggggtctcccgagcatacggcgaatgcctctctttactttgaaaaaggaggcttgaatgtgcgcctgagctataactttgcatctgattttatcgatgaaatgggcccaagtacattttatgacagatattatgatgctgtgaactatatggatgtgaacgccagttatacctttggcaagaaggtgaaaatgaccttttatgctgaggcgaacaatctgctgaaccagccgctccgttattaccaagggacgaaggatcgtactatgcaggcagaatattatggcgtgagaatgaatgcaggtttaaaaataagtttctaaaaataagtatatgaaaacgttgatgatgattagaagaatgaaagaagtattgacatgggtatggattgccgtcattggtacggctatttgcctgaatgtgtgtgcccagactccgcaagattggaaaggactggagaaacaactgaatttttatatggccaacgatttgggacgtaacggttattatgaccagaagcccatagccgagctgatgggagaaatggcggatgttattggtcccgagtgtgtatttgcagccggagacgtgcaccattttgaaggtgtgcgcagcgttaacgatccgctctggatgaccaactacgagttgatttacagtcatcccgagttgatgatagactggtttccgatcttgggaaatcatgaataccggggtaatacgcaggctgtgttggattataccaatgtgagtcgtcgctggtcgatgcctggtcgttattataccaaagtcttcgagaagaaaggaactgccatccgttttgtgatgatagataccgctcctctgattgacaaataccgtaacgagagcgaaacttatccggatgcctgtaaacaagatatggatcagcaattggcatggatagattctgtactgactgttgccaaagaagattgggtagtcgtaatcggacatcatcccatttatgctgaaacgtcgaaagacgacagtgaacgcagcgatatgcagaagcgtctggatcctatcctccgtaaacataaggtggatatctatgcatgcggacacattcataacttccagcaccttcgtgtgccgggcagtgatatcgactatgtggtaaattcggctggttcgttgagccgtaaggtaaaaccagtggaaggcactctgttctgtagtcccgaaccgggcttttctatctttacggcagacaagaaagaactggatatgcacatgattgataagaaaggaaaagtaatctatactgtaaaacgcaccaaatagggatagttattttagggaaaaagagtacatttgcggtataaaactgtaaatgtactttttgttatgttgaatacactccttttgattggtggtctggctctcattttagctggcgcgaatggcttgacggatggttctgcagcggttgccaaacgtttccgtatttctgatttggtaatagggcttaccattgtagctttcggcacttcggctcccgaattggttatcagtgtgctttctgcattgaatggcagtgctgaaatggctattggtaatgtggtgggtagtaatatattcaatgctttgatgattataggttgtactgccttggtactccctataaaagtaggtgaggggacgatgagtaaagagattccgttagtcattctttcttcgttggtactttttgtctgtgccaatgacatgatgctggacagggaagcggtcaatgttatcagccgttccgatgggtttgttctgctggctttcttccttatatttatgcgttatacatttgccatcgcccgtaatggggcagatgaggcaggagaggagcagaagataaaggaaatgcctgtatggaaatcggtgttgtatattgcaggagggctggccggactcatattcggcggacagctttttgttgacggggcaagcgggcttgcccgttcatggggtgtcagtgaatcggtaatcggactgacattggtagccggaggtacttccttgccggagcttgccacatctgttacggcggctttaaagaagaatccgggaattgctatcggcaatgtcatcggtagtaatctgttcaatatattctttgttctggggtgcagcgctacggtgtcaccgcttccgatggggaatataaataacctcgatttaagtgtactgattgcttcctccctgttgttgtggctggtaggctggtttttccgcaaacgtaccataacccggcttgaaggcgcattgatggttggctgttatgtcgtttataccgcctatcttattgcccaacagtgaaaaagccataaaaagaataagttttctgcaaaaaaacttctatctttacaccccgaattttataaaaatacagcatggctattaccattaaaaaagtcagttcaaagaaagaactaaagacgtttatacggttcaactacgagttatacaaagagaatccctattccgtacccgatttgtacgatgatatgctgaatacgttcagcccgaagaagaatgccgctttcgagttttgtgaggcggagtattttctggcatataaggataacaaggtggtaggacgtattgcagggattataaataaacgcgcaaacgagacttggaataaaaaagaagtccgtttcggatggatcgattttctggatgatatcgaaatatcacgtgccttgttggatgcagtagcccaatggggtaaatcaaaaggtatggataccattcagggacctttaggctttaccgactttgatgcggagggtatgctggtagaaggattcgaccagttgagtaccatggcgactatctataattatccttattacccacagcatatggagaagttgggattcgagaaggatgccgattgggtggaatataaaatttatattccggatgcaattcctgataagcataagcgtatcagtgacttgattcaacgtaagtttaacctgagggtgaagaaatatacatcgggtaagaaaattgcggccgaatatggacaggctatattcgagttgatgaatgaggcttatgctccgctttatggtttctcggctttgtcgcaaggacagatcaaccagtatataaagatgtatttgcctattgtagatttgcgtatggtaaccttggtgaccgatgccgaagataaactggtggcagtggggatttcaatgccttctctgtccgaagcgttacaaaaagcgaagggacgtttgctgcctatgggatggtatcacctgttgaaagtgttgttcctgcataagtatcctcctatgttggatttgttgctggttgctgtaaaacctgagtatcagaacaaaggtgtcaatgctttgttattctcggacttgatccccgtatatcagcagctgggattcgagtatgccgaaagtaatccggaactggaactgaacggaaaggtgcaggcccagtgggaatatttcaagaccgagcagcataaacgccgtcgtgcttataaaaagagtattctgtaacaacgatatataaaaatgtgataagtcaatatggaagaaaacaacgaactgataaacaatcccgccgtagaatataccgacgataatatccgccacctcagtgacatggagcatgtgcgtacccgtcccggtatgtatattggaaagttgggtgacggatcacatgccgaggacggtatctacgttcttttgaaagaaattatcgataacagtatcgatgaatttaaaatgcaggcgggtaaaaagattgagattattattgaagaaaatctccgtgtcagcgtgcgtgattatggccggggtattccgcagggaaaactcattgaagctgttagtgtgttgaatacgggaggtaaatatgacagcaaggcgttcaagaagagcgtcggactgaatggggtcggtgtgaaagccgtcaacgcattgagttcacgtttcgaggtgcgcagctatcgtgatggaaaggtgcgtatcgctacctttgccaagggagacttgttgacggataccacacaagatacaacagaggagaacggtacctatattttctttgaaccggataacctgttgtttgagaactacagtttccgtccggagttcgtggaaaccatgctccgcaactatacctatctgaatacaggactggccattatctataacggtcagcgtatcctgtcccgtaacgggttggtggacttgcttaacgacaacatgacggctgtgggattatatcccatcatccacttgaaaggagaagatatcgagatcgcttttacgcataccggtcagtatggtgaggaatattactcttttgtcaacggacagcacaccacacagggaggtacgcaccaaagtgctttcaaagagcatatagcccgtaccatcaaggaatatttcaacaagaatatggactatgccgatatccgtaacggattggtagctgccattgccgttaatgtggaggaaccgttgttcgaaagtcagactaaaatcaagctgggctctaccaatatggctcccggtggtcctaccgttaataagtttgtaggtgattttgtaaagactgaggtcgataactatctgcacaaacatacggatgtggccgatgtgatgttgcagaagattcaagaatcggagaaagagcgtaaggctatagccggagtgaccaaactggcacgtgaacgtgccaaaaaggcaaatcttcataaccgtaagttgcgtgactgccgttttcacctgaatgatgccaaaggagacaagaaggaggaaagctgcattttcattaccgagggtgactcggcgagcggttctatcaccaagagccgtgatgtaaatactcaggcagtattcagtttgcgtggtaagccgttgaattcttacgggctgaccaagaagattgtatatgagaatgaagagtttaacttgcttcaggctgctctgaacatagaggacggtatggaaggattacgatataacaaagtgattgtggcaacagatgccgatgtggacggtatgcacatccgtttgttgctgattaccttcttcctgcaattcttccccgatttgataaagaaaggtcatgtatatatccttcagactcctttgttccgtgtccgtaaccgcaagaaaggagtttatgaaacggtatattgttattcggaagaagaacgggttgccgcaatcgaacggttaagccccaatcccgaaatcacacggttcaaaggtttgggagagatttcacccgatgaattcaagcactttatcggcaaagatatgcgtttggagcaagtttccctccgcaagactgatctggtaaaggaattactggagttctacatgggtaagaacacgatggaacgtcagaattttattatagataaccttgttgtagaagaagatattgcgtgagtgaatcactaaaaaatatgagaagagcgatatttccgggaacctttgatccttttaccatcggtcattattcggtcgtgaagagagcgttgacttttatggacgaagtggtgatcggcatcggtatcaatgagaataagaaaacttggtttcctacagagaaacgagtggagatgatcgagaaactttttgcggatgatccccgggtaaaggtcgatgcttatgattgtctgaccattgactttgcccgagctaaggaggcgcagttcattgttcgtggtatccgtaccgtacacgattttgaatatgaggaaactatagccgatatcaaccggaaactggccggaatagaaacgattctgttgtttacggagccggaactaacctctatcagctctacgattgtaagagaattgttgcagtttggcaaagatgtgacgccattcttgcctgaaggaatgaaaatagactgaccatgaaatatactatgtattttgcaggcttgattgcctgctttttttctatcgtagccgcacaggctcaggagagtaaatttctgaattctccggcacgtaagttgcaactggcggaatttgccattgccaatctttatgtagacgaagtcaatgagggaaagctggtggaagaagctatcgtaaaaatgctggagcagcttgatcctcattctacctattctgatccggaggaagtgaagagaatgaacgagccgttgcagggaaacttcgaaggtatcggtatacagtttaatatggcggaggacactttgctggtgatacagcctgtatcgggcggaccgtccgaaaaagtcggtattctggccggtgatcgtatcgtcatggtggaagatacgctgatagccggtgtaaagatgagtaccgaggatattatgcgtcgtctccgtggtcctaaagattcaaaagtgaatctgaaaatacttcgccgaggggtgaaggaactgctcccctttacggtgaaaagggataaaatacctgtttacagcctggatgcttcctatatgattaaagataagatcggttatattcgtatcaaccgttttgccgccactacccatgaggagttcaagaaagcgctgaccgggttgcagaagaaaggaatgaaagacttgattcttgatttgcagggcaatggcggggggtatttgaatgctgctatcgatattgccaatgaatttttgggtaaaaaggaactgattgtctatacggagggccgtcgtaatcctcgtagcgagttttttgccaaaggtacgggcgagtttcagaacggtcgtctgatggtattggttgatgaattttcggcttctgccagtgagattgtgaccggagctgttcaggattgggacagaggagttgttgtgggccggcgcagttttggtaaaggcttggtgcagcgtcccattgatttgccggacggttcgatgatccgtctgacggtggcccgctattatacgcctgccggacgttgtatccagaaaccttacgagagcattgaaaagtataatgaagacctgatagaccgttataataaaggagaaatgatgagtgaagacagcatccactttccggattcactgaagttcaagactcataggttggcccgtacggtatatggtggcggagggatcatgcccgattattttgtgccgattgatacgactctctatactaaataccatcgtcagttgcgtgataaaggagcattgatgaaagctcatttccattttattgatgcccatcgtaaagagtggctgggcaaatacaagactttcaatgagttctacaaacgttttgaagtgactccggatatgttggcacaactggttgctaccggcaaggagatgggagtggaatataatgaagaagagtatcaaaaggccctgcctctgctgaggttgcagatgaaagcattgatagcccgtgatttatgggatatgaatgaatattatcacgtcattaatgacgcgaatgaaagtatcaggaaagcgctggaactgttggagcaaccggactttgaggggctgctgttgaaaaagcgatagtcaagactttatattaactgcaggggcgcatagttgcactcctgcagttgtctgaaaaacttctgctgtgtcttcttttaggtgtggaataattttccaaccatcactttatctgtctcccgaacagcaccttattcagccatcggttcacatacacgttcacgaaagcacatcctactccgatagcggctcctgccactacatcactgggatagtgcaccccttggttcatccgggcaaaccctactccgcaagcccatacggctgaaggggcgataacataccacttaggataagtgatggagagtgaggtggctaaagaaaaagctgccgcagtgtgtcctgaagggaatgacggactatcggcatccggtgctccgtatgcatgaatcttatccggatactttacaaaaggccggtcacgacctattatatgtttggcggcgtatgtaatccccactgcttcaatcacactggttcctatgtaaatggcatctttcagcatcggctggtctttttttatcaatgcatagagtcccatggctgtaggtattcctacgggtagaatcactccgctagcggacaatccgcggctcagtccgtgtacatcccatcggttgatggttttcaacgtattgatgtctatattttgtgcgctgaggctgaatgtaaaacaggctgtcagtatgagaaaaataatcctttggcgtttcatttagtttggcatttgttcagtgcaaagataggaaaataatgtaattcgcatttacccttccccgaattaaagaataatttccataattccttgtattatcgctagaattcctttacttttgcatcgtgaatacacagcttttaacagaatttttagttctaacaattaaataatttaaattcaatcatttatgtggttaagtaattcatctattggaaggaaagtggtgatgagtgtcacaggtatcgcccttgtcctgtttctgacgtttcacatggcgatgaaccttgttgcgctcttctcggaagatgcttacaacatgatttgtgaattcttgggagctaactggtacgcgttggttgcaactgccgggctggctgctctgtttgtaattcacatcatctacgctttctggttgaccatgcagaaccgtgcagctcgcggtagcgaacgttatgcagtgaacgttaaacctaaaactgtggaatgggcatctcagaacatgcttgtcctgggtattgttgtcattgccggattggctcttcattttgccaatttctggtacaaaatgcagtttgccgaaattatcggtgttcatgatttgggcgcattcggtcctacagacggtgccgcttacattcgtgaaacattcggatgccctgtatttacagtgctttacctcatttggttagcagctttgtggttccacctgactcacggattctggagtgctttgcagactttgggctggagcaataaaatctggttcgagcgttggaagactattggtaatatctactctactttggtagttcttggttttgcagcagtagtcgttatctacttcgtgaaatcactcgcttgtggtgcttgctaatcgtaaattgtaaatgataaaattgtaaatgaatatggctactatagattctaaaattcctgaaggcgctttagccgagaaatggaccaattataaagctcatcaaaaattggtaaaccctgccaacaaacgtcgtcttgacattattgtggtaggtaccggtttggcaggtgcttcggctgctgcttcactgggtgctctgggtttcaaggtattaaacttctgtatccaggactctccccgtcgtgcacactctatcgctgcacagggaggtatcaatgctgctaagaattatcaaaatgatggtgactctgtttaccgtcttttctacgatacaatcaaaggtggtgactaccgtgcacgcgaagctaacgtttatcgtctggccgaagtgtcaaatgctatcatcgaccagtgcgtagctcaaggtgttcctttcgctcgcgaatacggtggtttgctggataaccgttcattcggtggtgctcaggtttcacgtacattctatgcccgcggtcaaaccggacagcagttgttgctgggtgcttattctgcattgagccgtgaagttcagcgtggtaacgtgaagttgtacactcgttatgagatgttggacgttgtgctgattaaggataacgaaggtgtggaacgcgcccgtggtattatcgcccgtaatttggttacaggtaagattgaacgtttcgctgcccatgcggtagttatcggtaccggcggttatggtaatacttacttcttgtctaccaacgctatggcgtcaaatggttcggctgctatgcaggtttaccgcaaaggtgcttactttgccaatccttgctttgcacagatccacccgacctgtatccctgtacacggtgacaagcagtctaaactgactttgatgtccgagtcattgcgtaatgacggacgtatctgggttccgaaaaagctggaagatgccaaggcattgcaggcaggaactaagaaaccgaccgatattcctgatgcagaccgcgacttctacttggaacgccgttatccggcattcggtaacctggttccccgtgacgttgcttcacgtgctgcgaaagaacgttgcgacgccggtttcggtgtgaacaacacaggtctggccgtattccttgactttaaatacgctatcgaccgtctgggtgaagatgtagttcgtgcccgttacggtaacttgttcgatatgtacgaagaaatcactgacgaaaatccgtacaagactccgatgatgatcttcccggctatccactatacgatgggtggtatctgggttgactatgaactgatgacttctatcaagggcttgtatgctatcggtgaagctaacttctctgaccacggtgcaaaccgtttgggtgcatctgcattgatgcagggattggctgacggttacttcgtattgccttatactatccagaactatttgtcagaccagattcaggttccccgtttctcaacagaccttcccgaattcgtggctgctgaaaaggctgtaaacgataagatccagaaactgatgaatatcaagggtcatcgttcagtagactctattcacaaggaactgggtcacatcatgtgggacttcgtaggtatgggacgtaccaaggaatctttgactactgctctggctaaactgaaagaagtaagaaagaccttctggagcgaccttcgcattccgggtgaagctaatgaattgaatgtggaacttgaaaaggcaatccgcctggctgatttcatcgaaatcggtgagctgatggcttacgatgcattgaaccgtgaggaatcttgtggtggtcacttccgtgaagaacaccagactccggagggtgaagcgcttcgtcacgatgacaagttctcgtatgtagcttgctggaaatacacaggtgaaggaaaagaacccgaattgatcaaggaagatttgaactatcagttcgttaaggttcaaactcgtaactataagtcttaattattaattgtatagaaatcatggataaaaatataagtttcacactgaaagtttggcgtcagaaaggtcctaaggacaaaggacattttgataccttccaaatgaaagatattccgggtgatacctcattcctggaaatgatggatatcttgaacgagcagcttatcaatgaaggtaaagaacctatcgtattcgaccacgactgtcgtgaaggtatctgcggtatgtgctctatgtatatcaacggacatcctcacggacctgctacaggtgctactacctgccagatttatatgcgtcgtttcaaagacggtgacaccattactgttgagccttggcgttctgccggtttcccggtaatccgcgacttgatggtagaccgcagcgcatacgacaagattatgcaggcgggtggttacgtgtcaatcaataccggtggtattcctgacgctaacgcaattcctattgcaaaacctattgccgatgaggctatggatgctgctgcatgtatcggttgtggtgcttgtgttgctgcatgtaagaatggttctgctatgttgtttgtttctgcaaaggtcagccagttggcactgttacctcaaggtaaagtggaagctgcacgccgtgcgaaagctatgttgagcaaaatggatgaactgggctttggtaactgtacaaacactcgtgcttgtgaggcagaatgtccgaagctggtttctatcagcaacattgctcgtttgaaccgtgaatttattgctgcgaagctgaaagactaattacggttagttttacttgatatttgagagtgctctgccttttggcggggcattttttttataattatgtattgggtgaaatttcttccttttcttttttacggatgtttctgggagagtcgccaaaggacttcttacagaagttggaaaaatgtgagagagattcaaatccatgtccaaagcagatttcggagatggaagcatctgtatagcgcaattggtaaaggatactttctttgcgctgtttcatcatccattcataggccggctcgttgaagatggctttgaaaatgcggcggaaggtggtgacgctgtagccgcccagttgtgcgaactcctctacggactttatttgtttgtggtgctttaatatgaaatattcaaaactgctggtgtattgggataggctgtgtacaacaggagatagctcatagtctgtgtaatagtgcgccaacagataataaagttctttacgcttgaattcgagcagctctttacaaattttgtctgcattcagataggaagcaaccccttcaaggaaaagctttatttcgggctttattttcagtggctcggagatgagtggcggaggcacgtttttcaatatataggtatagcggtcatagcagaaggctttagggtcatcaaatgtgtacagaataccatccgagtctgtcatggccagtatttccacttttgatgcgatagcttgcagcacaaattctccggaattgatgatggttccggcatattcttcactattgattaatatttgacctttgagtaagaaaaataaaatattggtttcacacttatgtgggggtaagtggaaaccttttttgttatgtgtgtaatggatgctgttctccactgctttagggcattgggtacaatccatcctttcattacagggcagaccagacatatatagatgttagaaacgcttgtgttcttttggttgatttgacaaatgtaggtcaaatatggataatttgcaataagtttcaggaaaaagaccgaagaatcctgtttccacttgtttgtcttctgccgttacggaaaacgatagcctgtgggcatgagcatagagggctaaatttgtgtggccaaacaaaaagaagttgcaattgttgggaaagtagcagaaagaaagtatctttgtgtgtatccatggggaggtataccggctaaaacagcatagattatggaatttgtagtatcatcctccaatttctccggtatcattggcgagctgcaaactatcgcatatactttttgaggacggttgattgacaacaggtaaaaatgctccgcaaatgaaatcgcaaatcatggtggggatgatacggtgtttcattgcggagcaggaaattgctatgttcttatcaggagattataatttcattgatttataagcttgctgagggatcttatgatgcagggtttttaggagtttgctcgttatcagtagcatcccaattttcatcatatgttgtatttacactcatttcttctgcaccaaccggtaaagttagtatataacggatactttgtccgttggtccattctccggttaaggatacttcttttgaggcattaaagaatgttgcattatccttctctgttttatacttgactatgatttttgcatcagtaagggattgtgggtacagcattaatgaattatcattttgtgtataatcataaataccatctttggctgttacggtattatcgaatgtatagctatagccactagcaggtgcacttcctgttatattccaatttccaccttttccttcggttcctccgaatgtatatgttgcagtaccgcctttggcaccggtgacagttatgctttcaactgtgtaagtatagctgctatcaactagtttcacagcaaagtttatacgggtgaggatgtgttggaatgtaagatttaatgtattatcacttggcttggttacatctttggaataagccactataatatctttttgatcggctggggtgtcaggaagagtataactgatagtaggataagcgttagaactagcaggtgctgtataggttacatcattggtatacccaaaaaattgcatttctgtgataggccagtaaaaagtaccacttgttgttgcccagctaccttgacctcctttatattctataccatccatataagcattaccccatcctgaagttgcaatatcattgcttttaactatataggcatgtaatttaaacgacgtgaaactgctattgcctgtaacagcggctcttgaactctttttgacaattgtgtttactcctatttcatttttactttttggagttccattgtcaataccatcaatttcattctgtgagcaacttgtgattgccagtgcagctaaagctgcaaataaaatcttcttcatattctgtgtgttttaagttaataattctatgactctttattttatatcttaaccaaccggtaattccacattcgtttcatcgtcccagtcactaacgctcccatcaaatccaccgccactttcatctggaggaacctctacatcatccactacaattttctcgtcatccggaagctcaatctctatctcggactcttgaggtttttcatcaccttctcccggctcgtcttcaggaggttttaccgcttccgttatttccactttcgcttcttgtctggaaccatccacccttactatgatcagattcagaaactgagtgatatcagctcttgcctgcgtcagttcgggatgtccgaaacaggtgaaactcccttttataaccccattccctttaccggtttcacaataaatgggagcgaagcggcataaaccggctcctttacctaaatggtaacattcagccattccggaaacactgccaatgatcgatgagacatttttcagcccctctgtctttattgaaaagatgtaagtggttaccacagattttggtcttacctctagtgtcggtaactcttctccttttcctatttctacatcgtccagggttgccacataaaaattatccggtccccataccatgttttctgtttcgctgtcgcccaatcccgtgcagtttcctgtacacgccattatcgtttcgtaactgtcttcgccttttacttgcactacttcggtgtcataattgtaaatcactgccaagtaatgccccgggggcactttcatttctccgccttttgccggcaagtaagtatcaatctttcttccttgggtgtccttgggatagaaaataacccggactccttccggcagacggccggttactccttcccaatccaaacggatatttattcctgttacgggataatcgtccagaatctcgcgtcggctgcatcccactaaagtcaatagtgaagataaaagtacaagagctacgtaccttgtctttttcattttcttcctctcttctttgttatcacccataccaacgaaatttttgctttcgtagggcctataaaggtgtaattcccgctactcatccaaactagtgacccttcatagggagtgtacttttgatattccgtggtcaggtagcctatgcccaggctgaattccaatgccagatgccgtgacactgaagtggaatatccataagtgaatcctgccgcaccgtaatatttaccttggtagccgtctcctttaaactgaaagtcgtagatacctccttcggcatacaatccaaagaaatgtccgttcaaccggtgatgcagttcacggttgcccagccagtagcggctttctattcctcccgaaatcagctggtagcagatttctttgctactgttggaccaccaggggcttttatattccaggttcactgaccaccgctttcctacaggaatttctatttctatattaggcgccagtgccaggtcgtacaataaattatttttcagtgcaagcactgtgttgccggctgtcttgtctcttcttgctgccttttctttgggcttttttccccgttttgcttttgtctctttttccttttctgcctttgttactgttttttctgtttctgttattacttgtctcctttccttttgtgggagtgcttgcaccgctattggcgcaatggtcgtttccctgtcaatcggaatgaattcagtttcttctatcatggccgcctgttccgtggaggagttttttccttccttttcttccggataagacaggcagactcttatttttgtccgtctgagctccggtagcagccggttggaaatatattgataaggtatgccggcatccagatgttgcaagaaatcttgcatttttacaggattgtcatggtgataatctatcaatgccaatacatcctcccggtcggggaccagcctgtcgtccgttatcagtttccgtaaggcatccccgtattcttctcctgtacggatacagatttgggcggcattgacttgcggatatttccgacataagaacgcttttacttcctcgcttctttttaggcccggcgctatgtccggttctttttttccgttatatgaatccggtgaaaccagaataatggaataaagatgtctgctgcgggcaggatgggcaagcagggaatccaatgttgccagcgttttaccgtttccttggtaatccttgtccgcctgtcgggccttcaggtcaaaatagagcatcatgtccaatatggtatctttgggattttcgtactctgtcgtccgggcataagtgctattggtcagtaggcacaaaaacacaaatatgctgaatatagtagtgcgtttttccatggattaccattatgtgtggagcaaatataggtgataaaatctgaaaaaaaacgtattaaatgttctattttcggacgtgaaagggttagtgaagcgattggacagaatttgcaagtttgggcagccggataatgagaagggcagggaagcttacttttatttggagtgaataatcagaggaatactttctttttgctttttactttccaatggacagaaatgaacggtcttatcatatggatagggcaatgtttcatattccttttttaatccgtgtttttcaatctaattgtaatgttgtgtgcgaaaacggttgtatttgtgaaataatactaaatgaaaagcgaaattgaactaaatatttggagaaaatgagtgtaagttgtacatttgtcatgtgatttttttcatagtattagatttaaggttaacaaaggttggagcaaagcgttgctccttttccttttttaagcccttcgcttttgttcttttcctgcctgtcaagtttcctgtcttttaaaatattcagcttcttgttttcatccatcggattttatgttatctttgtgtcaatgtaattaattgacaatctaaatgaaaagacacgcaaaccttttatgcttgggagctgctgttgcattactgaatgcctgcgctccagctgtgaatgctcctgaacctgttttccccattcctgaaaagaaacaggtggattggcagaaaatggagacatacgctttcgtacatttcggactgaacacgttcaatgatcgtgaatggggatatggagattccgatcctgctacattcaatcctgtcaaactggactgcgaacaatgggtgaaaacctttgtggcggcagggatgaaaggagttatccttacggcaaaacatcatgacggattttgcctgtggcctacggggctgaccgaatactgtatccgtaacacgccttataaagacggaaaaggggatatagtgcgtgatctttcggaagcttgcaagaagtatggtataaaattcgctgtctatctctcaccgtgggacaggcatcaggccaattatggaactccggaatatgtggattatttctatcgacagttgtacgagttgctgaccaattatggtccggtgtttgaaatctggtttgacggggccaatggcggtgatggctggtatggcggagcaaaagattcccgtaccatagaccggaagacttactatgactatgcgcgtgcctatgaaatgattgacaagtttcagccgcaagctgttgtattctcggatggcggtcccggatgccgctgggtaggtaacgagaatggatttgccggagcgacaaactggtctttcttgcgtgccggagaggtttatccgggatatcctaagtatagggaactgcaatacggacatgcggacggcaatcagtggacggctgccgagtgtgatgtgtctatccgtccgggctggttttatcatccggaggaggacgaccgggtgaagacggtggagcaattgacagacctttattaccgcagtgtgggacataatgcgactttattgcttaatttccccgtaaaccgggatggattgattcaccctacagattcggcgaatgctgttgatttttataagaatgtacagaaacagttggcaaacaatctgttgaaaggtgttcttccgatagtttccaatgaacggggtggaaaatatacggcaaaggcggtgacggatggagagtatgatacatattgggctacggaggatagcgtcacatcggctgttatcgagtttgaatggccggtcccgcagaaggtaaaccgtatgctgttgcaggaatacattccgttgggacagcgtgtacagtcctttgtggtggaatataataaggaaggggagtggctgcctgtgaaactgaatgaagagactactacaatcggttataaacgtttgcttcgttttgagactgtcactacggacaaacttcgcgtgaactttgagaaatcacgcgcctgcctgtgtatcaataatatagaggcttattatgcaggagaaacccttgatgtgtttacagcaaaagcggaggaactgaaaacatatccgtttacattgccgaaggtagatgaagcggaagccggaaaatgtgcggataaagatgccgccactacttgctttgtggacggcaatacgcttctgatggatttaggtacggaacagactgtttcttctttccattatttacccgaccagagcgagtataacaaaggactgatagctgcctatgagatttcagtcggcacggaagccggtgcggtgaaccaggtggtgagcagcggggaattctcgaacatcaagaacaatccgattctccaatcggtctacttcagtccggtaacagccagatatgtgctgttgaaagcagtgcggatggtggaaaatgacggaccgatgggctttgccgaactaggagtgcaataaccatgcatcaatatactcatgtacccgttcacggtacagctaccgtatgtcaatgggtatgtgagtatcttgatacatggttacattattaaccggtacactcctcctgccagtgctcgtatcacccctttcatttctaattcaaacagtaatgcactcattcggtttacaggtatgttggtgtctatcaccaatgtgttgatttgtaatccttccggcattttgccgagtcgttttactattcgttcctcttcctcgcttaaatcagggaacaattcccgttgtactgttttctcggttttggggctactttcccatcccatggccttcactaaatcttcggccgatgtgataagcactgcctggttttttcttatcagattgttgcagcctatggaatattcgtcgttgcatcgtcccggaaaggcaaaacagtcccggtgataactttccgccagttcggcggtgatgagggctccccctttggcggcggattcgataacgacggtggcgtcactcatacctgccacaatgcggtttcgtttcacgaaattctgcctgtcgggattggttccgcttgtaaattcggtcagcaaacctccctgttccaacatgctgacggctgtcttccgatgttcggcaggataaatacggtccagtccgtgggccagcacgcctatggtcttgaaatgattctgcagggcggcgcgatgcgcatggatatcaatgccataagccagcccgctcactatcaaggcgtttgggcacaacaccgacaagtcggcaaggaagcgggtgcagatatcctgtccgtagggggtggcatgacgggttcctaccatattgatgacatgcagtgcattcagatcggcatttccccggtaaaataaagctagcggagcatcatcacattcacgcaaacggccgggataaccttcatcatttaaggtgaggcagcggatatgatttttctcacagaaagttagttcctgctctgcacgccggaaagcttcggagttattcaacgcagtaatgatcttttcgcttactccggggaccagttgtgacagctctttgcggtgttcgaaaacacgggtggcgcttcccagactgctcaccagtctgaatgcgcctgtcggtcccaatcccggtatccgggtcagggccaggctgcaaatttgttcgtcttgtgtcattcgctcagatagggggcgaaagtctcgtcaaatagagcgctgtcccctaatctgccgtttaccacgcatactgattctacagtggccttgacagtcactttcatgtcgggcagacggaaaatgtcctgatagaacacatatttaataccttcttttttcagatagagcttggacacgaattcgtcaccgctgcgcagcggagttttgaacgccatggtgagcctcgccactaccgggtccactccttcttcgtgcaagcgtgcgaaactgatgcccaccgatgtgagaaactcatggcgcgtatgttccagataatgttgatagttggcattgttcacaataccctgcaggtcgcattcataatcgcgtaccttcatcttcagttcataaatatacttttccataaggcaaaggtataagaaaaatgtgttactttgcagataaacttaaaaaaagaaacaaatgaaactgtacgctgcccctttgcaaggttttacggaagccccctggagaaatcttcatcaggaagtttttggtgggatagatgcttattataccccctttgtgcggatggagaaaggagagttccgtaacaaggatgtacgggagatcgcttctgaaaacaatactgtgtcccggctgattccccagcttatcgcttccactcctgccgaactggaacggctggccggtttgtttatagagaaagggtacaaggaagcggatatcaatatgggttgtccttttcccctgatgacagggaaacataagggttcgggcattttgccgtatccggccgaggtggaagctttattgaaagagctggtgcactatccggaactgggtttctccgtcaagatgagattgggatgggagtgtgcggatgaatggcggctgttgttgcctttgttgaacgctgcccccttgcggcggatcgttctgcatcctcgtatcgggaagcaacagtacaagggagaggtggacttggctgcgttcaccgctttctatgaggagtgcgcccatccgttggtgtataacggtgacttgctgacggtggaagatatccggaaggtggacgaggagtttccccgcctggagggcgtcatgctgggacgcgggttgctggccaatcctgctttggcttgggaatatgcaaacggaaccgttttttctcccgatgagctgtatgaaaaggtgaaggcgcttcacgcacgccttcttcaatattatgaatcccatttacagggagaggcgcaattgctgagtaaaatgaagccttattgggaatatctgctgcccgatgcggaccggaagataaagaaagcgataaagaaggctacaacgatggataagtatttgacggcggtgaaccagctgtaatgatggaaaaggggcttcggtacatgaaaaccggagtgtctcttcagttcattcagccggtctaactgcttgtaaaatagggaagtatcctgataggagaaccttcagtttcctgtcagttacttccagcccatatttttgttcctacctgttagatgagaggtatgtctgtcatgcctgtattttaagaaatacttagctgtcttttcttggagcatatcctttatcttccttgttgtgcatccattgcttccgtaagcattcggcctcgtgcgtgtttttttcccctcttttccttcctacctttgtggcttcattataatcttaatccattatgtgttcagta
